United States Patent Application Publication US 2024/0301345 A1 - sequence listing, part 19

SEQ ID NO: 3234 - DNA, 11941 bp, Unknown
  R53_2m  MAG No. k141_6703
ctgcattcgctgcccgaaagaatttgacgaattcatttttatcgggaggcaggaggcagcggctggttcggactgcattagcggttagcggggaacgattcgcccgcgacaacagcccatcacgccaaacttgacaagagtgacgtcggtgacccgtgctgcggcaagcacctcgacagggatggtgacggtatcggttgctctcaggctagtaggcccggatagagttcgttgatcgcccaggcgacgcggccggcatcatatgccgaaagtcttcctgtcgggccgtcgtcgaggaaaagattgcttggcagccgcagcagttgcgagcatcgcacggcgctgggcttgctcagtcccgcgtcctgccagtcacgcagcaccacatagcccggttcgtcgcgccaggtgttgccggtgaccttggtcaccaaggcgatgcgggtgccgtcgtcccattggaggatcacgctgggacggttcttcgctttgcctggcttgtcgggaaaagcgaacggcacccaccatatctcgaactggcgcggatcagtcttcatcatcgtcccaaccctccggcaggatcacggcaccatcacgtatctggggcgtcacgatgcggggatcatccatgttcgctttgaacaggggatatccctcgttgtctttttcgaatgaagggcggacgcttggcgtgaatggcagacgcccgtcgcgtaccaattgtctgagagacatttcggcaaacgtgctcaggttcaaccccatggcgtcaagtatggcgatgccgtcacgcttggtctgcgcatccagactgatcgtggtcttctccttgatagccatcattactccttataacagtggtgtgacatacgtatatcatacctcaaatcagtcatgtcagctggggccccgttgtctatttgtaagtgcaacatccttgttctcggctgattctggcggttcgtcggcgaatgcctcggcgggggtgcgctagccgagcactcgcatgggcctgttgtcggtttcgtcgatggtctcctgcggttcgcgtgccatggagggggcgacgggcctgcgttttagcggactgcggtagcatgggaaccatgattctgcatttgcatctggttcgtcatgggcaaaccacgttcaataaatacaaccgtcttcagggatggtgcaatgcgccgcttaccgcatccggacttgccgatgccgacagggccgggcacaaacttgagggctatgattttgcggcggcatattgttccgatacttctcgcgccgaaatcacagcgaagcgaattctcgatatcaatgaggctgccggacatgcacggccagaactcacggccgatatgcatttccgcgaacaatgctacggatacttcgagggtcaggacatgtcgctggcttggaccgctgcgggtgggcctcacggcgcgaaggactacaacgacatcgtagccaaatttggtctggccgcctcccgtgatttcctgaaagaggccgaccccttccatgacgcggaatccgatgaagaatactggacgcgcgtcgaaggggcattccagctcatcgccagcaaccccaatctcaaggatggcgatgatgtgcttcagatttcgcacggtaacacgctgctcagcctcggccaccgtttcggaggccctgatcttgaccttagcgaacgaccggccaacggctcggtaaccgtactcgacttcgacacgaccaaaccgttttcgcaggccgtgaccatcgtctcatacggcaaatagcgtatttcatcgtcagttgcacgggtaaataggggaggagtgctacccttatccgagtaagtgtgacctcaaggaggcaacaatggaagtcggagagatcgctggcctgatcgcggccatcgcgttcgcagtattggccggtttcatgatctatccgctgatcaggctgggcaagatgtttgatcagatatcgcagacggtccgggagtccggtgaacacgccatccccgcgctggacgaaggcgtgaccaccgtcaagcaggtcaacaagtcgcttgaagacgtgaacaagatttccgccgcggcttccaccaccgccaacaacgttggtgcgttgaccgatttgtatggctccttcctcggtaagcccatcatcaagattgcttccaccttctacgcgctgaaaaccacggggcagtccttccttgcgaagaacgccgcgaaaaccgccgtcaacgacaccgccgagaagggggagtgatgttcaaacgcatcttctgggtcggcgtcggcgtggccatcggaatcgttgccgtcaccaaggcacaggcctatgtcaaggccaatacgcctgatgcggcacgccagttcctgcttggccccgatcaggacaatgtgccgatgaaaacactcgaagggttggtcaacgagttcaatgccacccgtcgagcccgcgaggctgagctcaaccgtcagtacatcgagcgcgccaactgacacgcgcatgccgccttgccatctagtcactgaaccagctagaacaaactagtcctcataatccagtctttttccaccaataccaggcgcaactgcgcccattacccaaacaaggagttcatccgctcatgcgcactgcggacatcgccaagcgatacctcgattacttcgccaaacatgatcatctcgtcatgccttcggcatccctgatttccccgaaccccaccacgctgttcaccatcgccggcatggtgccgttcattccctaccttcttggtgagcagaccccgccgaagcgccgtatgacatcgaaccagaagtgcgtgcgtacgctggatatcgatgaggtcggcaagaccacccgccatggcaccttcttccagatgcttggcaacttctccatcggcgactacttcaaggaagaggccatccactacgcctgggagctgctgaccaccccgcaggaccagggcggttacggctttgacccggaaaagctgtgggtcaccacctttaccgacgacgaggaagcccgttccatctggaagaacgagggcttcgatcccgagcacatgcagattttcggcatggaagacaacttctggactaccggcggccctggccccggcggcccctgctccgagatctacgtggatcgcggccccgaatacggccgtgatggcggccctgcggccgacgagacgcgcttcatcgaaatttgggatctcgtgttcgagaactacgaggtcgacaatgtcaagtccaagaccgacctgcacatcgtcggcgagctggcccagaagaacatcgataccggcgccggtctggaacgcttggcctacctgatgcagggcaagcagaacatctacgagaccgatgaggtcttcccggtcattgaggccgccgagcgcctgtccggccgcaagtacggcgaggacgagaccgctgatgtcaagttccgtgtcgtggccgaccacgtgcgttccgcgctgatgattatgtccgatggcgtgcgtccgagcaacgtcggccgtggctacgtgctgcgtcgcctgctgcgtcgcaccgtgcaggccatgcgcgtgcttggcgtgaccaatccggtgattcccgagctgctgcccgtctccaaggaggccatggtcgccagctacccggagctcaacgacacgttccacgatgtctccgaagcggcctatggcgaggaagatgcattccgtcgtacgctggagaacggcatcgagattctcgacgtggccgtcaagaaggccaagaagaccgccgacccggtggtctccggttccgacgcattcactctgcatgacacttacggcttcccgatcgagttgaccctcgaaatggccgccgatcagggcgtgaaggtggacgaggccaagttccgcgaactcatggccgagcagaagtcccgcgcacgcgccgacgccctgaagaagcgccacaacgtggacctctccgtctacgacgatttcaagaagacgctcgtcagcccgatcgacttcctcggctacacggatatgtctgcccgtgccaaggtcatcggcatcatgcaggaaggcaagggctccgtgcccgccgtgaccggcccggccaacgtcgaggtcatcctcgaccgcaccccgttctacgcggaggccggcggtcagcttgccgatcagggcgagatcctgtccgacgacggcgccgtgctcgaagtcgacgatgtgcagaagcccatcaaggacctcatcgtccaccagtgccgtctgaccgaaggcacgctggtcgtcggcgccgaagtcaacgccaacatcgacctggcccgccgtggcgccatcgcccgctctcacaccgccacgcacatggtgcacaaggcgctgcgtgaggagcttggcccgcaggccacccagcgcggctccgaagacgccccgaaccgtctgcgcttcgacttccagtggtccaaggccccggccaagtccgtgatctccgcagtcgaggagcgcgtcaacgacaagctgcgcgacaacctcgccgtgaccaccaaggaaatgaagttcgacgacgccatcgcactcggtgccatgcacctgttcggcgagaagtacggcgacatcgtacgcgtggtctccatcggcgaagacggctggagccgcgagctgtgtggtggtacccacgtggaccacgttggcaagatcggcatggtcaacatcctgtctgaagcctccatcggctccggcgtgcgtcgtgtcgacgccgtcgtgggccagggtgcctatgacttcaacgctcgtgagcacgcgctggtctcccagctgtccgataagctcaacgctcgcccggacgagctcgccgagcgtgtgaacgccctgctcgccaagctcaaggaatccgatcgtcgcttggcctccatgtacgagtcccagctggccgcctcggttccggcgctggttgctgacaccaagaactccgcggccccggtcaaggtggctgtcaagaacgtgggccacttcggcgcggtcgacgccctgcgcaagaccgtgctcgacgtgcgcgcacaactcggtgaagacgcccccgtggtggtggccctcgccggcgtgaacgaggatgacaagccgatggtcgccgtggccaccaacgaggccgcccgcaaggccggcatcaaggccggtgatctggtgcgtggcgcagccaaggtcctcggcggcggtggcggcggcaagccggacttcgcccagggtggcggtgtcgatgcctccaagatcggtgaggccctcgaagcgctcaagcacgaggcgcagaaagcctgattccgccagtggtgtggttaggcgttgatttgggtaatgcccgggtcggactggcactgtccgacccggagcttacctttgcacaccctgctggcaacattcatgttgccggcgactatttctttgctattgacgaggtcctgaacgtcatcgaagacgaacatgtggaccatgtaatcgtcggattgcccctgcagatggacggtacagaaggcaaaagcgccaaaaaagcgcgcaggtgggcggccaatctggagaagaggctgcaagcagagagtgaagacagtgattctacggagtatcagattccgcaggtgtcattgatagatgagagattgacaacagtcagtgcgcatcgtcaactgttcgaggcccataaagcttcgaacaagcacaggccggtggttgaccagcagtcggcagtggtgattttgcagacggcactcgaccgtacccgggagcagtgaggtatcggttatgaccgatgattttaacgagttctttgatgacaacacgcattgggtcgaacaggggtcagaaccaatgcgcgggaccgagccgccagaaccgccgaaatcccgcaaggagatgcgcaagcgacgtgcacagcgcaagcgcaagcgcgtcagtggcattatcatcgctatcgccatcgtcgccctgcttatcggcggcggctatttcggcgtaaccaagctcatcgcatggcgcgacagccggagcaaccagtcgacggccatcgcggactatcggggaccgggctatggcgaggtcgaattcaccgtgagcgagggccaaggcgcggcggagatcgccgataatctgctcaaggccgaagtcatcaagtctactgccgcgttcaccagcgtggtcaacgccaatagcgcgacactctatccgggaacgttcacattgaagaagcatatggccgcatccgatgtgatcgccgttctctccgacaccaaccaagcggcgggcttccttgaggttcatcccggtgaacgtgctaccgatgtgttcgccgacgccgcgaagctttccggcgttgcccaaagcgaattcgacacgattatcaagaacaagggtaaggatattctgcccaatgaagcgggcggtagctttgagggatggctggagccgggaacctacaacgtcaagagcatgaagagcgcttcggaaatcctcaaggccatggtcgataagcgtatcgccaagttggatgaattgggcgtgccgaccggcagtgaccgcgaacgggtgatgatcatcgcctctatcgccgaggccgaggtcaacaaagccgattactacggcaaagtgacgcgagtcatcgagaaccgtttggagcagggcatgtcgttgggcatggattccaccgtggcctatggcaataacgtcaagcccgcgcaggtgaccaccgagatgacccaagacgagtccaacccgtacaacacgtacaagatctccggcctgccgcctacgccgatcagcaatcccggcgatagcgccattcaagcggcactgcaccccgaaagcggcaattggctgtacttctgcacggtcaatctggacaccggcgaaaccaagttcgccgtaaccgccgatgaacatgaccagaacgtggccgaactacgcaagtggcaagccgaaaaccagtagtcatcccgttagcttccctcgccgaggggagctgtccgcaaagcggactgaggggagtgatacgggattaagccccaacaaccaccgccacaatcgcgcccaccaatatcaccggcacatacggcaccttgcccgcatgtgccggtgatgtgcgttgtgggtcgaatcgcgtccacagggcaatccatgtgatgccggcaacgcccatcgccagccaccagaccaccacaggcaacaggccaaacagtccgacagacaatcccataggtatcaaggcggtcacatcgccgaatcccaatgaccgcggcaccagcaacgccaacgcgaactggatcaggcaacatagcacggtgaacaacagcgcctgcaacagcacgaacaggtcgttcgccaccactccatgcgcgaaatcggcggccaactggattaacgcgcccacggccacccatgcgatcggcacccgccgatgacgaacatcctcaatggacagtgcaagcccacatagcagaccgggtagcgtgaacaggtatggcatggcttaacattaacccctagttagacgtacacatagacgtacacacatgaaacgagggaagttatgctgcgttggcagacggcaggggagtctcacggagaagcattggtggccatgattgaagggttgccggccggcgtgcgcattagcacggacgatatcgtttccgcactggcacgccgtcgacttggatatggccgtggggcccgcatgaagttcgagcaagacaaggtccgtctgctgaccggtgtacgccacggtctgaccctcggctcgccggtggccatcgaaatcgccaacaccgaatggccgaagtggaccgaggtcatgagcgccgatgcactcgaccatgacctgccgcgcgaaggccgcaatgcgccgctgagccgcccgcgcccgggccacgccgatctgaccggcatgcgcaagtatggttttgacgacgcccgcccggtactggagcgctccagcgcccgtgagaccgcctcccgtgtggccttgggcgaggtggccaagcagttcctggatcaggcgttcggcatccgcaccgtagcccacgtggtggcgctcggtggcgtgcagaccaaccctgatttgccgttgcccacacctgacgatctggaagcgttggatgcctctcccgtgcgtacgttggataaagaggccgaggtccgtatcatcgaacgcatcaacgaggccaagaaggccgccgatacgttgggcggcgtgattgaagtgctggcttacggtgtgcctgccggcatcggcacgtatgtggagtccgaccgccgactggacgcggctctggcctccgcgattatgggcattcaggcgttcaagggtgtggagatcggcgacggcttcctggaagcctcccgccccggttcgcaggcgcacgatgagatcgtggtcaacgccgacggtcgcatcgaccgtctgtccaaccgcgcaggcggcattgaaggcggtatgtccaatggccaggtgattcgcgtacgcggtgccatgaagccgattccgtccatccccaaggccctgcgtacggtcgacgtgctgaccggcgaatccgcacaagccatcaaccagcgttccgacagcaccgccgtgcctgcggcatccgtggtggccgaggccatggtgcgtctgactttggcgaagtacgcgctggataagttcggtggagacagtgttgccgaaacacggcgcaaccttgagtcgtatctcgcctcgtggccggagcacatgcgctgaacgaagggcgtatggtttcgtgacgactgccgcggaaccatcagcaactgtacccaccaatcgtcgagaggattcgtagattatgaccgcacgcccccgcgccgtcatcatcggcatgatgggagccggcaaaacacgtgtcggtaaggaagtggcgcatatgttgcgtctgccgttcgccgatgccgatgtggagatcgaacgtgaagtgggcatgaagattcccgcctacttcgaggaatacggtgagccggcattccgcgaggtcgaggccgatctcatcgccgatatgcttgaggatttcgacggtatcttttcgctgggcggtggcgctcccatgacgtcctccacccagcatgccctcgcctcctacatcgaccatggcggtcgtgtggtctaccttgatgccgatccggcggaagccatggaacgcgcgaaccgtgggggaggccggcccatgctcaatggcaacgccaactcccgttggaaaaaactgttcaagcagcgtgacccagtattccgcgaggtcgccaacgttcatgtccatacccgggggcttacgcctcagggcgcagcgaagaaagtgattgatatggtatctgagcgagcagtgcatgttaccggaacggcaattgagccgtatgatgtggtcattggcgaaggtgccatgaaccatctggccgatgtgctgggacccaaacccgccaaaatcgcgcttatccacactcagtcggtgcagcgacactccgatcgtgcccgcgctctgttgcgtcagggcggctatgaggtttccgacatcgtgattccggatgccgaacccggcaagaccattaccgtggccaacggcatttgggaacgccttggcaacgaaggtttcacccgatccgatgccgtggtggggcttggcggcggtgccgcaaccgatttggccggtttcgtggctgccacgtggatgcgcggcgtgcgctatgtaaactgcccgacctcgctgctggccatggtcgatgcctccaccggtggcaaaaccggcatcaacaccccgcagggcaagaacctcgtcggctcgttctacacgcctgccggtgtgctggccgacaccaagacgctggctacgctacccaatgacatcttcatcgagggtctcggcgaagtcgccaaatccggtttcatccgcgaccccgaaatcctgcatatcctcgaagaccacgcagctgaactgcgcgctttcgacggctctacattcctcggctcgccgctcgaagacgtggttgccgagctcattgagcgcacggtaaaggtcaaggcctaccacgtctcctccgatttgaaggagaagggtctgcgtgaattcctcaactacgggcacacgatgggccatgccatcgaaaagctcgagcacttccgctggaggcatggcaatgcggtggccgtcggtatggtgtatgccgccgagctggcccatctgatcggttacatcgatcaggatctggttgactatcaccgttcgttgctcgcttcgctgggtctgccgacgtcgtggaatggcagctcgttcgacgacgtgctcgcattgatgcatcgcgacaagaaagcccgtggcaacgaactgcgtttcgtggtcctcgacgagattggtcacgtcgtacacctcgacaacccgcccgccgaagccgtagaagaagcattccgtcgtatccagcagtaattgaacggccgtaggccgtgccgttcgccatcccctcagaaaaagtacttggctcccctctaacggaggtgccccggagtcggatttaccttctacctccctctgatgagggaggtgccccgaaggggcggagggagagaagcacaaacaaaaggagtcccaatgaccaaagtcattgttgtcaatggccctaacctcggacgtctcggcgtccgccagcccgacgtctacggtcgtcaagacctcgacaccctgcgcaagctctgcgccgaatggggcaaggacctcggcctcgaagtcgaggtgcgccagaccgacgacgaagccgaaatggtgcactggatgcaccaagccgccgacgagaaaaccccggtggtcatgaatcccgccgccttcacgcactattcgtatgctctcgccgacgccgcgcacatggtcattgatgagaacctgccgcttatggaagtccatatttccaacccgtccgcccgcgacgagttccgcaagcgttccgtaatcagccctgtggccaccggcaccatcaccggcatgggtttctacggctacaagctcgcgctcgatgctgtggcgcacttgctgagcgaatagaaccaagccctccagccaatcacgggtagcagtcgacgttgcgcccgggattcctgttccgacgaatcggaccagaatcctcgtcctggtgcgccttatggacccgaagtacgccgtgtattcgaccatatgctggccaaggcagaacgagatgggctgcctacgcacgactacaccggccacgtcatgaacacgccgggtcatacacggatgatagagtgaaattccatggttagaagaacacatggtaattctcaagaacacgtcaccaagcatattttcgtcactggcggcgttgtctcctctctcggcaagggcctgaccgcatcttcgctcggtcgtttgctgcgcagccgcggtatccatgttctgcagcaaaagctcgatccgtacatcaacgtcgacccgggcaccatgaacccgttccagcatggtgaggtctacgtgaccgaagacggtgccgaaaccgatctcgacatcggccactacgagcgtttcctcgacgtcttcctgagccagaaggccaacgtcaccaccggtcagatctatcaggaagtgctgcgcaaggagcgcgccggcgaatacctcggccagtgcgtgcaggtcatcccgcacatcaccaacgaaatcaagtctcgtatgcgcgcccaggcttccgatgacgtggatgtgatcatcaccgaaatcggtggtaccgtcggcgacatcgagtcccagcccttccttgaggccgcccgcgaagtgcgtcgcgatctcggcccggacaactgcatgttcgtgcacgtttccctggtgccgtacatttccgccgcccacgagctcaagaccaagcccacccagcactccgtgatgatgctgcgtcaactcggcatctccc

SEQ ID NO: 3235 - DNA, 40536 bp, Unknown
  R53_2m  MAG No. k141_6733
tacatcatggacgccatctccgccgccggctacgagcctggcaagcagatcggcatctgcctggatgtcgcctcctccgagttctacaacaaggagaccggcaagtaccgcttcgacggtgaagagcgcgactccgcctacatgctcgactactacgagaacctcatcaacgagtacccgatcgtctccatcgaggacccgttcaacgaggaaggctgggaagactgggctgccatcaccgctcgcctcggcgatcgtctgcagttcgtcggcgacgacctgctggtcaccaacccggctcgtctgcagaaggccatcgacctcggcgccgccaactccctgctggtcaagctgaaccagatcggttccgtcaccgagaccctcgacgccatcgagctggccaccgccaacggctacacctccatggtttcccaccgctccggcgagaccccggacaccaccatctccgacctggctgttgctaagaacacccgccagatcaagaccggtgccccggcccgtggcgagcgcgttgccaagtacaaccgcctgctcgagatcgaggaggagctcggctccaccgctcagtacgccggctacagcgccttcaaggcctgcaagaagtacttggccaagtgagctgaaacgcccgtaaaggcgtgagtttccactgaagctcgatacccgtcgtgttcgtcaagtcgaatgcggcgggtattttcatgtgacatgagcaagtcgtcccgtaccggcaaacccggcaaaaccggcaaagcacaagtcaggaaaaaagggtcggcggggcccatagcgttcttcgtctccctgttcatcatcgcactcggcaccatccagctggtctccaccttccacacttatgccctgaacctggccgagctcaatggcctcaagcgtgaggaagcctcgctgatcgcccaaaagcaggagttggagaacgatatcaagcgttgggatgacaaggcctacatcaccgcccaggcccgtgaacgcctcggcttcgtattccccggcgaacaggccgtgcgtgtgctgcatcccgaagccgtgaccggctccgatcgcgaatcccagaaaacggaagattccaataccagcaacaaaaaagtcctgccatggtacagcgaactgtcttactcgctcaaaaaggccgatgagcctgtgaccgatagcgagtccggcaaatccgatacttccggttcctctgactcgtcatccaacgactcatccaagcagtccgataagtcagaccagaacactcaatccgatcagaacacccaacagaacacaggggagggaacccaacagtgaccatcgatatcgccgccaaggccaaggcccttgtcgacaccatgcttgccgagcccgccaacgaccatgacatcgacctggtgcagcgtcagctcggccgatacccgcgcggcatggtcgccgtgggggcgcgatgcgtctgcggtaggccacttgccgtaatcacccgtccggtgttgcccggcggaatccctttccccaccacgtgctatctgaccggtccggaagccgtcaaggccgcctcccatgtcgaggccgccggcgtgatgcagcaatacaacgatatgctggccgctgatgaggagctcaaggccgcatatgagcaggcccataatctgtatctggcattccgtcacgaactggcaggccgtcttggcgacagtgaggagcatattgaaggcacttcggccggtggcatgccggtgcgcgtcaagtgcctgcatgccctgctggcccagtccttggttatggggccgggcgtcaaccccattggcgatttggtgctggaacgtgtcaaagacgagttcgatccgaccgtctgccgttgcacgctggatgattgatcaacagatgagccaccgcgaacagcccattcatacgcactaagggatacgaggagaaggcaatgagcaaggaatccgtaaccgtcgccggcattgattgcggcacgaactccattcgactgaagatcgcacgtgtcgatgccgatggcatgcatgaggtggtgccgcgcatcctgcgtgtgatccgccttggtcaggatgtggacaagacccatcgttttgccgacgaagcgttggaacgcgcctatgcggctgctcgggaattcgccggtgtgattgccgagcatcccatcgacggcctgcgtttcgttgccacctccgccactcgtgacgcggaaaaccgtgaggagttcgaggatgagatcgaacgtatcctcggcgtgcgccccgaagtcattcccggcactgaagaagccgacctgagcttcctcggcgccacttccgtggtcaatcgcgacgatctgcccgccccctatctggtggttgacctcggcggcgggtccactgagctggtcatcggtggcgacggcgtcagtgcgcccaccacccaggttcagggcgcattctccatgaacatcggttccgtgcgcatgaccgaacgtcatctgaccaacgatccgccgacccaggcgcagatcgatgaggccgttgcggacatcgacgagcatatcgatgaggccttccgcaccgtggacgcaggcaaggcccgtaccatcatcggtgtgtccggcacggtgaccacgatgaccgccttggccatgggattgaaggaatacgatcacaccgtggtcgacgggcatcggttgagccttgaagacgcctatgccgtggacgacaagttccttaggatgacgcgcgccgagcgccgcgaatacaagaccatccaccccggccgtatcgatgtggtcggcggcggcgctgtggtctggagccgtgtgctggcgcgtgtcagcgaagccgccaaggccgatcatggtgaagccatcgattcgttcgtcgccagcgaacacgggctgctggacggcattgtgctcgattatggtcgccggttgctggctcaatagcgtaagtggtaagtgcctccagcgggctgagccgttaagcaaacagcccggtgggctgtttgcgttatatgcgacgccggcgacgctatcgctaccggctgctacaaacagcccactgggctgtttgtaggcgaagggagcggctatgccgcgacggctgcacgaagcgcagcaacccgcaagcaatgctcagggcaggagatagcttataatagaaaagttggcctccgtggcgaaatggtatacgcagtcgacttaaaatcgatcgcttcggcttgtgggttcgagtcccaccggaggcaccttgaaatcggcctgtggccgatgccgttttttgcggctgtgccgcggtctctcccccagtcggcttcgccgacagctcccctcgtcagaggggctcgcagcttactatgtggagagcttataaggccgaaacaaaaggccgttaggctatgtggcgttgtgacgatgtacctgatgaaacgaggaatccacatggcttcacgctggaccgatgtcgaacgagtcgaacaaggcgccctgcccaccatgcttgcccaagccgtcattgcgggcactgcactcaccgttggtgccatcgcctgctcgggattctatctgtccatgatcggcaatgtggccgcactcctgccgtgggcgactatcgtgatactgatcgccgtggcgttcacctacatcgtcggcttcgccctgttgtggtgtgccgaagccctgaccctgcgtgccaacgacaaactcaagccatggctgtacggcgtcgtcggattaatcggctacggcgtgtggggcatgttcgtgatgagcacgatgatgaacacgctgaaccagccgctgaacggcgtggtgttgtcgaacagcgatgtgatggccctgaccgtcaactacgcggtgttcggcttcatcgccttcctgctggcacaggcgtacgcgcccaaaatcgccaccaagaagggactgaccatcgggctgatggtggtgcagatcgtattggccatcatcggcatcatcgtactggttatgatgttctccgcactatctcactgactgacttatcgctcgccggcacgacgcgcgcggccatcatcgcgcaaagcgaaagattccgggcgctaggctggaatacgatatcgtgatggcatgacgcctggtgacaccggcatgccgaaccagcaggggagaaggagccaaatgttcagtgtgcttgacatgttcaccatcggcgtcggaccttcatcctcgcacaccgtaggcccgatggtcgcggcacatgcctttgcctcctcgttgctggccgaccatttggtcgatcgcaccgcacgtgtcaaaatcacgctttacggttctctggcgctgaccggtctcggccacggcaccgatcgtgctgcgatggccgggctcgaaggcaatctgccggccaccgtggataccgaccacatgatgcgcatccgcgagacctgcgcgttggacgatactctgaacctcgccggcctcaaacgcatccatttcgactacgaccgcgacgtggtgttcgaacaatggaagcgcatggccgcgcaccccaatggcatgcgattccaggctttcgacgccgccgcaagcttggtcgacgaacaggtctggtattccatcggcggcggattcgtgcgcaaaggcgctcccgaagacccgatgatcggcattcatgaacgtcctccggaaggcacctcctttgccgacgcggacgaatcatcatccactgatttcggcgtcgaggcaccctacccgttctcatcatgcgccgaactggtgtcgttgtgccgggaacatcatctcagcatcgccgaacttgtatgggccaacgaaaccgcttcacgctcaggcatccaggtccgatccgatattgatgccatctggcgtgttatgcgcgcctgcgtggaccacggatgcacctcggcggagcccacattgcccggtggccttgacgtaccccgccgcgcgccgaagatgtatcggcgtctcgcttcgaattccgatgtgctgcgccgcgacagccggcgcaaagacgccgtgctcgagtcttccgacgccgcatgggtggatctcttcgccttggccgtctctgaggagaatgccggaggcgggcgcatcgtaaccgctccgaccaacggttccgccggcatcattcccgccgtgcttcactattactggcatttcgtggacaacgccaatgaacagggcgtggtcacgtttctgctgaccgccggtgccatcggatacctgttcaaacgcaacgcctcaatttccggtgcggaagtcggttgccagggcgaagtcggctcggcctgttcgatggcggcggccggacttgccgcagtcatgggcggcacgccggaacaggtggagaatgctgctgagatcggcatcgaacacaacttgggcctgacttgcgatccggtgggcggactggtgcagattccatgcatcgaacgcaacgccatggccgccaacaccgccatcaacgccgtgcgtatggccatgctcggcgacggctcacacatcgtgaccctcgatcaggccatcgaaaccatgaagcagaccggtgaagacatgatggccaaatacaaggagacctccaagggcgggcttgccgtcaatgtcgtcgaatgctgattgacatgtctggtattcaccagcatgatgaccggaattgacgtatacggccagcgtgtcgtatcgcacagggatgaaggactaccgccgattcgccgatggtgctaaggtagggcgcattgtgtctttgaaggaggactaatggcagatcagatgcctcaggtgaacgccgaattcggcaccacgcccgttatcgagtttccggcgcccgaagccccgaagggcctcaaggttgtggagctgaccgagggcgacggcccgatcgtgcgtcgcggcgacaccgtcaccgtgaactaccacggcgtggtgtggggtaaggacaccccattcgactccagcttcgaccgtcatcagcccgccagcttcggcatcggcgtgggacaggtcatcaagggctgggaccagaccgtgccgggccataacgtgggctcgcgtctggtggtttccattccgccggaatacggctacggttcccgcggcatcccgcaggccggcatcggcggcgaggacacgctggtgttcgtcatcgacatcatttccacccgctgaccataggtcagcacatgacgaacgccggggtcatagccggcgttttgtcataaataacgaaaattgtttcagcatcgacaacggttcaggaggacgatatggctgaggacaaggtctacctgctgacgcaggaagcatacaacaagatgaaggaagagctcgcccatcgtgaaggcgagctgcgtgaggaaatcgcgcacaagatcgccgtggcgcgtgccgagggcgacttgtccgagaacggcggctaccaggccgcccgtgaggcgcagagcaagaacgagggccgcatcaccgagctcaccgtcaagctgcgcgattccaagatcatcgagaatgccccggaaggcaccgtgggcgagggctctgtggtgaccatcgagctcaacggcaacgagatgacctacgtgctcggcagccgtgacatcgtggccggcaccgactacgacatcatgaccccggattccccgattggcaaggccatcgaaggtgccaaggtgggcgacgtcgtttcctacaccgcaccgaacggccgcgagctgtccgtgacggtcaaggccgccaagccgctggcctgagttataagtgactagtatgcccccataggcgggggcatacttatatgtcgtagcgtttattgccacagcgagacgatcaccatgtagatggccaccatatggcaggcatatccggccaccgttccgcagtggaaaatctcatggaagccgaagacgcgaggccaagggtcgggcttgcgcaaggcgtagacgatggcgccgaggatgtagcaggcaccgccggcgcacagcagcaccaccacggctggccccgcatacggcgaattccagaacatcaccatataagctaggccgtagatgccgaagatgatgtacaccaccgtatacagccagcgtggtgcattgatccagatcacatgaatcacgatggcgatggccgtgcacgcccacatcgatatgatgatcacattgcgccagaacggttccagcgcaaacgaaaccggggtatacgtgccggcaatgagcaggaagatgttgacatgatcgatacgccgcagcacatcggtgacgcgcgggctccaatcgcccagatggtagcaggccgaattggtgaacagaatcagcgacgctgtcatgaacacggcacacgcccacttcagactcgcgccatgtgccaggcatataagcacgatgcctgccgccaatgacaggggagcggcaatcgcgtgaatccagccgcgcatcaacggctttggtcgtccgtgcacgtcgagacgaatcttgcgttccacttccgcaggggcaatgccctcgattttcagcgcacggtgctccgctttggcgagcttgtgccgggccttctcctcggctttggctcgaatggcctcggccttgaactgggccttggcccgtacggcatcagccttggcctgcaacgcctgttcgcgcgcctcgatagccgcctgacgcttggatgcgatggtggcatcctctgcaatcgtcgcgctgttatgagcgtcgtgatgcatcgtcttttccgagtcgccggttgttgatgccatggtgatgcccccgtttcacgagttgacgatacgcttcttacgctgccgtaacctacgttagcgtaacttttatgcttgtcaataccgactcacacgaacactattacccaatggtggcgatactatggaatccgaagatgagaacgtcacagcaataaggggttcggtgatggtgtattgcacggagtgtgggtttgccaacgagcaaggaaatgccttctgttcgcagtgcggaagcccattggagcagcccgaggccaatccggcggcccctgcctatgacgataacgcgctgacgctggtgaagcagccggcggcgccgttgcccgccgtcgcgccgccaacggcgccgggttccgcggtgccggggcctatggcaccgggacccatgaccgctggccctgcggcacctgcttctcctgaacctcccgccgggcgtcctggcggcgatcacaccaaagcggtggtgattgtgctcatcgcgctgatttgcgtcgtggcgttggtcatcggcttgttcgtcacccatagcatgggattgtggggagctcagccgcaggcgcaaacatcggtacagtcgaccgggtccgatgcgtcggattccgccgatgatggcacgacggattcctctgacgccaagtccaaggccaagaagaacacgtctgatagcgccaaagacaagaacagcgacgattcgtccaagaaaagctcgacggagaagtcgaagccttccactccggtgatcacatccagccagttgtctgacatcgcggattcatactcgtcctccgatgtggccgtctccgccatggtcatcgatggaacatacgccgattcctcagaggacgccaccatcgcgaccacgtcgcagtccggcaagcaattcgtggctgccggtctctatctgccggtctatcttgcggcccaggacaatggcgatgacaacgccaaagcgcaggcaaacgcgatgatgggttccatggacaacaatgccggcaatatggcggccgcggcggtaggtggctggagcggcgtcaattcgtgggcatcttcgcatgggtataagggcacctcgttcaaccgcgatttcggcgatgtggcggccagcaatgccggttatgagaattacggttcctcccgcgatgcggcccgcatgctcgccgcagtggacgccaagggaggcgcgtcattgatgaacgtggacattgcttccgaaggcgtaaccattccgtccgacatgatcgtgcatgcccaccgaggccaaggcatccaggacacctggaattacttcgccatcgtcgaagccaatggtcataaggccgccgtggccgttgtcacccaatatcaggggcagtcggtggccgcggacctgatgagccgggtgctggccagtgttgacaagacattggggcagtgacggtggctcagcataccaagcatagtagcgacacgcgtgcaacaggcagcgtcgtgggattgatcctgatcgccgccctgatcgccgctttggtaatcggcgtcggtggatggatgtacgcgcataacggtctcggcgcatcgcacgccaaaacatcgcccgtcgcctcggcatcggactcaccggcaacagcgtcggcatcgtcgtcaacggcgtcatcgaaacacgaacaacgccctgtgcatgtcaccttggagcgcaaggcggcacctgctcccgacctgaccacggtggcggaagagaagcggatgtcagatgtgtcctcggcggtcacggcagctgtggccggcaatggaggcacctggtcggtgtatgtcgaggatctggccacgggcaaaaccgtgagcgtcggcggccagcccatggtggcggcttcggatatcaaactgtacgtgatgcttgccgtgtacgataagcaacatgccggcaccttggccgcgggcgggcaagataccacctcgctgatcaaccagatgatcaccgtcagctcgaacgctgccaccaatcagctggtattgatggtcggcgatggcgacatggccacaggcatgcaacgggtgactggtacggccgcccgatacggcttcagctcatccaagcagttgcgggtgttgtccgatgccggcacagacgggaccggcaccgagaactggacgtcggcttccgattgcggcagattcctcgctgcattgtaccgaggcaaactggtttccgccgaagccagccgctccatgcttgacgtattgctcgggcagacgcgacgcgccaaaatacccgccggagtaccgtctggcattcaggtggccaataaaaccggtgaactggccggcgtggaaaatgatgccgccgtggtgtggggcaaggccgcggacggaacagaacgggattatgtgatggtggttatgacctcgggagtggtctcgggaaccgcgcagcagcagatcgccgcattgtcctctcaggtgtatgaggcgatgaccgcctgaacggcgggcagccgtgcaacgcgattggtgcggtattgaagatgcgatgtcgtaatagtcgtcatacttgcccgtgtggcttgccgcaatggcggcgacgtgtctgcgtatgataggggcatggctgatttttcacacatccttgcaacgcgccccgacttcgacgacgaggaccgcgagtggctgcatcatctcgttgccgattggcaggtgatcgccgatttgagctttgccgacctgctgctgctggtacagaacggtgacggcaaatacgtggtggccgaacaatgccgcccatccaccgtgatgacgctacgggcggaagacgtggtgggaaacgtcatgccggatgacatggtcggcgaattggacgccgccatgctctccagcgtggtgttccgctccacggtattgagaaccgtgggcaaggcgaccgtctgcaacgtgtacgcgccggttcggcacaatggcaagaccttgggcttggtcgtgcgtgagaccaatatggccacacgagaatccaacggtcgatatgagtcggaaagcattaacgcgggcaaacagctgtacgagatgattccgcgaggccagttcccctacaaggattcggtgatgagccagcgccatatcgctcgcgtggcggacggcttcatcatcctgaccatggacggcgtggttcgatacgcagccccgaacgccatcagctgctttaggcgtctcggcctgctgaccaccatgcctggccattacctcagcgaactcggcacacagctgttgaaggagaacgaccccgttccggaaaccctgccgttggtgctggcgggcaaagccgcggtcgactccgaactcaacgccaaccgttccgccgtctcgatacgctcgctgcccttatatgacaacaacggtcgtatcggagcgattctgctatgccgtgacgtcaccgagctgcgccgtcgtgagcaggagctgcagaccaaggacgctacgatttccgagattcaccatcgtgtcaagaacaacctgcaggccgtctccgcattgctgaggcttcaggctcgtaagaccaagtcggatgaggtcaagaaggaattgcaggaggcgcaacgccgcgtgcagaccattgccatggtgcatgagggattgagccagaccgccgacgaggtcgtcgacttcgacaaggtgattgccaacctgctgcgcatggccgtggacctagccacgatgaaagaccagcacatcgatatcaactacatgggcaagttcggcatgatgcccgctcaggatgccacgccgctgtccctcgtgctgaccgagctcatcaccaattcggtggagcatgggttcgaaggccgcaaggatggccatatcacgatttccgtgggccgctccggcccgaacctcaatgtggtggtcgaggatgacggttccggtctcggctccgaagaacagggaggattggctcgttcttccggttctggtttgggcacgcagatcatcaacacctttgtgaccaatgatttcggtggttccgtgcattgggagccgcgccgcgaaggcggcacccgcgtggtgcttgatatgaagctcagggccgctcaggatgagtgatgcgaagcccaaaaataaggaaaccctcccaagtgggagggtttcctagtatgacgaagcgataatcaaaacatcagatttgcatctgcatggcctgagaacggcgggcgcgcatggcgcggcgcttcagcgcacgacgctcatcttcgctcaagccgccccacacgccgtaatcctgattggtgtccagagcgcacttcaggcatgcatcaatcaccttgcaggtgcggcacacggccttggcctcctcaatctgctgataggctgcaccggtgttgcccaccgggaagaagagttccggatccttgtcacgacatgcggccttggctcgccaatcaaaagcgctgctcattgcttgcctcccttaaaagccccgtggctggtgttgttccttaagtccagtaccaaggtaaccacgaaccgtggtgattttcaagaggtttcgccgagaaaaaaccgaagttttcacgaagcgcactgcaccagacatgccgatgtgccctcgatgagcacggcccggcccgcgttgtcggcatcgatatgactcatcgtatccaataggcgagcggggactccggccataaggtcagacgttcgttccccgcacgggaacacgattctggtattgcaatgctctggtatacgtatcgggcgaatcgtgctgacggcgaataccacgctgacggactcatcggccaacgcatgtgtgaaagacagcgcctgctcgtcggtgcggaatgggtcgaacaactcatcggcgtcgtcgacgaaccacacgatatgcggaggcggtggtgcatccgagctggcatacggcgtgcagcggccgttgcgaagccattgcgattcccatacccggcgatgcggggaactgacacgtaccgccaagccatcagccatgctggcgtgtcgagccaatgttttcagcaacgtggttttgccgcgcccctgcgggccgatgacaccgatattgccaccggtgagggataccgtcgcttctcgcaggttgatgccatcgtcggcaagtccaaatcgaatgcgttgcggtgcgtgattggccacagtccggtcttttacgtgccggggaagtggcgcggtaaacagggacggctgcggcgggctcccgacgaaccgcgatgcgaacgcgatctggcggcataccgcatcgatatcgcgcgccgttgcacagcggaatgccgtcacctgttcggaatcgttgcagaacgccgcaccgggcattgccggactgaggtcggcggcacgaccatcaccaagcagctcgcatgattgcagacggtcccgaacccgtaaacaaatgctgacggacatattcgccttcatatcggcactgacctgacccatcggattctgcgtacaggcgatcagatacatgcccagtgacctgccgagcgaggcaatacgcaccagacgattcacataatccgggagctggtccttcagggcatggaattcgtcaatgaccacgatcaggcgcggtggcggattgaccatatcacggatatcggaagcatggacagcggcggacagctgttcacggcgtgtcagttcggcttccagcgcacgcaacgcgcgtacggcatgcgccagatccagatcgcatacgctgcccacggtatgcggcaaccgttcgagtttgcggaacgcggaaccgcctttgaaatccaaaaacacgaaattcagatgctcaggcccgttcatcgaggcgagcgccagacaccagctttgcagcaacacggatttgccggaaccagtggtgccggccaccagagcatgcggcccctgacggttcagatcgagcctcagcggctcgcttccggtcatgccgatcggcaccgcaaggtcaaggggttcaagccaatggcccacaatggtgcgccatggcaggcgtgcgaagtgtagcagcgattctatcggctgtgacggcgcatgacggaggtctgcggcgcgggcatcggcatcgtccgtgataccgatatcgatcgttgcctgttgcggggcgggggtcttctccgggcccggaggtggggggagcgtcagcagcagggacacgagacaggcgaatatgcccggtgcgaccatggcggcgaacagccattgcccgtgcaacagcagtatgaccatcatcagtgcctgcgcgatcatcgggcacgccgcggcaagcatggtcaggcgggcgcgcaatggcggcgcgcccaaacggtgcttcgcccgggatacggcggatgccgtatgggcggaatgtcgcttcgaatcgttctgctgtgatgtcatgcttccagcgtgggggagcgcatgccgaaagcgcaagccgaatcaaggtatgtggttctagcttgccgagttatccacatgacattttgcccgtgcatgattggcggtgtaggcaatggtggcgatcatgcgccgacgatgaagccgatgggctccgggaaagcgtcggtcagccttccgccagattgcccacggcgccggccttatgcgtgccgtcggcaagctgattgaacagttcggtgttcctggcgtcatcgagcagcaccgaggagccaacgccatcaacgtaataatcagggtcggaccagtacacgctgccggagatgccattcgagccggtggcgcttttgaacgccaacgccatggtgagcaacgtgtaagggttggttttttcatccacggtgagtgcgctcatcgcggcattggacactgccacgactttggacggattggtcagggtcccactgctggaagcctttttgacgatggccgagatgacctgccgctggcgttcgttgcgtccgaagtctcctcgcgcgtcggcgtatcgcatacgagagaaggacaatgcagtggaaccatccgtcgtatggcatcccgccttccagttcagtccggaataggaatcctgaacatcctcgtcatagcacagttcgataccgcccaaggcgttcaccacgttctgcagaccgccgaacttgatctgcgccacatggtcgattttctggccggtaatctgctcgacgttgcttaccaaggctttcttgccggcaatctgcgccaccgcattgattttcatgtactggttatcgacgttcataagcgaatcgcggggaatggaaatcagcgaactcggcccgcttttaggcttgatcagcaccagaatcgtatcggttctgaagcctgagatattgtccacgccgccgtaatcggtggaaccgtctcgctcgtcggagccaagaatcagccaggtcgaggccggcgtgttgggggtgtcggtcagccagtcgctccggttcagtttgctgtccacccattgccaggcaccgaaaacagaaagaatcaacgccgccaccagtaccgcaatcgcgcataagatgatgcgcaaggcgcgcggccggtgtgccgttaccgttttcgccgttgccgccgccggccggccaagatggctgaacttcgtggacacgtttgctgctggcgatgagggccgggaaaccgacatatccgacggattgcgcacggcgttgcgggatgagccggaagacatctgcgctcgcgacggcggaatgctgcgcggtgcggcggcatccggagccgtgctgcgggtggcacgtccggttttcggagaaaaactgggcggagtccgcctgccgttgtccgtgacgttggcgcttgccgtggcgttggcgttcggttgaggctcttcgatgtcatttcccgtgacggacggacgggccgatggagcctgacctgactgacgtgaggcgcgggcaggggcgaaggagcgtggcacctgcccggaaggtcgggtgcgtcgatttcccgcaggaatgaagcttggcgggttgatatgcggatccgccccacctgattcctgcgtcataacccctcctgaaactgtcgattgtctgaatgacactttgacacagcatccgccgggtgttcctgcgctatggtgttcctgcgcaggaacggcacaatatcatgtgcaacggcatcagggcatcgtgtccgcgccatagcacacagttccataaaaataatgtaatgacacgagaaagaatttgacaaaaacgaaattgcatgtgtgtaatttagtccgtatgaaaagctcaataggcaaggagaatcgcatgtggggtgtggtcgacgattcagccgaagagccatggcatgaattgtggggactattccgacctgatggcgatgtatcttggcagcacaaggcgttgtgcgcgcaaaccgatccggaggcgttcttcccggaaaagggaggctcgacccgtgatgccaagcgtgtgtgcgccaaatgcgaagtgcgtgaacaatgcctgaaatgggccatcgaccatgatgagcgattcggtatttggggcggcatgagcgagcgcgaacgccgtcgatataagcgagagcaccgggagcaggcgtagttccacacacacccccttcaagtctggtgcgtacactgggagtttatgagtccgacaggtaatagcgatattcatgaggcgttggccgacgccatgtcttctcgaccgtatacgcataggcaggatgtggataccggcattacggctgtgatcaccgttgaggaggatatgcgtttcctccggtctacattgcgttcggtattgacgcagaatgttcttccgggagtcgtcatcatcgccgacgcgaccgggcgcgccggttcgaggataaccacttcgttcgaggtcattccctcgccatcggggccggtagtggaggtgccgcagtccaagcatgtgaccattcacatcgtttcggccaagggcgcgcgttccttcggcgatgcggtcagccgggcgttggatcgggccgatttggatgacgctccccgcgcattgtggttgctccatgatgattcccgcccctcggatgcctcatgccttgaacgattgcttgaggcgtggcgcaatacgccgggggccagcgtgctcgggtgcaaacagtgtgattgggaaggatcccacctgcatgatgtcggtatgtatgcaggccgacacgccgtgcattccctggtggtcgatggagaacccgatcaggagcagtatgacgggcgacaggatgtgttcgcggtgtcgctggcgggcgcgctggtgtccatgtcgcaattcacgcgactgcggggcatcaatgcctggctgaccacctacagcgaatcggtcgatttctgccgccgtgtctgcctgagcggcggacgcgtggtggtagtcccgcaagcggagatatcacatcgtcgcgcacggtatgagggcattcgtacgcgaggcggggagccgcttaaggaagatcacacggtcaatcatgcgatgacggtgcatcgctcccaacagcgctatctgtacactgacctggccatgtcgtcctggattatcgtctggctgtggaggctgattcgcagttttggcatggccatagccatgatgttcggcaagaagccgtatgaagcatgggtgcaattgtgcctgccatggttggctttggccgatatcgcgggaaacatgaaatcgcgcaggctggtggccagacagtcgaaggtcgccgcatcgtccctgcaggttttgttcgccgacagtcggcagatcaagcagttccatgatcgtcgggatgcattccaatcccagcagggcagagtgctgctcagtccgctggaacgtgcccatctgcggacacgcaccatatatcgctggagcgcagccgtggtgatggcgctggtgtgctttgcggccatcgtggtgatgtattggccggtgttccgttcgatattctccggtggatcgttgtattccgatgtgttgctttccaccggtgccagcttcactcaactggtgcagtccgccaccacgccatgggtgtttggcagcggcaccggcattcctgcgccgcccacgccgtggctgctggtgctgatgctggcctcgctggtcacgctcggccatgtgaccgccgctctggcgatgatactgtttgtggccgcgccgctgagcgcattgtcgttctgggcgctggcgggcgtattcacccgctcggacgtggttcgtgtgctgggaggactgttgtgggcatccaccggcattatgttcggctggtatgcgcaggccaatatgccgatgctcaccgtaatggtgttcctgccggccgcgttcgcattcgtgttccgtgccgtgggcatgtaccataccgaagacccgctcaagccgcgcacatccgttcaggccgcggccatcgccgcactgtgcttcatccctgtggtggccgccgaaccgcagctgctgttcgcgctgatcgtcgtgttcctgatgttcctgctgttcgtgcgccgcaagcgcgccatgctgttgcttattccggttcctgccgcctttgcggtggcccctacgctcgtcaatgcggtgcgttacgccgatttgggcatgtggcgtcaactgttcggcgacatcacagtgccaacgtcatccgccaacgggtcgccggcgtcgctgagcctgcttgaggccgcacagcgtgcgctgggatggcaaatgggatcgactgagcatgccgatttggcggtcactgtgctgttcggcgtcatcacgctgctcgctcttgcttcgctggtgctgccgttcgcgttgcggacctcgcggctgatgtgggtggtaatcgtttgcggaggcgcgctcgccctgatttccagccgtgtggccatagccgtggatgctgatggcgtcgtggccggttccgcacagcctggcatcgcgatgatgatattgggcttccttgcctgcgtgtgcctcgtcgccggtggggcggtgaagcgattccaaccgttgcatgcgtctggcagtgatcccgcaccgaaaagggaccgtctgcatgtgctcatcgtgtctggccgtgtggtgcttgctctgatactggtgtgctgcatcggcattcaatgcatgtatggcatcgaacgtcataaggatgcgggactgggcgtgtccgaaaacggcctgcccatggtcaccaccgattatctggaggccagtgccgatcatcgtgtgcttgccgtgagtgcggagacccgcaacatcgtcaactatgcggtgatgcgcaccccgcgcggcgatctgatcgacagttccccggtccagcgggcgcgcctgctgtccggcaagcatgatgcggttgacgaacaactggcccaggcctgtgcctcgctgctgtccaatcccgacgaagaggccatcgcggccatcagcgcgcttggattcggcggcatctacgtggttcccgagaccggcgattcctcgaacgacatgccgtatgaacagttgagcgcgaatatcgccgcatcgaacggcacccagtccctggtctccacggatagcggcagctactatcgtctgacgctgcgtagcagcacctcacagcaggtggatacctcatggcagcaacgtgcacagcatagtgtctggagacacgtctggctgatatgcctaggtgtgatcacggcgttgtactgcttggtcgccatgcctcgcagacgaccgtcctacggattggaggagcaggcatgagcaacaaaacttctggtttcaaacgtgcgatcggcctcgtgctcggtgtgatcaccatgctggtgttgattgcgctgttcgtcgttctcgtcatggcccccatccccaatatctgggtggacaaggtggccgcttccgataatgccatcgaccagacagttagtccgacccagtccgaaacctactgcccggcacctataggattggccgataccggcacgtacggcgacagcgccttccaggccactgtcggcaatctgagcacacaggcgcgctatgcggcgttcggctccgtctacagcgccactgtctcggcgatcgggcaaaagtccagttcagatgacgtgactttgaaagacgccgatccgaccgacgattcctcggtgaaaaccggtgctcagaagatcaatcagggagctcgcctgatcaatacccgtatgctgcaggccgcagccggcaccggcgccgttggcaccatcgcatcatgggccgatgatggcgatgtgagaggcgtatcggcggcatcctgcgtatcgacctcgctcagccagtcgttcctgctctccggcggcacgaccggtaccacacagcagctcatcgtctcgaatccctccaccaagccgaccaccgtcgacattgccgtctggggttccgagacagccgggaaaatggcattgtccacacaatccacgctgtctgtgccggccgagggggagtcctcgatggaactgtccgccgcggtcgatgggcagcatggtctgttcgtgaccgtttccagcaaggagactcctatcgcgtccgtggtacgtacggtgaccatggatggtctgacaccgaagggttctgatttcgcgctgccgctgccgaccgcctccaatgcgtcggtggcgccgtccatcactgccggcgatgcggtcaccgcttatctgttcgccaaggcagacaccagcaccgggctgtcatggattaccgacaaaggattggttcccgccaaagatgccaccgtcactgccgataaggtgacggcgatcgacttgggagaggctcctgatggggcgttgggcgtgatgtccaccgcagaggatgccgtgtcgttctccgtcaaggccacacgctccggtgactccggccaagccgatttcgcattggtcaatgccggcgagccatccgaattctcggggttggcccttcccgacggagtaaaggcctccatcacgctggccaatacgtccaatgcgcgcaggacggtcaccttgcacgcctacgatgatgccggtgcttcggtgacctccgaggaaatcacgctggatgcgaacgcggcgcaaacgattgagaccggcaaactttccggcgatcatggcaccgcggtcgtgctgatgttggaggactcatccaagaaagtgagctggggagcgcgtttcagtcacgattcgttgcaagacaaggacatcgccggattgtccgccatcgacgcttcaacgctgatgcccgccacggtccatgtctgggctcggaacgattcctccatcgtcaagtagagcgcgctcgccgaagcatcggtctgatgatgtttcggcgccgatatagctgcgggggccgtgccactgtcttacttgaagtggcacggcccccgcaatactgtcacaggccccaatcggggtcgatttcctcgggcctgcgcccatacaattccgctatgcgggccaccagctcatccctgacggccaactgcaattcgagcttggtaggtgcctcggtctgcaacggcatacggtagagcacgactcgtgcgggaatgccgtggctggcggggaagcactgggacgtcatattcggctcggtctgccaaggcgtcggatccgaaggcggcacatcctccaccgcgaactggagcggacgtatcagttccggccacgcttggccgagcctgcgaacctgggccgccaccatatcgtcgaacatgccggtgcgagtgcggtaacggggcagacgggtgccgaacatcggggttcgtgtgccgcgaccgtggcggttgcggtagattcgtgcgttccaaggtggctgaagcatggttcccaccataggacatggcggaggcaacatgcgttaggattggttcattggctgtgaacattcgtcaacgagggaggcgcgacaaatggtggtacgttcgtggtccgaacttgatttcgataatgtctgctccaacgccaaggtgttcggtttcgatttggacaacacactggccagctcaaaacagccgatgaagcccgcgatgatcgaacggttctgtgcgttgctcgaccatacggtggtggccctgatctcagggggcggcatggcggtggtcacctcacaggtgctggatgtactcaccccgaatgccaggcgcggcaatctgcatgtcatgcctgcctccggctcccggtattaccggtgggatggcacgcaatgggccttggtgtatgcgcatgatctgtccgaagccaccgtggccgctgtctcggaaagtcttgagcgacatgcccgggaactgggattgtgggaacagcaggtatgggggcctcgaatcgagaacaggggcagccagatcaccttctccgctctgggacagttcgcacccgtagcggccaaacaggcatgggatcgcgataacacgaagaaacaggcgctggtcgaagcggtcaaggccgatctgccgcacatgcgggtcagggccggcggctacaccagtgtggatgtcagcgaatgcggcatcgataaggcctatgccgtgcgcaagctgacgcagacacttggcatacaggccgatgaaatggtgttcgtgggcgatcgcatgacgcctacgggtaatgactatcctgcggttgaggccggtgcgatcggtgttcgtgtggagaatccgcaagatacggtacaactgctggatgcactgcttgcgcgattcgatactccagcttgatggtgacgcgttatggacggtccgagcgtatacaagtggtggcatgcgatgtgggcgcaggcctgcaatctgctgtttccacgcggctgcgctgggtgtgacgcgccggatgaggtattgtgcgcggcatgctgggccctgttcgcgcaatgccgggagcgggatacagacggtggtggcggagcccgtatatggtccgcatcgatttaccagggagcggcgcgtcgtgccattctcgactggaaggaccacgacgataccgagcttgacggccctttcggccgcatcatggtgtcgctgctgaacaagacgccaatatcatcatcatgcttggggcatcgcgtattggtggttccggtgccgtcatcgcgggcgtcaatgcgccgaagagggcgtgcccatacggcaccgttggccaaatcggtggcaggggcattgcgtgggtacggcgtcgatgcgcgaccatgcaatgccctgagctcctccaccaaggcacgctccgtgcagcagacctcttcggcacagcgtgcccgtcgtatcaccggtcatgtcacggtgaagcgtgatctcataggccatggcgacgcggtgcttctcattgatgacatcgtcaccacaggtgccaccgtgcggcaatgcgttcaggtgtttcagcaggccggcaccaaggtggtgggcgtgctggtattggcggatgctgtggcgcgacggtccgatgacgatatcaacgggtgaatgacatcggtgacgatgccccagatagcaggcgaagcgccgttgctcggcatgtaatcgggatatcgaggattctcggcgtgcaatatggtgatgccggcccgtgaaaccagccgtttgatggcgatttcatcgtccatgacagccgcaaccacatctccggggactggtgccaacgaacgatcgacaatcagcagatcgccgttatgaataccggcattgatcatggaatcgccggccatctgcatgacaaacagcgtggtgtcgtgcggcatggttcgtgacttggattgctgtgtcatgctgtgcctcccaccctgtattcgaacatctgttcgaatacagtatacggtaggacggcggacaatatcagcgttcggcgacgtgatatttaggcaggatgatttcgaaatcggcgcctcgcgtgtcatcgaccactttgacggtgccgccgtgcaattgggccgcccaacgtgcgatggacaggccaaggccggtgccgcccgactcggtgccgggacccgtcttgcctttgacaaagcgccggaagatatccgaacggtcggacggtgcaatctgggagccgaaattcaccacattggtcacgatggtgccttggctgtcatcctcatgggcatcgaccagcacggtggtgccgtcggccgaatgcttcagtgcgttggcgatgatgttggtgaacagctggcgcaggcggtcctgatcgccttccatcgagatgtcggccggcacggtgacgcggatgtcgtgggcgtggccgccatcggcgatttccaacggctcgatggtctcgtcaagaaagtcggcgaagttgaacttttcgatattcagactcgccgcaccggcctccatacggctcaaatccaacaggaaggcgatgaggtcggagagacgctgcgtttgggtgaggatgctctccagattggcgggagtgggctcggtgacgccgtcggccatgttctcgaccatcgcctgcaaagcggaaacgggcgtacgcagctcatggctcacattggctatcatgtcgcggcgcattttatcggcatgttcgagttcgccggccatctcgttgaacgagcgagccagctggccgacctcgtcatgacgatcctgatcgatatccacgcggaccgtgtaatcgccatccgccatggcttcggccacatcgcgcatctggcgtaagggagcggtgatgccgcgggagaagaaataggtgatgcccaaggccaccaccaaagtcagcggcatggcgatccaaccggaccagccgaatttcaggaggaaccagcacatggcaaacgcgatggcagtggcgataacgatcagtacgctgagttccagcttcagagaggagaacaaatcaaccggcttgacgcgaggtttcatcgcatcaagccgggattgctgttgttttttggatgccatcacgcggtcggcggctcgaaagcgtagcctacgccgtgcacggtgcggatggtatcggcgccgagcttatggcgcagcgccttgacgtggctgtcgacggtgcgggtgccggatgcgtcgacccagtcccagacctcttcgagcagcttttcgcgggtgagcaccgacttcgggcggcgggccagcgtggccagcagatcgaactcggtgggggtcagatgcacctgctcgccgttcacggtgacgatgcgctgggccgggtctatgaccatcgaaccgaagtcgagcagcttctcgttctccgaattcttggcgatgaccttcgcacgctccacgcggcgcagcagcgccttgcagcgggcgatgagctcgcgcatggagaacggtttggtcatgtaatcatcggcgcccgctcccagaccgatgaccttgtcggcctcgtcatcacgtgcggtgaggatcagcaccggcaccggacgttcggcgacgatgcgtttggtggcctcaagaccatccatgaccggcagcatgatgtccatgattaccagatcggggcgtagctgggacgcggcctggacggcggaagcgccgtccccggccacgcgagcggtccatccttcagcggtgatgcgctgggcaatggccgtggcgagtgtgggctcgtcctcgaccaccagcaccatgcgcggtgtcgtattctgacgcgctgtggtattgagcataaataaaccggttacctttcagcctgttgaccagttcagtcttccggcttcaagaatacaactcccagagccggaacggtgatcttcgccgagaacggacgcgaatgatattcgccctcgaccgcttcgaaggtgccgttgtggatgtcggagccgccgtacttggcgtcatcggtggtgaacacttcggtccacttgccgccggtgggcagcgccacctggtaatcggaccaggcttcaccggagaagttgaccaccacggccaaggtctcgcccttggtgccgatgcgcaggaagctcagcgtgttgtggtcggcatcgtcgctggtcagccactggaagccggccggatcgaagtcctggctccatagtgccggatgcgccttgtagaaggcgttgaggtcggcgaccatggtctggacctgacggtgctcctgccagttcaggcaatcccaatcgatggaggcgtcgtgatcccactcgccccactgggccagctcgttgcccatgaaggagagcttcttgcccgggtgagcccactgataggcgaacatcgaacgcacgccggctagcttctgccagccatcgcccggcatcttgccgtacagggagcccttgccgtacacgacttcgtcgtggctgatgggcaatacgtagtgttcggagtaggcgtacaccatggagaaggtgatttcgttgtggtgccacttgcgattgatgggctcctcgtgcagatactcgagggtgtcgtgcatccatcccatgttccacttcataccgaagccgatgccgccggcggaggtgggggcggtgatgcccggccatgcggtggactcctcggcgatcatcatgacgccggggttgttcttgtacgcggtggcggtggcttccttgaggaagtcgatggcctccaggttttcgcgtccgccgtagatgttcggacgccaatggccgggttcgcggctgtagtcgaggtagagcatggagctgacggcatccacgcgcagcgcatcgacatgcaggtcctcgagccagaacagggcgttggccaccaggaagttgcgtacttcgcggcgtccgaagttgaacacataggtgccccattcggggtgttcgccgcgcagcgggtccgggtcctcgtacagcggggtgccgtcgaagcggccgagtgcgaaggcatccttcgggaagtgggcgggcacccagtccatgatcacgccgatgccggcctgatggaactgatcgaccaggtaacggaagtcgtcgggggagccgaggcgggaatccaccgcatagtagccggtgacctgatagccccaggagccggagaacgggtgctgtgccagtggcatgaactccacgtgggtgaagccttcctgcttgacatagtccacgagctgcttggccaggtcgcggtaggtcagtccctgcttccagctgccggcgtgcacctcatagatggagaccgggccatcatgcgggttggtggtgcggcggtgctgcatccaggcgtcatcgttccactcgtaggtggattcggtgacgatggaggcggtgttcggcggaacctcgtgctgacgctccatcgggtcagccttcatctcccacgtgtaattggcgttcaggatctggaacttgtaggtctcgcccgcgccgatgccggggatgaagatctcccacacgccggaggagccgagctcgcgcatggcatgacgacggccatcccaggcgttgaagttaccgaccacgcgcacggcatgggcgttcggggcccacacggagaacgcggtgcctaccacctgctcgccgggcgtgccgtctgcgccgcccatcggatcgtcatagcgcagcacgtgcgcgccaagcgcctcccagagcttctcgtgacggccctcgccgaacagataggtgtccatgtcgccgactgtgggcatataacggtatgggtcgtcctcaatgagcactgcgccgctttcccactcggtcctgacgcggtagtcgggaatcgtgggctgcttcttggtgccggaggccggcacggtagtcacgaacacgccgttgtattcgtgggtcatcgggtattcgccatcctgggtgaggatggtcacggacttggcaagcggacgcagcacacggattgtggcggtgtcggcatgcttgccgatgccgagatgcccgccgagaactccgtgggggttgtagaattcagcattgctcaccgcatcgaggtcgccttgggcgacaggcacggtgacggtatcttccttgatcttcgtttctttagccatgacccaaagtctacgtgcgttggagtcgaaaacgctacattggcgcgtcgaaaatggcgaattcttgcccttttcggtgtgtctccgtggttgtgagcgctctcataggggcggtccagaccgcatggcataattattcgagtttttgtgtgtaagccgtcagttctcggagggtacatgtcttacaaagtcggcgatatggtcgtctatccgcgtcatggtgcagcgaaggtggaggccattaccgagcggacggtcaagggagtgacgcgcgaatatctgcagctgtccgtactctcttccgatggtttggtcatcaacgttcccgtggacaatgccaggaaggtcggcgtgcgtgacatcgtctccgcatccgaagtggccaaggtgttcggcatcctgcggaccccgatcatcgagaaagagatgaactggtctcgccgttacaagctgaacgtcgaaaagatcgccaccggtgacgtcaacaagatcgccgaagtggttcgcgatctcgcccagcgcgatgtcgacgagcacggcctgtccgcaggcgagaagcgtatgctcaccaaggcccgcgccattctgacttctgagatcgccttgtccgagaagatcgacgaggcggaagcccagcgtctgctcgacgtgaacctgggctacgagcccgctcaacccggtgacgacaagcatcacaccgccgagcccgaagaggccgcggccgatactttggctcgtgtcgaagccgagaagaagtccaagaagaagtgatttgattgttgaggccccggtcgtgtccttatgcgatacgccggggcttcgtgattcataatcgtttgctgccgttcgtctgggtagcgccatcgaaggggactgcatggggtctgcaggagtgttgatagggcagggttttgacgctcaccgttttgcgcctgccggttcaggccgtgaactgtggattgccgggctctactggccggtgcctgattcatgtagcgaggccgatgccgccaaatacgagggtatcgaaggcgattccgatggcgatgtggccgcgcacgccctgattgacgcgttgcttgccgccgcccgattgggagacattggttcactgttcggtgtcggtgcggacgcgcatggtgccggaaggcatggcatcgatatgctgcaagaagttgtggcgcatctggcatccaacgggtatacgccggcatcggcctcagtggcgatcatcggcaaccgcccgaaaatcggcacacgccgtgctgaagccgaagccgccctgtctgcggcggttggttgcccggtatcggttaccgccaccaccaccgaccatatgggattcactggccgcggcgaaggcatcgccgccatcgccaatgccttggtggagaagatataacaaagcccccgctgtgaatttgccagcgggggcaagaaaaatgaatgagattacttccgcactgtctccacggccttggcgatagcccagaacagggtggaaagcgtcacgataatgaagctcgggggggcggggaacatcgccgacagcacgagtccggcccaaatcgacaccaggcacagcacgctggcgatcaccatcgccttgaatggggagccggccagaatattggcggtggccgcaggcgtgatcaccagcgcgaaaatcagcaaggtacccactgccggcacggcaatggtgattacaccggccataatcgccataaacgccacgttcatcagcccgatcggcacacccttggcctgtgccacctgctcatccaacgagctgaacagcagcgggcggtagatgatggccaacaatgccagcagcaatacgtcgaacacggcgaagccgatgatctggccggtggtgatggtcaggatcgagccgaagaggatcgactgcatctgctgggaggcggaactcgacaatcgcgcgaagaacagacccaagccggtggcgaaggccagtacggtgccggttgcgatttcacgctcggaaacgcgcttgcccaaagcaccgatcaccagtgcgccgcccagtgcgaacacgcccatgcccagtgatacgggcaggccgagcaacaccgcgccggtcgcgcccggcagaccgatatgggccagcgcatgggccgcgaaggtggaacgacgggcgatggtgaagtatcccatgacaccggcggccagggcaatgcacaggccggcgatgaaggcgttggtcatgaatggagcggacagtgtgtccagccattcgggatcatacgaaaagttgatggtgctcatgtccctgtattttctccatgcctgagctgcagcccgttgacgggctgtggatcggctagcttgatgttatcgattctcggcgctgttggcggcactgccattggtggcgttgccgtgctcgtgatggtgcaattgcgccacttcggctgccgtgtgcatatcctgcggctggtcctggggctcatccggcgtcggggtcacgaacatgtcaccctgcggagtggtgaccacctgcacctgtgtgccgtagaggtgggtgagtaggtcggagtcgagcacgttgtgcatatcggcgtagtgcgggtgcccgtcgagcaagtagacggcaccggtcagaatcggcaagagcatattgagatcgtgcgcaaccacctggatggtcatgttcagttcacggttcagcttggccagcacgtgtacggtggcgcgttgactggccagatcgaggttggccaacggctcgtcaagcatcagcagttgtggatcgcacaccaacgcctgggcgatggccacacgctggcgcaaaccgccggacagttcggacagacggtactgcgccttgtcggcgatgccggtgaactccatcgccttgagcgctttggctttctgggccttggtgatggggtggatgccgaatcgggtgccggtcaggcccagcaacacggattgttcggcggtgagattggaatcgacattcgccacatagctctgcggcacatatccgatgcgtttgttcatctcgcctgcgggcttgcccagtacggtcaggctgccatggcaaagcggcaaaagtcccagctcggccctcatcatcgtggttttgccggtgccgttggtgccgacgatggccgtgaccgaaccggtgggaatggcaaaggtgccatgctgccagatgatatggtcaccacgcttgatggcggcatcgctgaacacgatgcaatcggaagtttcactcataacgcccgattgtggcaaacgatgctgacaatcgttctcaatatcgtgtacggatggtgacaaccaaagaaaagggttgtgcggccatctcgacaatggtcgcacaacccttctcgtgcaaggcgtctatcggcattgcatgaatccgatgccgttgtcctttgcttctaactatttgccggagtcggtctggtcgttgccggaggcatcgccggaatcgccattggaggcatcggcctttgccgaatcctgagacgagtcactggatgtggccgccttgcactgacggatgtacttgggctccgtgctggaaccggtgctggccttgggatcgtgcgcattggcatcatccgtggcggcgccgtcggcgctggaatcatcggaattcgcgttgccgtccgtggcgtcttcgcagccatagctcggatccaccgcgtcgatgatggtgttgatgagctggttgatccaggcgttcagcgtgtcggcgtccttgggcatttgttcggagacgtcgactaccggcacatcggcacgaccggcagcgccagtgatcatattggtcgcgtcactggcttcctgcgtgttgttgaccagcacatccacgcccttgtcttcgatgagtttctggaaagactgcaggtccgcgggtgccggttcgccgccggaagcggtcgattgcgtatatcccttgggcgtctgattcttgaacccgagatcggccatcagataatagaccacgggttcggtggctgcataggtgaggtcggagtgggatctggtgaactcggacgcccatgtttccagcgatttctcatccgcctgccatgccttgagccgcttctggaaggccttcttcttgctggggagtgcctttacatatgcatcggtgatggccgtggccatgctggatcgagcgtctttggagaaccacagatgcgggttatcgccttccatggcacccatgacggaagcggcggatacgatattcgtggtcttggtcatcgatttggtggcccaggaatcgtaacccgcgccgttggccacgatgatctgggccttggacagcttggcgacgtccgaggtctttggctcgaaatcgtgggcatccacattggtggagttcacgatggacgtgacttccacgtcatcgccgcccagctcggcggccagcgagccccattgattgagggaggcgaccacattgatcggcccggtcggtgcgggaacactggtcttgttgtccggctcggtttcagtgggggaggtggctgcgcatgcggcggtcgcgaacaacaggacggcgctcaggccggctgcggcgagtcgcgtaagtcgtgtgatttgagtccccatggcacgccttcttcgtgagagcgaacgatatataatcctgacttgttccaacgatagcctatcgtttcgatagaaagcatcgaaaccacaggggagggcgttgatgtccacaataatcgacggcaaacgaatcgcggccgggatcaagaccgaccttgccgaacgggtgagcaggctcaaggcccggggcatccagccggggcttggcacgttgctggtggggtcggatcccgggtcgatgaagtacgtggccggcaagcacgccgattgccaggaagtgggcattacctcagtcaagaaggaactgccggcggacgccagcttcgacgacatcgccgctgccgtacgcgaactcaacgaagatccggcctgcaccgggttcatcgtccagttgccgttgcccaagggcatcaacgagaacgcgatcatcgacatgatcgacccggccaaggatgccgacggcatgcacccgtacaacctcggcgaactggtgctgcatgtgcgcggcgacatttcgacaccgttgccttgcactccgcgcggtgtgctcgagctgctcgacgcctatgacattgatctgaacggcaaggaagtgtgcgtgcttggccgcggcatcaccattggccgcacgattggcctgatgctcacgcgcaacgccgtcaacgccaccgtcaccttgtgccacaccggtacccgggatgtggccgaccacatgcgccgcgccgacgtgatcgtcgccgcaatgggttcggccggattcgtgacgcccgacaagatcaaggacggcgccgtgctggtcgacgtgggcgtcagccgcgtctacgacgaagaagccggtcgctaccgcatcaagggcgacgtggacaaggcctgctacgacaaggcctccgcctacacccccaaccccggaggcgtgggccccatgacccgagccatgctcctggccaacgtcgtggaaatggccgaacgacacgcctagagtttcctaggaaatttgggcagagttgcttgtattgtgaatatctgtatgcctgtaagggtgtgcgtataactgaatatcgagaaattatccatccactattagaaaccatatatttacatggcagagaacaacactgaagtcgccaaggttgccatcaacgacatcggcaccgaagaggacttcatcaaggcagtcgattccaccatcaagaacttcgatgatggtgatctggttgagggcactgtcgtcaagatcgatcacgacgaagtcctcctggacatcggctacaagaccgagggtgtcatcccctcccgcgagctttccatcaagaaggacgttgatcctgacgaagtcgtcgaggtcggcgacgccatcgaggcccttgtcgtcaccaaggaagacaaggaaggccgtctgattctgtccaagaagcgtgcccagtacgagcgcgcctggggcgacatcgagaagatcaaggaagctgacggcgtcgttgagggcaccgtcatcgaagccgtcaagggcggcctcatcgtcgacatcggtctgcgtggcttcctgcctgcctccctcgtcgagatgcgtcgcgtccgcgacctctccccgtacatcggccagaagatcaaggccaagatccttgagctcgacaagaaccgcaacaacgtggtcctgtcccgccgccagtacctcgaggagacccagtccgaggtccgcgagaccttcctgtcccagctcaagaagggccagattcgtgagggcgtggtgtcctccatcgtcaacttcggcgctttcgtcgatctgggcggtgttgacggcctgatccacgtttccgagctgtcttggaagcacatcgaccacccgtctgaggtcgtcaaggtcggcgacaaggtcaccgtcgaggtgctcgacgtcgatctcgaccgtgagcgtatctccctgtccctgaaggcgactcaggaggatccgtggcagcgcttcgctcgcacccacgttcccggccagatcgtcaagggcaaggtcaccaagatcgtccagttcggtgtcttcatctccgtcgaggacggcatcgagggcctggtgcacatctccgagctcgccaaccgtcacgtcgagaacccggagaccgtggtcaagccgggcgaggccgtgttcgtcaaggtgatcgacgtcgacctcgatcgtcgccgcatctccctgtccctcaagcaggccaacgactccgttgacccggcttccgaggacttcgatccggccatctacggcatgccggccgagtacgacgagcagggcaactacaagtaccccgaaggcttcgacccgaacaccaacgagtggatcgccggttacgagaagcagcgcgaggagtgggagtcccagtacgccgccgcccacgagctgtgggaggagcacaaggagttcgtggccaaggagctggagaacgctgccgaatccgcagccgccgacggccagggcccgaaggaagagaagccggtcgaggagacctccaactactcttccgctgctccggctaccggtaccctcgccgactccgatcagctcgccgccctgcgcgaccagctgctcggcaagtgagttcgccatcgggcgactgacgcctgacgtatagtcaaaacccggtctcgcttcggcgggccgggttttgccgttgtgtgcatgaacctcgaaacatggccatgatggggggagcatgattcgaataggattgaccggtggtattgcggcgggcaaaagcacggtgtccacaagactgcgggagctcggcgcggcgcttatcgactatgacgagctcgcgcgccgagtggtggaaccgggcggcgtcggtcttcgtcgtatagcggaatgtttcggccccgacgcgctgaccgatcaggggcggctcaaccggcgatggatcgccgagcacgtgttcgccgggcccgactcggaacggttgcggaggaaactggacgatatcgagcatccgttgatctatgatcttgcgctgtctcgggagcggcaggcggtcgcggacaatccggatgccgtggtcgtgcatgatgttccgctgttggcggaagtcctggacgccatgcccatgcgattcgaccatatcgtcaccgtcgaagcgcccgaacaagtacgggtcgacagaatggtgtcgacccgcggcatgacgcgagatgatgcgcttgcgcgcattcgccaccagtccagcccggaacaacgccgtgtcatagccgacgcggtgatcgattccacgcagccgatgggtcgaatgctcgaagccgtcgatgcgctgtacgaacagtggctggcggaatcataatgcgatgatgcggtcggcgagggccgcggtctcctcgttgtgcgtcgtgtagatcacgatcgctccgttgtcggcgaaatcacgcaggtgacgcatgaccatggcgcggttgtcggcatcgagggccgctgttggctcgtccgccagtatgacgcgcagcgattgacggatgagaagcctcgcgattgcgactcgttgttgttcgcctccactgagtgtgtagatcggtctattgccgtagcccgtcagattcacggctcgcaatgcgcgtctgatgagccgacttctatctgccgatggtattccgacgctgcgcagagccagaatcagatttctgttcaccgtccattgctccaccagggcgtaattctggaacatgaatcccatgacgttgcggtgcatgagccgtcggccctttctggaggcaattgtttgcccatcataggtaattgttcctgaacttggctcttccaaaagacctaggacattcaacaaagtggttttgccacatccgctttctccggtcagggcaaccatgtcaccgggactgaatgtcaggttcagtccttcccataaggtgcggtcgtcgattcgatatgtcagattatgcgtgatcaataaggcgctcatgattgatgttccttacgtggtaagtgattgctgatacaggtttgtggatggcgatcagggatgtttgatactgtcggcgcgcagccgcgaatcgtaaagcactgtggttgccagcgaaacgacgatgaatagtaaggaaaccgaggtcgtggaaacggcgttgtaacctcctatgagcaactggatcggaagagatgcactgcataacgccgctgctagaaacagtatcgattgaaaacggagatatgacggcgctccatgcatatattccacgaacataatttgacgtcggagtgtgcatagtgtcaaagccaccatgattgcgccgcccagcagacatgttatggatatgcaagctgtgatggaaaaatagttcatttcctgagttgttcgtgccaaacgagtttgtatctcgtcgtgccgattgacgaccgaagccaccaaagagtccacgcccttttcccgtaggatttcgagcagctgatggcgggagctgtaatcgaaggtcatgccgccggtggacaccatcgatgtagtggtatcgccagagagcagtgacgggtcaatgacaacaacaggaacagaggaaaggccatcggtgttggaaggggtgtcaaatgccgataagacagcatctcttggtctggattcaatggagatgctcgtgcgattgatggcgggcagactctttccctcttctgccgccaaactttgctcgaatgagtatgcgcgaagcacattgttcgtaatggattcgctgtcccattgttcattctcgggcataatcacactgattcgtgcaagtgtcgtgttgtttcgtataagatgatgaagccttgccgtacgggaatccatgaggatgcagggctgtgggtcttgcgagctatccacccacgtgcatcctagccggaatgaggcgaatcgcgtatgttctgattgggaagtttgttcgacgaagtcgttccatgagggcatggaacgggctcggttttgatcgctgctataccacagttgcaattggaatccgtcgttggatgacaattgatgctccaatgttgttttcagtgtttgggattgccgccatttgaagttcgtaacgttcaaactggcagagctgagagcgagaacgatgattgccatgatgcagccggaagccatgagaaaacgtaaagggcgctttccttggattaatttgagtgcgttcggcaccagaacccttactagagcaatcgacaatgacaaggcaaccaatgccatgcacgttgtggcgatgatgatggagaggaatacctgaccggcgaatcctaagggagaagcgaaaggccagaagatcgcaccaatggaaatccaagtcatccatccgatgcagacgcagatgatgaaaaagaacgcatgccgcaggaattgcctcataataatgccggttgttctcatgccatgcaaggcttgtatcgcgcaaacgcgtgaagctgtcgacacggaaagcgcgccggacacaaatactacagcaagtccggcgaatatgacttgggcgatggaattggagaagaattgtttggtgatttgtgtgatgccgatgggggttgctctgttaagttcgaatccttggcgccgtatggatttggctactgaagcggtatcccgtggtgatccatagagaagccatcttcccaatgggtcggtgaatctgtctccgcgttgcacacgtgtgcgcggcccgaacccataatccgggtatggcgaattcgcatgcatgccgttgccgtctaatgcgccgaaaatagaaattacgcgtctgttggtaccgtgaccgtccggctcataggagactctcgcgagtacgacatgatgggtcgctgcgagaccggtcaatgtcgatagaggctgcccgtgcgcgtcggaaattccaatatcgtagctagggccggagggataggtttcttcgttattctgcgcatagaatcctgctgcgagagtgatgagagccacggccaatatactggcgattttataagtccagtgcatgatacaccttattcccggtaacaatgtgtttgtgcggcggacgataggaagttcgctcgccgcacattattgcgcggctgttttgccgcatgcaacacggtaagatgccaatgaggagcgaacgaagtctgtgtgacgggaatcgtcacagtgttacgatttcgtttgacggaggcgatttggggagggggtacttatgaagaacgggcgcctgattcggcttgccttggtggacaacgatcgttgctctgcggagatgatgactttgcttattggcaggacgattcccgaggcgcatatgctatgggttacggataatcccagtcttgccttggaacgttgtctgttcgatccgcggaagccggacatccttatttgcgatctcatgatggacgggctgaacggagtgcggctgacggaacgtattcgacagcggaacgtgcaggttggcgtcatcgtagtcacttcgtatgacctggcaacctatggtgaggatatcgcgtgttgcggagcccaagcgttgatttcgaaaagagatttcgcagcgaccatacgcgaggcggtcaaatcggtgtttgacgggggaacataccctcatggttggggtttgcatagccttgaagagacattgcatacggtggatgccgcacagccggaagcggatggtgccaggctcttctccgatcgagagctggcggtgttgcgtctctatgcacatcatgtaccgaccgttgaaattgcgcgccgcttgggaatcggtgtcgaaactgtgtacagctatgtgaaacgagccatgcgcaagatcggggtgacgaggcgcggcgaactccttgattactgtgagcgataccatgttctgtgacggcagccgttttcttagacgtcgcttccgcgatttcgggaagtcttggcatggcgagaagatcgcggcgctagcctgcgccttgtgcatagccgctgatacggtcatcgaatcgtgtatcaatccggtttgggatgcgtgggccctgtgggtgggtctgttgttcgtcatcctgtcgttgctctgcgtggcattcccgttcggcggcaatatcgcgttggcgatctcatggtgcgtggtgttccccttgccggtggatctgtccatgtcggtgagcgtggtgatagccgagccattaatcgtcctctcctatcaacgcatatggtgcggcgtggtgttggcggtgactgtgaccgtatctcgcgtggcgcagctgatatggcagtatgggttgccgatgggttgggatgccggggcgttggtgtccgttgtgccttggaccgtcatgccggcgttggcgtgcgttggaatcggtctgctgctgaattggcatcatcgtgagggggagagggagtcggaagcgcgtggcagggccgaatcgttggatttggcggcaaggctgcatgatgcgacgaccaatgatctctcatatctcatcataagcatcgacaggatcatgtcggaacacccttcgcaaggagagtcgatggacttgccactgttgcgcgaagtggctcaacgggcgctcgatcagacgcatgatgtcatagcggttctcgcaaagcacaatgtcggtactgcgcgaatcccgcgatgccatgcgcgtcgctccggagaagccatcgttccgatcggtgcaggtcgattcgaggccgagatcgaacggcaccggcgggaactcgcagcgcttggtttccgaggcgaggtggttgtgtccgatcccttcgatctcctgagtcggtttgacgagaagactatccagttgacgcggtcgttgctggaagagacgtttgccaatatcgccaagcacgcggatcgcgaacaagggtatgtgctcgccatacaagtgcggcaagacggactgtacgtatcggtggctgacgttcccgccaagatggcggatggagcattggcggaatctccgagaacattgggcatgggatttggaatggctcatctgcgtcaatcaattacgcggagcggtggttggctgcgcgtccaagaggaagacgggtattggagttgcctagcgtatattccgatatatcatcgggatacagcgtgaatcggaaggaaacagcgcatgggattcaacatcgaacgtgtggacaagccgtttgtggtcaaatcgccgtaccgaccatccggagaccagccgaaggccatcgaggaactggccacgcgcatcgagaacggcgagaacgacgtggtgctcatgggcgccaccggcaccggcaaaaccgccaccaccgcatggctgatcgaacggctgcaacgtcccacgctcatcatcgagccgaacaagacgctcgccgcgcagctgtgcgccgaattccgcgagctcatgcccgacaacgcggtgagctatttcgtttcctactacgactactatca

SEQ ID NO: 3236 - DNA, 3615 bp, Unknown
  R53_2m  MAG No. k141_6892
agagcggacaacgggactcgaacccgcggtctcaaccttggcaaggttgcgctttaccaactaagctatgtccgcatgtgttaccttcacgggcaacaggtgacaaagatacgccaatctcaggaaaaagccaagcccccgcgtgtcccaccggttttccaacgattatcgggtgccgccgtgcacataactcgcggtgaccgtatacagcagccaagcgatgggcatggccagcataaacagcgggtagaaccaagcgatgggcacattgcacggccatggccgtggaaatcaggaacgcatgacgataaccgatcagctggccgaagaggccaaggccttgatcggcgaccgtgccgaagtgaagttcctgaactacgccgacgtgccgttcttcaaccaggacgaggaattcccgaacccgacagccgccgtggccgccgccttcctggcgctcgttgcggagtaatcccgcccgaatcttggttacgttccgcctcaaggcggacggcggaccagctgcatcagcaatgtgccgaacccctctgatcgactccaatcagaggggtcgctgcgtttcaaggggctgatttggccttctccggaggtctactcccgtttcaaggggctggtggctgagtagacacgggccaaaaacggcgtaatgacgttagcccggagccgtttatacttgtggtttcccggatgaggagcccctcgaaacggagatagacctccggaacagcccaaatcagcccctcgaaacggagttagacggttgggatgtcggaaagaacactcatgccggcccaagaacccccactatgtcagatatcgctgcccagcacgcaatactgaccgtacagcacgacccgtccttcatgaaatcaggcacggtatgggcttcatccctcaacgcgcgataatggcggtatgacgcaacgacaactgatgcgggccacagtcgaaacgcccatcggcaggatgatgatggcctcggacggcgagggacttaccgaactctgtcttgaagactggtggtgggccaccgatcaccaagccgttctcgattcgaatcgcgaatccgatcgtgaacccgatgtgttccgtatgacccgcgtatggctgaccgcctatttcgccggcgagcgccccggcctagatcagacgccgccgttgcatcccgccggcacgccattccaacatgaagtgtggaatctggtggccgagattccctatggcatgacggtaagttacggcgaactcgccgccgaattggccgaacgacgcggtggcggccgcatggccgcgcaggcggtcggaggcgcagtgaagcgcaatccggttactatcatcgtgccctgtcaccgcgtagtcggctcgggccgcgcatttggcggctacggcggccgactcgacatcaaggccgaactgctcgaccacgaaggcgtggatctggcccgcttcaatctgccgaacctttgacggccccagcggtccgcctcgtcaaaaggattgagtggttacccctcccgctggcgggaagtggcacgtaacgccggagggtggtcggctggctggcatcgcaacccccgctacccgacaattttcgacaagctgacgggaatcctcccacgaattgttcgccgtcggtgcagtcttgctcgatcgcgccggccaaaaccgtacaatccctacaatggaatgtatatggttaattgctgcgcgcagccgcacggccgcacgcaatcgcaagaccacatggcccaaggggatatgcaatatcaacggaagcaggaggtgcgtatgaccggcattatcgattacgcgcacaccgaaacgcgctccttcgccgacttgccgttcaatgaaatcgacgccttgatcatctccacgctcatctatgaggatgtggccagtatctgtccgacgttgatgctggatgagacgcagtcaggctcgttcgccgcacgcattcgcgctttcgagcccaagcatccactgatctggctgaagggtatctggcatcccgagcttgaatcggtgagccttgacgaggccaaccgcgagctgcatcgttcgccggaaacgcatgccgacgacaagacgcacgaagcccaaatggtttcagtggtcaatccggacctgacccacgacctgttccaggccgcgggcgagaacccccgctacgccaacgttcgtctgggcgcggtggtcgagcacatcaatcagggtgagcaaacccaattcgccgccgccaccttccaactgcccgacggccacaagcgccgaaagccgacctacaaaggcacgttggttatttccttccgcggcaccgatgattcgctcatcggatggaaggaagatttcaatatggctttccagtatccggtgccggcgcaacgttcagccagcgcctatctggatacggtggcgcgactgtgggagggtccgattattctggtcggccattccaagggaggcaatctggcgatttacgcggccatgaacgccgaccccaaggtgcgcaagcgcattcagcatgtctattcactggacggccccggtttcccgccggagattgtgaccagccccgcctaccgcaccatccagccgaaggtgacgaaaatcgtgccaagttcgtcgattgtgggcatgattttcgagaccccggagccttgccgcgtggtctcttccgattcggatggcattatgcagcattccgccttcacctggctattggatggcgaccagttcatcaccgagccggatttgagttccagctcgcagttgtttaacgaggagctgaaccattggatcgccacgcttacgtccgaacagcgcgagcgtgcggtggacgcgctgttcaccgtgctgcacgccaacggcgccaccagcttcagcgaggtgatgagcaacttccccgcttcgattccggcgatgcttggcgcgtatgtagggctgacccccgcagaccggcgtcatttggttgaggccctggcaatactgttcaaggcgtccacggccaaacgcaggccgacgcccgccccggcttccgcgccgagttctgcgaccgccaaaggaacagccgaaaccccagcaggaactgcgacaggaacagatagcgcggccccggccagcgccgataccgacaccgacactgacaccgcagcttcgccctcagcggaggacgcaactgaaatcgccgattagctcatagacatgtccacaaataatagttatactgcccgataagttattagacagcgtgaccatatcacgctggtgcatcaggaggaagagatgccacgtccacgccatgattccgaggtgctgcccgccaaagaacgcctagagaacgctttctgggaattgctcgccgaccgcgactaccgcaagatcaccgtcaccgatgtggtgcgtgaggctggcgtgaaccgtaattcgttctattatcacttttccagcctgcctgaattggccgattcagccatcctgcatcaggtcgaatcgattccgatcaaccgcacccccgacccaaatggcaatcccgaggaacaatggcgagaccgcgtcaccgccacgctctccgacccggagcagcggcagcgcctc

SEQ ID NO: 3237 - DNA, 3230 bp, Unknown
  R53_2m  MAG No. k141_6926
aaaaggccggccgcaccgtgatgccgggccgcacccacatgcagcacgcccagcccgtgctgctcgcgcaccagctcatggcccacgcttggccgctgattcgcgacgtgcagcgactgatcgactgggacaagcgcatcaacgcctctccgtacggctccggcgcactggctggcaacacgctcggcctcgacccggaggccgtggcgcgtgagctcggcttctcccgcgtgaccgacaactccatcgacggcaccgccgcacgtgatctcgtggccgaattcgcgttcgtggccgccatgaccggcgtggacatctcccgcctgtccgaggagatcatcatctggaacacccaggagttcgccttcgtcaagctcgacgacggctattccaccggctcctccatcatgccgcagaagaagaacccggatatcgccgagctcgcccgcggcaagtccggccgactcatcggcgatctgaccggtctgctggccaccctgaagggcctgcccaccgcctacgctcgcgacctgcaggaggacaaggaggccgtgttcgaccaggtcgatacgctcgaagtgctgctgcccgccttcaccggcatggtcaagaccatgcacttcgacagcgagcggcttgaagaggaagccccgaccggcttcgcgctggccaccgacatcgccgaatggcttgtcaagaacggtgtgccgttccgccatgcgcacgagctctctggtgcctgcgtcaagctcgccgaaggccgcggccaggaactgtgggatctgaccgacaatgacttcatcgagaccttcgccgcgttcctgccggccgacaaggctccgggagtacgcgaagtgctctccagccacggttcggtcgactcccgcaacggcaagggcggcaccgcttacggtcgcgtgcgcgagcagatcgccgacgccaaggccgaggtcgaagaactcaagctcttccccgcatccacgtcggatggctccgcctacaaagcccccggcacgttctagtcccaatagagctccctcgtcagagggagctctattttgctgttgtcactgcaacggcatacactgagaaatcgtaacgaacgggagccgtgaggctgagaggaagtcgccagacttcgaccggggaacttgacgcgggtcatgccgccgtaaggaatcgttgttgcagatttgccgggttctccgatacagctttcattccgtttgcataattcagccgtgagacggtcgtgatggagccaatacatcacagcggtcgaacggtcgcatgattgggttcatgaatgggcgcaccacttaaggtacggttcgtttcgtgcacccttttttactatctgaaaggatattatgcaggtcaacggagagcaggtcacgctcgagacgccggtcagcgtcgccgattatctcgaagcgcacggattccgcgccgagcgtgtggccatcgaactcaatggtgagattatcccgcgcgataagcgtgccgacgccatgctcgacgaccagtgcgtcatggaaattgtgcagtttgtacagggtggatgaaaggaaaagctatgagcaatattaatccggttactgaagcatctgttgaggcgactccgctgccgccgcagcccgccgtcaccaatccggtcggcaccgccgcgccgattctgccagtggaagacaagccgctgaccctgggcggtcacgagttccagtcgcgattcattctgggctccggccgctacgacctgaacctcatcaaggccacggtcgaacatgcaggcacgcaaatcgtcaccatggcactgcgccgcgcgcagaccaccgagaacagcgtgctcgactacattcccgaaggcattacgctgctgcccaacacctccggcgcgcgcaacgctgaggaagccgtgcgtatcgcccgactggcacgcgaagtgtgccacaccgacttcgtcaaggtcgaaatcgaacacgagaccaagtacctcctgccggacaacgccgaaaccatccgagccaccgaaatgctggccaaggaaggcttcgtggtcatgccctacatgttcccggacccgattgccgcacgccagctggaggaggccggtgccgccgccgttatgccgctcggttcgctgatcggctccaacatgggcctgcgcatgcgtgacttcatcgagatcatcatcgccaatgcgcatgtgccggtcatcatcgatgccggcatcggacgcccgagtcaggcatgcgacgccatggagatgggtgcggatgcggtgatggcgtacacggccgttgcctctgctggcaatatcccgctgatggctgaggcgttcaagcacgccatcgatgctggtcgtgcggcgtatctgtccggtctgggcaaggtgaccgaggggcaggccgtgccgtccagtccgactacgggatatttgcactgacacttttattagctcccctctctgaggggagctggccgcgtagcggactgaggggagctggaaacatggagaaaacatggcattgactgatgaacaggtggagaggtacgcgcgccatctgattttgaaggggctgggcgtcaaagggcagaagcggttgttggcctccagcgtgctcatcattggagcgggcgggcttggctctccggccgccctgtatctggcggcggccggcgtcggccatatcggactggtggacggcgatgtggtggatatgagcaatctgcaacgtcagatcatccataccactgcacgtgtcggagcgcccaaagtggaatccgcggccacggccatccgcgcgctcaacccggatgtgacggtcgacacctactacgagctcgtcgatgccagcaacatcgccggcctcatcaaaccgtacgatctggtgatcgatgccaccgacaacttcgccgcaaaattcctcatcaatgacgcctgcgtgctggccggcaagccgtacatccatgccggcgtggtcggattcgccggtcaggtgatgaccgtcattcccggcgaaggcccctgctaccgctgcatcttccgcgacatgcccgccgccggtgagattccgacctgcaaggaagccggcgtgctgggcgcggtggtcggtgtgatcggcagtctggaggcgactgaggccgtcaagctgattgccggcgtgggggagccgctcgtggctcgtatgctcactgtggatgccctgaccatgaacatccgccgtgtg

SEQ ID NO: 3238 - DNA, 4492 bp, Unknown
  R53_2m  MAG No. k141_7170
cgatcttccggtgcgtcagtcgtgccttcggacggtggaaccggctgaggctgttgatcaaatggcgttgtcatgatgtccttcttcccttaagtagcagcattaccagcacagaagaggcaagcccggcaaccgttacggtcaatccgactgccatggcaagccggtatcgttcgctcatcattgcgtcccttcttattgctcgctttgctctgcgatacatcgaaaccagtgtatggcgttgttattatgtacgcaaattagcattttgtatgcatattagctttattgtcgatgcttgataccgcgcatgaacatcctttccgccaccgcacctacacggatggcatcgaccattgtcggcgacacgcgcgggccatacatcagctgacaactgaatttttcggcgtgtttccgaaaagtcggcgtcctgtacgctgggaatcgagcaaccgcgtacgatggcgcagcacagcacccgcaacacagcgacaaggagcatgggcaatggcagacatccccgaagaacatttgaccgaggaactgttggatcggctgctcgccagcgccagcattgagcagtatctcgatgagggactcgtcagcgcacgcacgctgaccgactatctgttcgaccgtatggaagcccatgacctgagacgagccgacgtggtgcgggcatccggcctcaacgccacagtggtttatgacattttctccggcaaaagccgccccggccgagatcacgccattatgctggcttttggtctcaagtgcacattacgtgaaacccaacggctacttcgtcttgcaggcgtttccgaactgtggtgcaaacagcgacgcgacgcgattatcatctggtgtatacgcaatggattcgaccgcatcgccacggacgacgagttgtatcgtatgggagagacgacgttgctaccggccgattgacgacattcggcccaacaacactcaccagtgagacgcaagtaagagggcatcaaggagagacatggacgataagcaggcgatgcatgcgatgagcatcgacgatgcgtaccatgtcgagcgtacgctcgctcgcggaccttccggcgtcaccgaactggtgagcattgacggcaacggcccgttcgtacgcaagaagattccctctcccctagcgcaacgcaatgtgtgggcggcgctcagcgcctgccagagtaatcgtctgccgcgtgtggaagcgacgtacgagctgcccgaccggttcgtcatcgtctacgattacgtgccgggcagcacgcttgcgcaaattgcagaggaaaacgggcggcttgcaccgaatgtggccgtgcagcttatcgaccaaatttgcgaagccgtgcaggagcttcaccagcacggcgttatccaccgcgacatcacgccggccaacgtcatcgtggcccaggatggcgcgcatctcatcgatttcggcatcgcgcgcatccggtcagaggcaagcaaccgttcacgggataccacggcgcttggcacctacggattcgcctcgcctgagcaatatggctttgccaaaaccgacgcgcgttccgacgtattctcgctgggccggctactcggattcatgctgaccggcgtatatcccgatgccagcgactacgagcagcgacttgccgatgatgccgcagtaccggctcgactacgcgccgtcatcggctatgcgtgcgcattcgagcccagcaaacggccacagagcgtccaagagtttcgccaggcgctgttctcccagtccaatccgcccataccgaacgcatcatcggcaaatccgccatcaacgagaacaacgaacggcagcgcgtcggcgtctcgactattccggcgtctgcacttgagcaaacgcgccatcgtgctgtggtccattgccggagcggcactgataatcgccgccattgcgggaggcattgtgttggcaggccaacttggcattatcgggtcggcaacatcacccgattcctcgacacaatccagcagccaatcaaccgataaggccgatggcgggcactcctcgaacgggtcaggaaccgacaatgccaatggcacgggcggagtaggcggcactgacggcgctgatggagacaatcaagacaccgtcaccgacaatcctctgaaaatagtggaatccggctggtcggcggaccagcaagggtatgtccactacgctttcgccctgcacaacaccagtaagacccagcaggtgcagtatccgcagattaccattacggggcgggccaaagacggttccatcgtgttctcgcagacgcaagcactgaatatggcattcccgaatcagactgtatatgacgccggtcaagcaggcgaaggcaccgccccagaaacggttgattttactgtgctcaatccggatacatacaacgtcgccaaggctcagggaaccgccgccttccccatcagtggaatatccaaaatagacaacagggacggcggcacgacgttcaatggcgaggtccgcgccgtggcagatggattcaagccatctgatggacagcaaatcaagatttccctagtactgcgtaacgcacagaacgcaatcatctatggagatatcgcattcgtggattggccgggcaatggccgatccacgccattctcgattaccgtctacgatctgccgaagtatgtgtcttacgatctgtatgcgcaaatctggtagttgactttacgtctggcaggtggccgtcaggtgcctgtcaggccgctgttcgcgtcacctgcgcactgacgttacggcgcgcctggccgaacagatagatgccgatgggcagggtcagaacaccgccgatgatgaacaccagcgaaatcgggatcacgtcggccagtggcgcgaagatcaacatgccgagcggcattccgagcgtgctcagggtggtgtcaaggccgaatacacggcccaccatcttctcatcggcctcggtctggatgatggtgcgcatcgggcccgtgcagatggccgaagccaaaccgttcaccacatcaatcagcaaatacgccagcagattgtgaaccacgccaagaccaacgacggagacgcccaccagagcgatgccgaaggcgaccacgcgcatgttgttgcggatgagcttggcaccgatggtagacatcagcgcgccgccgagcagcataccgatgctccatcccagctcgttggcggcgagtttatcggaggcggtggtcaggttgatgaatccgagattcaaatcgatgccctcatattcgcgggtcatgagcaacagcgtaaggttcatcggcgccacggccacgaagcacaccaaggcgccaccgagcaccacgttgcgcaggttcgcccggcgccatgtgtagctgaagccatctttcaagtcagcaaacacacgacggacgctgacaatcagcgaacgatcagcattggcatccgacatcggttcgagtgcgggttgcccgctattctccgcttcagccatacgcctcgcaacatgttccgcgctcttcttcggcactttgatcaacgccacaaagccgacgccgataatggccgtggtcacatcgactaacagaatcgaccacagcggcactgtgttgataagcacagcagccaccgcaggtgccacaatcatattcaccgaattaatcacgccgtatattgagttgacgcgcaatagtttgcccgagggaacaacatccggtatgaacgactgcacagcgggcgtctgcacaccgccgcccgccgaacgaatgaacagcaccacgaaaatcatggtcagactcgcccatcccatggcgaagctcagcgacagcacgacggtgaccacagcaatcaccatatccggcagcataatcagcaacttgcgactgtgacggtcggcccaggagccgccgaaaatcgagacgatggcctgcggcaccacgccaaacaacgtggccagcagcatggccgaaccggttttagtctgcaatacgatccaccaccagatggcatattgcacaatattggagcccagcagcgagaacgcctggccggtgagtagaagcactacacggcggatccacgcacgctcggattccccgttggccactgctgcggcataggcggcaccgggtttgttcgcgctatggaccgctgcgcgcgcattcgcattgtcatcgccggaaacctcgggtgtttcgcgcacagttggttcagttgttgtactactagaagacatacgagtgttctcaattcttcaattccactacaaaggtcacatcacggcatacgcacgccgacgcgcgtatgcgtgcacgactccagcaacgagccgtacccgccgttagatggcaggcttcagtatcgtgacgccatgcgttagcgtcaccatgcaacgataggaacccactattcgatagtatatcatgaagacgtgacgttgcccttgcgcaggtgccgtaagactccgcggacaaagcaatgaggcttccc

SEQ ID NO: 3239 - DNA, 10001 bp, Unknown
  R53_2m  MAG No. k141_7217
agggctgatcaacggacagcccccgaaaccggcacatccgaaaatcgtgccattccccaaaaacagcatcaaaacggaagagctcagcgacgaagagatgtacgagcgatatctcaaagatattcccggattggggcctaccattgcgcggatcgccggactggacgttccgcagtccgcggacatgccgctgattcgtgatgcatcatccatcgaaaggccatcagctcgcagcgcgtcggcatccgcattggagggcagcgcccgctactccatgctggaagagcaactgttgcaactgatcaacaagcacggcaccatgtccacgcccaaattggtggaggccaccggagccccgcgctccaccgtcacctatcagctgcgcaaactcctggaatcaggcacgatcgaacgcacgcaaccagcccgctcccccaaacagtcataccggataaagtccgcctgaggcgtgcaaagcgaaaaaaaggcgccgccgttggcctgtgcctcggcatatgcccaacggcgtgttttgtttttccaggaaggcgggaatcgccatgctgcgcggtacgcgagtgatattacgcgggtttcagtgcgttgtgtcaaccaaacgcgagaggaacatatgaccatggccaacgggcagacgcccgctgacccgatgcttatcatgcttatgatcgctgcggccatcaccctgggcgtcaacatcacccgctccatggccggcggccacgccgacattctcgaatgcgtgggcattttcttcgccatcgccctgtctgtgaccatcaccggcgaaagcgttccgagtgccaaagccgccaacaccggtatgacaccgctgcaggagaagctcgcgaagctggacgaacttcatgggcggcaccgccgaacagcagtcgaccattctgttcacgctgttcgtggtgttccagccgttcaacgccttcaacatccgcgagctgggcaatgccagcccgttcgccaatctgctgcgtaacaaggtgatgatcggcgtgttcgcgctgatgttcgcacttcaggtgctggtggtgcaattcggcggcgcgatgttccgcaccgtgccgccgccgatcgacatgtggctgaagatcatcgcggtcggacaaatgcgcggctagagttctttggctcggtagatgcggatggctataagcatggagccaaaatatgcgagcagacacaacacggcgagaacaagcgccgtatgccaccagatcgtcaggaaatcggtaatattcagcaaaagccattgccagtcaacaggcaatcgggccagcagcgcaatgacggcatacaagccaaccaggaccacgccagaggccaccatcatcttgcggaaggtgaaccggtatgcacaggccagcagcaccgacccaagaatgatagccaaagcgaagatgaaagcacctgctgccaaggtaccgatccaccccatatctgctatatcgccaaagacaatgaagacgccgccgcatatcaccacgtccaaagcccagagcaggccaaccaccaacagaaaaaggtaccgacctacaacttgtgcagtgcgtgaaacaggaatcagccctcgcatggcactgtgccctgcagattcctcggatgacgcaggccccaatgcactcatacatgccatcgtcgatgccaaacctccgagtccgcccatcagaccactggcaacgtgttcatcgacgtgggtcgatatcatcaccagcgataccacgatagacagcaccgggaaaaccagcagaaataccatattcgccacgctgaacagacccgtcccgacacaatcgaatcgacattgctttactacggatttccagctcatcgtcaccattcccttgaagcaaatatgcgagaggcaattacatacgagactccatatgccacaaccgtcgttgccaataccgcaataaccagccacaatcgttgcgcgatgatggcattcgcggcatgggccaatcctttggtcaccgaaacaggcaaaatagatagcagtatggatccagccaatacaacgacataaatcaccatcatcgtgacttgaagaccgcctagtttggtccacagataacccgtgggcacgataagcgcgaccatcagcgcggtgcagaaacctcccaacggagccgcccacagattgcccgcgaatgaccaatccggattgaccagcacttgcaacccgtcaatcagaacaatcatcgctatcgacaatacggaaatcaccaatccaaccacatatcgcgcggccacctggctcttcctcgaagccggaataatgccacgaagtcgatatccgttctgtaagtcagcaaccgccatggtcagcacccacatggcgcaggtgaataccgtcatgatgacacccatgcgatagccgaagccatcaccgtaagcttcaccttgaaagatgacggagaacaacggtgccaacaacaacgagaacacagtccgttcgccgacgcacaggtaggccatatcgacgcgcaatgcagtggtcaatgcatgttgccgagaccgcgacaccctcagtattgcctccatggccgctcacctcccgctcaagtcacgattggaatcatgggcattggtcagtcgaatgatgtcatcaatggaagccgattcaacgacaagccccgaaaccaccgacgcaacagcatcaagcctgtctgaccggaccagcgcatcgaatccggtggcatacgtatgtgagcccagcaccacgtccgcaggcagttgtgccagttcgtctggaccgcccttaatcaggcggaacgattcctcaaactcgtctttcggaccggtgtagtagagacggccatcggtgatgtaggtaatgaagtcagcagcacgttcgaggtcggcagtgatatgggtgctgaacagtaccgaatgttcgccatcctcaatgtaggcatgcagtatatccatgagttcgtcgcgggcaagcacatcgagtccgctggtcggctcgtcgagaatcagcagtttggcgtcatggctcaatgcgatggcgagcatcagcttcatctgcatgccgcgggaaagatccttgatatgtttcttgccgttctgtgcgtcaccaaggccaaaagtatccagatacttgtgatagcatccaccgtcccatgatggatacagtggcgcgacaatacgttcaatgttcttgacttgccactgttcatgcatgtagctgaagtcgaacaccacgccgagttgttctttgacgggctcctcgttggcgatgttgtcgaggccgagcacgtgaatcgaaccggcgtcgcggtggatcatgttgaggatgagtttgatgagggtggatttgccggcgccgttcgggccgatcagtcccatgatgtagcccttgggcaggtcgaaggtcacgtcgtccagcgtgaagccggaatcatagtgtttggtgacgtcggtgacctgcaacgccatcgcgtcggattcggatatggcggtcatgtccatggtcctttcttgaggttattccttgcggtattcctcttcgagcatgcggtccaatgcgtccagcggaatgccggcggctttggcgccccggcttgcctcggccaggctttcacgaatctgggtttcgagctgacgttgcatcagttcgttgcccttgtccatcacgaaagtgcctttgccttgaatgttctgcaccacgccctcatcggccagttcgttgtacgccctggtgacggtgagtacggagatgcgcagctccttggcgagtttcctcaaggaaggcagggcctcgcccgccttcaactcgccactgagcaccgccgaacggatttgggttttgatttgctcgtagatgggttcaccggacacggatgagatgatcagtttcacctatgcccctttcgattgtggttgactagcaccccagctgtttagctgttatacaacacagtataactgttctgcttaactgtcaaggtgtgttgcataacagctaaacagtgaacaaacaccttgccaacatacagtgtcgaaacatgggccgcgcctacaatggcctcgggaaggggcacctatgccaaacaacgccgttacgccgacagccccgccagcgggggtgtaacttttttatcacagcacgcgcggggcgtcatggaagtcgaagagaacaccgtcggccaggtggcagatttcgggccagtcggccgcggaggaatcgtcgtgcatggcccagaccgtcataccgaccgatttggccgatttcatggcgaccagcaggtcctcgaacaccgtgcaatcggtaggtttgacgcccagacgtttagcggcaagcagatagacgtcgggctggtccttgccgacgtcgttcacatcgtcaacagagacgatgtcatcgaatagcccgaacatgcccacatgccgcagcgccggttcacgcaggtgcgggggcagcgaggtggcgacacccagtttgacaccggaggctttcagatcgcgcagatagtcaagcgcgccgggtttggcttcgaccgtggtggaataggcgacgctggccatgtcgtcccattcctgcatgagctcttcgggcgtgtctgtaaggccgaagcgtgcgatggtgtattcggcaatctggcggaattgcatggcggaaactttggtcatgtagtcgggcggaaccgcgatgccacgcttgttcaggaagtcgatgtcgacttggtcccagactcccatggagtctaggagggtgccatcgaggtcgaatatggcggctttggtcataggacactttccttcaacagttctcgggcgtggtctagggaggcttcggattcgctgccggagagcatgcgggcgatttcgtggacgcgggtttcgccgttgacttcggcgatggtggtgaccacgcccaaatcgtcgtcatcggcatccggcggctccttggtgaccacgaactgcgcgtccgcccacgaagcgacctgcgccaagtgggtgacgacgatgacctgcgcgctgcgggccagccgtgccagacgtttgcccagttcgaccgcggccttgccacccacgccagcgtcgacctcgtcgaatatgaaggtctggtcggcaccgccgcgcgtgtcggcagccaccagctccaaggccagcatcagtcggctcagttcaccgcccgaagcgcttttgcccatcggcaactgcggtgacccctcgaacggcgtaaacaggaacgcgatatcgtcgcgaccatacgggccgagcggatcatcggccttgtctcgcggcgtgacgcgcacttccaaggaggcgcccagcatggcgagcgagccgagttcttcagtgacgcgcgcgcccaagtcggcagcggcagccacgcgcgcggcgctcagcacgtcggcggcggcgagggccgcatcgtacagcgtctgccgttcggattcgagttcggcgaccttttccggcgaggcgtccagatcctccagatcgaacgccgccttgtcccgccaagcgagcacgtcggccaaggtggggccccaccgacgggtgaggtcgccaagctcgtggatacggccgttgatctggtccagatcctccacgctgccttcgtcgcccagctcctggctcagggcgaacaccacgtcgcccaaatcggcattgatggattcaagccgatcggcctgctcggcgaacgtgccgccgacgcgaatcgcgcgcaacgaggtcaccgcatgattgatgagttccacggccgaagcgccgtcggcggcgtccacatccacctgcgaggcatccagcgcgcccagcgccgaacccacgccttgggcgatgtcggccgcgttttcgatgcgttcgcggcgcgccttcagctcctcgtcctcccccggctgcgggtcggttcggttgatgcggtcgatggattcgcgcaggtagtcggcctgttggcgggcagaggattcctgcgagcgcaggcgttccagccgctcatccatggcggccagcgcatcccacgccttgcggtaggcggccagttcggcttcgtctccggccacccggtccagaaactcgcgttgccgtgcggcggccgcgattttcagctgatcggtctggccatgaatgatgaccagttcgccggcgatggcccccagcaccgaacgcggtacggacttgccgccgagcacggcccgcgaacgtccggaagcgcgtacggtgcgggaaaggaacagttcgccgtcttcggggtcgacgcccgcgtcgtgggctttggccacggccgcggcagcaccggtgagcccgctgtcagaatcgtcagaaccggcatcgtcaccggcatcgttggtgtcgccggaatgttcagatgcgacggcatcatccgcgagcgcgaaaatcgcctgggcccaagcctcgtccgccccggccgagacgcgcgaggattcggcggccccaccggagaccagtcggatcgcggagagcagcatggatttgccggcaccggtctcaccggtgatggcggtcatgcctgcggccggcgcaatggcggcttctcgaatcggccccagattgcggatatcgagttcttcgagcatcaggctcctgccttgccgtcacgttcgcccggcttgtcgggatcggtaccagcgacaccagcgtcaccggcaacgccagccgcatacgcggccgccgggaacgtgtgcccgtgatgcagcggctggctcgaggcctcgttgcgcgcgtgctcgcgccaaccgaccacgggcagatcgaacttggagaccagacggttggtgaacggcatgccggagagtcgagcgaggcgcaaggtatcgcgcgattcgcgcaccatgacgcgcgtaccctgcggcagggcgcgctgacggcgtccatcgcagcaaatccagccttcggacatggaatcgtccagaatatcgatggtgaaggtcgaaccggagccgatgatcagcggcctggcgaacagggcatgcgcggccaacggaatcagctgcagggccttgacgttcggccacatgaccggaccgcccgcggagaaggcgtaggcggtggaaccggtgggcgtggagacgatgacgccgtccgcgccgaacgagttcatctccacatcgtccacgcggatggacagttcgaccatcttgccccggtcggcgcgttccagcgtgatgtcgttcagcgcccaatcctcaatgggcttggtggtgccaggcagccagacgtccacatgggcgatcatgcgttcgtcgatcgaatagtcgtgggtggcgacccggcggatcgcctcgtcgatctggaagctttcgaattcggccaggaagccgacatgccccatgttcacgccgagaatcggcacctgggtgcagtggacgagttcggcggcgcgcagtatcgtgccgtcgccgcccaggaccacgacgatttcggtgtcgtccgacacgcacggcggctgcacaccgaaatcgggggcctcggtgttgtcgatgatggtgacttcgaaaccggccactcgcagctggctcaccgcctcggccactacggttccggtctgcctgagcctggtatgcgtcaccaccaccgcgttgcgcttggccatggcatcctcctgtcgattcggtcgcactgctcattattctagccgcagacaccgtcatcactcgtacaggtgttcgaaaaatgccgcttcgtggcgcgtcgccgacaacgttccgcagagtcgattaacgtaaggcttcggcatacaatggcatacagccgcgcgatcaccgtacgcgtgccgtgcgcagcgcgatggcatgccgtatgaccatacagcagtatcagttgaggagcttgaggacccatggccaatgacttcgacgaatcctccgccaatgaggaggcctcgaagggcctgtcatggtggtattcggccgatgtactgagccgagacaaaagcgataaaaccgccaagcgcattcgccgcatcagcatcaccgaccgtctgctcaggcacccgggccgtctgtccatggtgtatttcggcgcactgatcatcatcgtcaccggcttgctgctgctgccgatctccacatcggacatcatcttcaccaacttcccggtcgcgttcttcaccgccgtctcggccctgtccacctgcggcattccggtggtgaacaccggcgaatactggtcgacgttcggccaagttgtcatcctattctccatccagttcggcggcctgggcgtcatgaccttcgcctcgatggtggctcttggcgcttcccgcagactcaaggtctcccagcgcatgcttaccgcgaacgaactgggcaccacgaagctttccgaggtcaaaggcgtactcaccgtggtattgggcacctccatcatcgccgaggtgcttaccttcgtgctgctgctgcccgacctgttccgcgtgaaccacggcaatatgggacgtacattgtggcaggcgctgttctacgcggtatcggcctacaacaacaccggtttcacgcctgacgccaccggcctgcatgtgaaccgttggggcgtgggactgccgattctcatcagcgcattcataggaacgctcggcttccccgtggtgctgaatctggtgcagtgcgcacgccgacatctcagcccgaaacgttggacgttgcacaccaaactcactttggtgaccaccgctgtgctggtggccacctcactggcttggttcctgctggtcgagtggggcaataccggcctgttccccgcagacggtcccggcatgaagatgcgccgtgcgatgagcgccgccgtcatgccccgctccgccggtttcgatatttcctgggtgcccgaagtcacgaatgagaccaaggtgttcatgagcatactcatgttcatcggcgcaggctcctcatccaccgccggcggcatccgtgtcaccacgttcgcggtgattctcttgatttgccgcgccgcattcaccggccatcgcgatgtcaccgtgttccgccgccgtatcccccgccgcgtccagatgaccgccgtgtccgtgaccacggcctgctttgcgctggttatggtcggtgcgatgatgctgatgttcaccaccggctgcgcgttcgtggacgccgtgttcgaggcctgctcggccttctcgttgggcggttattcggtgggcgtggcaagcgccggcaatccggccagcctgtttattctgtccgccgagatgattgtcggacgacttggcccgttgaccatcgcctactccatcagcagaccgatggctcccgaacctattcgttatccgcaggaaaacattatcgttggctgatcggccattcaatcggcacacagaaatccggcatagagaggaccatcatcatggcagcaaaaccgagcggcaacaaaagcgtgctggtcatcggcctgggccgtttcggcgggtccgtggccgccaccctcgaccagatgggtcaggatgtgctcgccgtggataagaacccggagcttgtggcccgttggtccgcgcatctgcccaccattcaggccgacatgaccgatgtgctggccatcgagcagatcgacgcctcccagttcgacacggccgtcgtggccatcggcgacagcatcgaggcttcggtgatcatcaccggcaacctgctggatgccggcgtttccgatttgtgggccaagtccgtgtcccaggagcatgcgcgcattctgcagcgcatcggcgcccgtcacatcatcaatgcggagaccgatgccggcaagcgcgtgggtcatctggtggccggcaattatctggattacatcgaaatcgacggcccgtacaccgtcgtcaagatccacacgcccctatacgcggtgggtcgcagcatcgaggacgtgcaggtgcacgacaaatacggcgtgaccgtggtgggcctcaaggccccaggcaaggagttccagtacggctccaaggaactggtcatgcatcgcaacgacgaactcatcctcatgggcaagcagga

SEQ ID NO: 3240 - DNA, 26502 bp, Unknown
  R53_2m  MAG No. k141_7332
atgtgcatgttcatatgctcctcctcgcaagcgtcacgttgcgttcctcgtcgcccagcagatgccacgcgatcccgacggcgatcacggcgacggtgagcgggatgccgcgttgcgcgaccgggtcgagcacgtacgggtcccacagcagggcgaggaacatccatacggcgaccaccgccatgaccgtggcctgtgcggacgcggaccatgcggcggccgcgaacccggccaggcccacgaccagtatcgcgccggccggcgcgatcagacttatccatcccatatcctgcggccataggcccaatacatgcaacggcgcgaacataagcacggcacccacaagagtggatacagccgtgagcgcgaaccgtgtggtttgcacgcgcctccaacccacgggcgtggactcgctcgcctcgaccagcgggtcaccggtcaatgcgaccgccacgcacacgcccgagccgatcaccatcagctgggcgagccagttcaccaccatcaatgtttgcgtacgcgaccacacgccggataccatgacgccggctgccgccaccgcaatcccacaggccacgggcattgccagcaatcccatgccgatgcgccttgcctgagcgcgaatcattcccgtcatgccgaccctccttgaagtccgatgaagttgacggtcattctttttgttcgtcaccaagtaggtagcggccgcctgtcctgaagttcacgcgacatgccgaacgaccagatgagttatcggcttcgagtcggtcagacggtcgcggccgccatgcgcgccccggacaatcgtccggccagcgccaccgcccccacacaggccatcagccccgcgacggccagacctagctgtccggaggattgtgctgcaccggaccggcttgcgtccgccagacccgcgaacccgaacggattcagccggattgcgataatcaacagcaggccgacgccgaagccgacgcccgaggagaaacggatcgcgagcatcgcgcccacgccggcgaccagcagcaggggcgacagccatccgaccagcagtacgccgaatgtcccatacccctgcgcgcccatcacggtggtcaccatcaggccgaacacgacgtcgcaggcgagtatgaacaccagccggaccagcgtgaccgcccccgtacccaacggggtggccgacgagatcatgtccgcgcgggaatccccgaacgccatcgtcacgctcagcagcacgccggccagcaccatcgagcagaacgcatgggacacgatcgtcgcactccagccgaccgcgaagaaccgcgcccccaatccggcgaacgccatcaacgccagtgtggccggcaccacctgccacggcaccacccgcgactgccggcccagcagcagcatgaacaaccgcagactgcgcgcccacgaccatgccggtccgtccaacggggaccgcgacgcgcggatgcgcgccatcaccgccgcagcgggaggcgcgtctcccgaacgggatcgttccacggcgtccaatgccgcaagcagacgcccgtcgggcgtctcgtccgtcaaacggtcgatcgtttcgtcaagatgatcggtcatcaggattcaccgttcctttccatccgcatcgttttagcggtcgagttgcgcgcgcagcagacggcgcgcacgcgagatacgggatttgaccgtgccttccggcacgtccgacaaatcggcgatctgccggtacgacaggccgtgcagccacgccaacgtggccgtctccaccagttcgacgggcagccggcgcagcaacgccgtcagatcatccacgcccgcttcggacagcacggccgtctccggactcggtccatcgtcacgcggttcgggcgcatcgtccaacgcggtcacattcgggcgtacgcgccgcacgcgcatgtagatctgccgtttcgcgatgcccagcagccaggacagcaccttcgcatcaccacggaacgccctcgccgaccgccagcagcccagccagacgtcggcgcacacctcctcggccgtgccggcatccggcacgcgcacgcgcacgagcgcccgcaccgccgcagcgtgacgcccatacagggtctcgaaggcgcgttcgtccccggaggcgacccgcgcgagcagatcctcgtcgcgcatcaccgccccaccgggcgaggtcatgtcatcctgcgtatgcggctccttccacggcacatcgtaaacaaacgttcattgatgtatgtagctagaaacgaaccgacggttcacgacacgagcaacgacacgcccggaaggcatatcggattaagttgtgtagaagaacagaaactcacagaagaaatcgttgcgcgcgtgcattaccgagtcccaagcctggctagttcttggcaggaatgctgacatccagctgccagtgggcttgttcagtgtgggtttggaaggtgccgccgtgtgtttcgatgatggtccggtagcggtcgaggccgctgcccaggccgagtcccatgtcggcgggtgtggtggtgtcgctggcggagacgtggatggcgtccgtgtcgaaggtgacgcagatggcgtaccattcgccccggtcggcgtgttcggcgatgttcgcgtacagttccgccggcaagcccgacagcagtcgcatggtctccggcgtgagcggccggtgtggttcggcgagcaggttgtcgccggtgaatcccggggcttcgagcctggactcctcctcgtcgatcagcgattgcagaccggcacgctgcgcggcgatgccgacttctgcgggcacggccggctgccgcactcaaatcgccatcggctggttcaaagcaggctgtaaacccgctatttgcccaacagttcgtcatggctgccggttcgcatgaacatggcggtaccatcatcgcgaatccatagaagcagccagtcgccggcattgccgatgtggcattccaatacgccgtttaaatcaccggtaagtgtgtgggcgcgatgtctacgcctcaatacttccttggagtccgccgtgtcctcaagaaccagacgaatgacttctttcagcgggcgtaaatcagtgtgcttgcgtttgagtttcttgatatctcgctggaatgccgctgtgtaatccggtttgagcattgatcagattcccaacgaatcgaacatctcatcggcactgttgaaacgaggtttgccgtcggcgagcctgttcttcgcctcgtcaagggcctccatggtttcaggcggcacggtcgtataggaaaggtttaggggaatgcgcctctcccggacaatctgcttgtagaaggcgcgggtgaccgaagacaagtccagaccgagatcctcggcaatgtttgcggctttctgcttggtgtccgcatccacgcggactgtgacggatgccatgctcacattaacctccaacatcattacgtaagacaatagtatgtatttgtatgctaatagtcaacattctgcggttgcggcatctcgaccatggtacacatcccgcaagcggattgtttaccggatgcaatcgatgatcggaatgccgaccatccagctgtcggcgggcttgtccagaatggcttctggttcatcgcaacgccagcgcgggttgcagccgtatggctttgatggccggggcaagagagccgacaagcgaggtgacgatggacgcacaggccgcaatcatcgccgccgtatatgggtatgcgggcggttccagcggcgagtcggcgggcatcatccacggaattgcccagaccagcaccgcggagatgagcaccgcggcgaaggcgatgatgaggccgagcagcacggacgagccgatgacctgtatggctatgctggctctggtcgcgcccagtgcgcggcggatgagcagctcgtgcgagcgttgctcgatgccggccaatccgatgttgatcatgccgatggcggataccgacaacagcaatatcgcggtgacggtgacgccgagttggagaaaaccgataacctgctcgtaatcatcggcattgtcggaacggttccatgacgatatgctgccggtcccgacgtcggacaacagatcgtccaacgcggttttggcgtgttgatcgtccacgccttcattgggatggacgaggatggtcagcccatccggttcccaggcttgcggccagtagcgttgcagtgtggtcgcgttgacgtagatggtgggtgtgtccgtcccgtcggcgatgacaccgttcacccgtgccggcacctgttgcggatttcctgtccgggcgagtgccacggtgccgtcatgcacgtattggcgggcgctttcgttgactgcggtttccagcgtggcgggttcgtccgctccggtcagccatgtgccctcgatgatgggggcgggcatgattcttgtccgttcggcgtcggtgatgatgatggtgacgcggcgtatctccgtgttgccgtcaccggacgacgcccatatggcgaggtcgttgaggtgatattgcgccgatgcgattcccggacggaaatacgcgaggcgttcctgcaaagccgtgacgacttgcatgttcgccgatgatggcacgtcgacgatggcgctataggtgggtgacttgcctcccagtcgcgcgttgaccgcttccagatagtcgcgtccgagcgtgccgacgagaacgccggcgatgagggcgatgatgccgatgaacatcgacagggcggtgaggctggtacgcaacgggttgatgcgcagatccttggcgatcatgcggatcacgacagtcgccccctgtcgatcgtcagtcggcgttcgcatcgggcggcgagctgcgggtcgtgcgtgacgaggatgagtgtgaccccgagttcacgaacatgtcggaacagtatgtcggcgaccatgtcgccggtttcggtgtcgagcgcgccggttggctcgtcgcagatcagcaggtcgggatctcccaccagcgctcgggcgatggccacgcgctgctgttcgcctcccgacaggcgcgacggcatgctgcacaccgtccggctcccgagcccgacggtgtgcagcatgcgcgaggctcgtcttctgatgacccgcagggggatgcctccccggtattgcaatgggagtgccacgttctcccatgcgctcagatgcggtatgagggagtagttctggaacacgaagccgacatgccggcagcggaagcgcgcccggtcggcgtcgttccacgcggcgcagtcccgcccgtcataggagagcgttccgtcatagtcgttgttgagcagcccgacgatggaggcgagactggttttgccggatcctgatttcccgatgatggcggtggacgttcccctctcgaacgatgcgctgacatcgtccaccgtcgtcagacgttcgccgtcgggcagccggacttcggcgctcagatgttccaactggatgagtgtgctcatgattgcgctcccggtgtgagattcggagctgtcgcggacaccatgtcaccttcctcgagaccgtcgaggatgatgatcgacgtgccgtccgatgcccccaacttcacgttcacggtggcgaacgaatctccgtcacgcctgctgacctggccggaggcgagcctgccggcgactgcggtgacaggcaggatcaaggcgtcctcgaccgccgtcgcggtcagtaccacggtggcgttctgcccgggacgcgcctgcacgtcttttgggaacaggcattgcagtgtgcgagtcgattccgtcccatgcgcagtcgtcgccgatccggccgtatcttccgctgatgagggcggagtggcgacgccgtcattcactaccgcggcacagtccgtgggcccctgcgcgtcggtgatctggaatcggcccgtcaacggctggtccgggtctatggtcgccagcagcgcggtcgcgtccacgctggcgctcatgccgccataccgtatcgagaacagcggatagtccgcggccatgtcgttgtcctgcgcgaccgtttcgatcacgccgtcgaccggagccgtgacctgctgatcgccgacggtacccaacacgtcgcccgcatgcacgtatgctccttgatcagtcgtggagtggaaccagcctttcgccggagtcgtaagcgagaacacaggagccacctgcacgccggtggaggaagaggataacggcgtgatgccgcccctacgtacctcgaccgtggatgctggccgcttcgccgtggaggaggcgtcggacgatggcgtccgcgacggcgagcaagccgtcatcatcgcgcacatcgtcgtggccgtcacgcacgccaacaggcatttgaacggtgcgatcgcattcatttcgtcggtccgttctcatgccggtaccatgtgcagtccgtggtgtagaagtcccgcatggtcgaatagtcgccgagttcggatttgccgatcacatcgttctcgtatatgccatccttgtcctcgtagtagttcttgaaccagtcggtatccagcagcttgcgcagctgctggagggcgcctcgggctgcttccgcgttggtctggctgttgtcgagaatgtcgcgttccaccgagcactgccagtagacatacgcctgtccttccccacttcccttggcatacagcgaggacgcggcctgcgccttgggtatattcgctggaaacgcatcgccgttcatcagttcaaaggggaaatcctcgacggtcgccttgtattcctcgttcgcctgctgccaggtcagcatgccgccacttcccgaggtgccgccgttcggagtcgtcccgcaaccggacagcagcagcatcactgcggtcagaatggcggccctgcgtcgtgttcccgatttcatcatcatgctccttcggacgattgcacaactgtcgccaaccattagcccacagacggcgatccgggagcaaaagactgtcatgcgcgcgcatgacaacgatacgtcgaggagcatgggatgcgcatacgatgggtggcatgacagacctatcggactcgcataccatctccatcggggtgctggacaacgattcgctcgccctcaacgccatagccgtgatgacgagccgtctctccccgcggttccacatcatctggagcaccacgtccccggcgatggcattgcagcgctgcatgacccacggcgcgcgacccgacgtgctggtcgtcgacatggccttgggaggcatcaccggcgcggacatatgcgccagaatccgtcggcgcactccgacgatcggcttggtgtgcgtcacctcctatgaccttgatccatatcggcaagacgcggtcgaggcgggcgcgcaatgcctgatagccaaagatgacatcgtcaaagagctcccgcaggccatacgatgcgcggcacagggcgagcccgtccccggcaccggattccccaccgcacgggaagccaatcgcaaactcaacgaaggacacgcgaccgagggccggctgccggaaaacgacaagccatcgctgtcctccagggaacgggacgtactgcgcctctacgcgcatggatcatccaccgacgagatagccgcgctcctgaatgtcagcaagggcagcgtcttcacctacgtcaacagggcatgccgcaagctccatgccgccgaccgcaaggaggccctcgccatatgcgcccgatacgatctgctttgaaccgtatacaccacccagccatactggccgcggggctggtcctcgcagtggcgatccccgtagagatgggcgtgtactcatcccagaacctgctgtcatggtcgaccatacgcatatcgctgctcgtcgccgtcctgtgcgccatgctcggagcggcaccggtatgggccgcctgtctgctgttcgcggtctcaggatacgcgttgctgtggctgttctcgccgttgacgaccatcatgatcgccgcactgacctccatagcggtcctctcgttcgtcaaaccccgccttggagccgcttccgcactggcggccctcgccgccctcgccgcgaacaacatgcagaacaacctcacctcgtcgaacatcgtaggcatgatcatcatgtgcctatgcccattgtcgctggggttcagtctcaacctgctgttcgcccaacggcaggcgaccgcgacactcaggcaacgactcgaccgcgaacacacggcgcgtcacctgcacgacaccatcagcaacgacctcgcctacatgatcctgcgcatcgaccaggcaagccgcagtgattgccccgccgatcgggagcaatatcagcaccaactcaccgatctgcgcgccatcgccgaaacggcgctcgaccacacccaccaggtgatacgacaacttgaacgcaccgacaaaccagacgatcgcagccgcatcgtcaaaacaaataacgacgacaaaaccgacaggaaaatcgaacagcagcgtgaacggcttgacggcatcattcaatcgcaacgacgtcgccttggcggcctcggattccaaggtgacgacatcctcgggacgttcgaccatccactggcggacgacatcctcgaccttctcgaaggactgctcaacgaacggtacgcgaacatcgccaagcacgccgccccgcacgaatggtacgccgtcacgatctccttcgaccggcggcacgtcatcatttcggcaagcgacgtactaaaggacgaagcggtacggctcggactcggcagcggcctcaagagataccgaaccgttatcgaatccatgtccgggacgttcgacatcaccgatgattccgacaactggaacgcgaacatcaccattccattgtctgtaacacgccggtaaagggaatgacggcctccagctgccagtgggcttgttcggtgtccggctggcttgcgctggtgtgtgttcttcgagcgagtcgatgacctcgtgcgtgtggcccatggcccggctggcggcgtcgcgcaattcgtcgagctgttgctggtattcgtgttcgtcggcgggcatgccgtcggtcccggcgtgaccatcgggacatccagcatgaggattacgcccgtgacaagcgccggccacaggaaccggtccgggcggaacatgccgccgaccaagccggcaagcacagccagagccaacatgatatcgcgcacggtcgcggtgccggggacccgtgccgccatcgagaacacgtactccgcgagcaccgccacggacaatacggcgcaggacgccgcgatcaccggatgcccggcatgccgcaggccaagccggtcggaaagccggggcagagcagatcgtatctggcgcatgcgtccagcacctccttgcggctggcgactcccagcttgtcggccacgcggtgcacgtacgtgaacacgctgcccgtcccgccgctcctgcgacggatgcgccggcacacgtcagcgcccgtgatttttttcccaacgccatatccaacaccagcgcatccggcctggtatgcgggttatgacaatgctcgatcgccaccgcgggcgaacccgtgcccccgcattacataaaagtccttggaaacggccgagatcatcgcgcacatcgcatccagggcgaacggatcattgtccaatacgggcgatacggatcgaccgcgccgcagccccggtcatgtcatcatgtcccatgccgctcatcgtggccacggtcgcagccggacgaaacctgctatcatgcgattacttgacacgatgttgcgcttttggccatgcgcaggttgaatgggattgcgccacgaaaggatatgccatgaacgatctgctgattatcgacatgctgcccacgtacgggctgctgttctacctgctggtctcggtatccgtcttcgtaggatgccgtggcctgcgccggaggacctcggatcgtggcctgctgcgttttgccgtaggcgcgttcttggttgtttccgcgctcggcgccgtgttcgctgcgctggtgtatatcatggcagcgcctttggcgcagccggatatggtcgacttctaccgcacgtaccggccaggagctctgatcttcctgctgggattgttcatcatacaatttgtcttcggcgtcgctgccgtgtatgggggaaagtaacctggtatatcctgcgataaacgcattggcagacacttgctgcctatctgtaaacacactctagataaggcttgcggccgttggccgagcacagtagtagtgtggtctgctgtgtcaacaggaggagtgtgaccaatgcggctgattgagacatggctggcggaccaggaacgcgcgtttgacttgttcgcgaaattcccggcggaggagacgggattcgaaaacccagcggccggcatgaatcgtgaacggttcgccgcatatgtgcgagggttgcgtgacgagtcgatgggcatcggcctgcctgacggctgggtgccggccaccaagtacattctcgtcaacgatgagggcgactatgtgggcatcttcaacctgcgtcaccggctcaccgacttcctgcgcaacggtccgggccacatcggctacggtgtcgcccgcgaataccgcggtcacggctacgcgaccgccgggctcaagctcacgcttgccaaggcccgcgagctcggcatcaaggaggcttacctgagtgtccacaaaaccaatccggcaagtcttgcggtgcagcagcattgcggcgcacgtatcgaccatgaggacaagacggaatactacacacgcatcgccacctgcacggagagcgatggcctctatgcgcgaggcgattgacggcgcctctcgcgtataaatggccgattatcaatcggttttaatcaatctcgcctcggtcgataaagtcgccgtcgaggaaccaataatcgtgcggatttccgcgtaacgccatgaacggcgtgagttccacgccctgtgtctcagctctgctcagcagataggctcggataatccacggatactccagcacgcccgacttgagggtgatgatttgctccacgctgctgccgctgacgccaaaatccctgccgccgttcggcggtcagacccagccggctcatgttctcctgaaattcgcggatagtcgccgcgcgttgctcactgttcaaagacatggcttcatgaatgttgcattggcgccttaatcatccatagttaaggcaccacgcaacatacgattcgcttacccacgcagccatacgacgatggttggaatggactgttcggcgaagcggtctatggcgtcggcggtgacgtaggcgtgggcggtgaggcgcaggtacagttcgccgccgaccgcgctggccgcctcggatacccgacgctccgcgtaatcggcaagatcggacatgtaccggcgcacggcatcacagccccacagtcgctcgatctcgcgcagggactcgggcgcggcgatcggaccgcataaatcctgggtgacttgctcgtcgaatcgctccgggaacgggtcggcgaaaccccacgagtcgatcagtggccacaaatcctggccatcctgaccgccttcgggcggaatcaccagcaatgccgtgccacgcggcgcacacgggaacttatgaaaattgccgacccaccaatcggactgcagtccgccggccggatcggccagttgggcgggagcgtgcgcgccatcaaccaaaatgcggatgccgcggcgatgggcttcggcggcgatgcgctgggccgtaaacagcatagcggtggcggaagtaatctggtccaacacgatgaacgacgtacgctcgctcatctgcgcggtcacggcgccgaccacgccatcctcgtcggcgtcaatggtaactggtgcatcttcctcatccatgcgaatgagacgaatcgcctttcatcccaatgatttcgctctcatggctgatacccgcgtgccgtcatgttccgtaccttggaatcagaagtcgagagtcaaggtccgaaaccgaacggagcgggccgaagcagggagcattgaagatgggatttcttaagaacttttccgaaccgtttgcattcgcgatggcattgtggccgtttgtgtccatgctgctgaccgtgccggtgctggcgttgctgtatcaccgcgacaatcgcatccgactgtcgtcggccatagtggcgtatggcacggtgctgtacctgctcggcctgctgtgcttcacactgtatccgatgccggccgactcggcggcctattgcgccgcgcaccatctgacgccacagctcaatccattgcagttcatcggtgacatccgtaccgatggtctcaccgccgtactgcaaatcgcgtttaatatcgtgttcttcctgccgttgggcttcatcatgggccgtatctggcgttggccgctgccggttaccgcagtactgtcattcgccacgtcgctgtttctggagacgatgcagctgaccggcctcatgggcgtgttcccgtgcgcctaccgtctgttcgacgtggacgatctcctgtggaacacgaccggcgcgctgatcggattcgcgctggccatgctttcgctgcgcctgattccggcgcgggtcgccgatatgacgccgaccaccacacctggcttcatgaggcggctgatcacgttcatcatcgacatgacgctgatcgggttcgccgtgatgccgacgcatctgttcgtcatgatggtccgcccaaacctgccctcgggctccaacggctcatggcagtcgatggaaccgttcgactggaccggttcgatcctcttcctggcggcgctcatcctcttcgagggcgtggtgccatggttgcgcggcggctgcacgttcggcggcagcttcacgcacatgacgatagagacccggccgcgcgaagggtggcttcgcgtggcgttctatgtggcgcgcatggcgacgctgatcgccgtggtgtggtggcatagtggcggattcaatctgctggtgttcatcggcctcggcatcttctggctggtcaagcgtcagatgccgtacgacctgatataaaccggcgctccgctgcttggcgttacaggaaaacctccgaccactggtcgggattcggaatgctgcgcagcgggccggccaacgatacggccaatcccgctacggaacagaccacggctacggccatcaccgccgtgaaaccgagatctggctgttgcaacagccagccgaccatcgccgggcatgctgcgcccagtatgccgaccgtggtttcaaatacggcagaagcccgcccctgcatgttgtcgggtgtcttgccgtagagaaagcccagcagaccagcgttcaacgcggggaacggcaggccggccagaatctggcagatcagaatggccgcgtagctgtgcaggaatagcagtggcatctggctgaccacgaacaacgccagcgcgcccgcaatcagtttccctgtgggaaccatatcgactagcttgttggccaacagcgagccgaccaaagtactcacgcccattgccgtgccgagcagtccgatcatgaccgcgttggcgccacgggcggccaacatgatctgcgcgccggtgatactggctacgcaggcgatgttcacaattgccccgagtatgatcgcggataggaagacgcgcttggtcagggcccatcgccagccttcgaccaagtgcgtgggaaatggcacaacagaagtgccgtgggcccaaacggtgaccacggcttagcgcgacgagtcaacgcgcattagctgtctgcgaacgacaccaacaccttgtacataacaatgcccctttgcaaaaaacaaactccaattattgtaccagttcgagcatagaaccaggcgcgtcactgggcacaacataatcggccatcaatggtttctcggcttcgaggggctgatttcgtccggtggagacatctacttggctttcgaggggctgctcaaacgccaaaccgcgagtataaacggctttgcggcaacgccattacgccattgtggagccttgtctactcgggcatcagccccttgaaacggagatagatctccggcaagtgccaaatcagcccctcgaaattgagttaggcgttgttttcgcgtttgcgctgccgttcgagtgcgtaataagccgcgtagcagcaggcgacgaacgggatcatgcaatacagggtcgaacgctgcgtatcatcgagcaccacgagcaccagcgcgccgatgcacatcacgatggccagccacggcagcaccgggaaaccgggcgcacgatagccgagctcatcggcgctgtgcccatcccgcgcccattcgcgccggaaacggatatggcacacgcatacggagaaccacaccaccagcgtcgccaaacctgacacggcgaccaacaccagatacacggtcgaggcggcgatcacggaagacagcaacgccagcagtgagcccgccatgctgaacagcacggcccacaccggcacaccacggaaattcgtcctagcaaaacgttcgggaatcagccgctccttggccagcgaccacaccatgcgcgaacacacgtacaggccggagttcgcggcggaaagcacggccgtcaacaccacgaagttcatgatgtcgccggcgaacggcataccgattgactggaacaccagcacgaacgggctcgtatccacgccggcctgatgccaggggatcaaggccgccatcaccagaatcgagccgatgaagaaaatcgccaggcgcagcaccgtggtgtgcacggccttgggaatcgcacgcgagggatccttggtttcgccggccgccacgcccaccacttcggtgccggagaacgcgaacaccacggtcagcagagtcgagaaaatcggcgcgataccgcttgggaaccagccgtcggccacgaagttgcccagcaacggcgcggaatcatgaccggcaatcggtatggcgccgaagatcgccagcaggccgatcacaatgaacgcgatgatggcgaacaccttgattgacgcgaaccagaattccgcctcgccgtacagccgcacggacatgatgttgagcgcgaacaccaccacaatgaacacggccgaccacacccaggacggcgaatgcgggaaccatcgctgcatcaacagccctgcggccgtgaattcggaggcgagcgccaccgcccagttcagccaatacaggatggcgatggtgaacgcggtgccggggccgatgaaccgcttcgcatacatgtggaagcttccggcgtacggcatggccacggacagttcgccgagcgagaccatcacgcaatagacgagcagggagccgaccgcataggcgagaatcgcgcccagcggaccggcctggtgaatcgtatagccggagctgacgaacaggccggtgccgatcacgccgcccagggagatcatcgtcaggtgacgcgactccatcttccgttcaaggccggtatcgtccttgggtgtgccggctgccgccatgctcgggtctcctttggtcgggtgaacagttgtgtctcgtgtcggttgtgcgggcggcgctcgatgccgcctaccatatgatagcggtaacacgaacagcgagtggaacacgaggagtttggaatgatggaactgtatatcggatcgcatctgtcgacggccggcggatggaatgcgctgctggaacgttcccatgaggagggcggtaccgcgttcgcgttcttcccgcgttccccgtacggcaagcgttcgaaggcgctcgacccggccggcgcggcggcgttcggtgcgcgtctgaaggctgagggctatgggccgttggtcgtccatgcgccgtacgtctacaatctagccggcaaggatgaggccaagcgcacattcgcgatcgaggcgttggccgaggacatcgagctgctgaccgccatccgcgaggccggccaggaggtgtatatcaatattcatcccggcgcgcatgtgggccaaggctccgagaccggctgccggctgatcagcgagggactgaatcaggtgttcgagcgtacgaccggcgtcatggtgcttctggagaccatggccggcaaaggcacggaatgcgggcgcaacttcgaggagctcgccacgatcatggatggcgtggagaacaaggcgaacgtcggcgtcacgttcgacacctgccatgtgttggatgccggctacgatttggtgcacgactacgacggcgtgatgcgccagttggatgaggcgatcggcttggccaaggtcaaggcgattcatgtgaacggttcgcagttcggcctcggctcgcacaaggaccgtcacgccaatatcggcgagggccagctcggcatcccgttcttcacgcgactggtcaacgacccaaccatggccaagctcccgatgattctcgaaaccaaggagcagacgcccgccacgcatcgcgacgagatcgagttgttgcgcggattggtgcaaaagtagtcgtagtcgaccaatgtcgagcggaagagacctgtttttgactgatggctatacgaggttagctatcagcggggcgttgattgacccgtcttcatatacagctgcatagccggttccagctgcaagagctcaaaacagacgcatgggttcggcggaatccaatggctgaataagacgtttgccgtcgctgttcagtggcgcgacttcgtgaaattgcagatgccgggaaagcatggtacccgcttcccgcatggaatctaacagtgcggctccgtcaacggagcggtccagccatgaggcaaccatattccgaggaaccagcaggggcatgcgatcatgcaccttgacgaactcgtccgcggcagggcaggtgatgatggttgcggtcagctgccatggcgatgcgggagacggcctccaccatgagtacaggccggccaaagacaatagttcatcatgtggtgcgtgaaaatagaacggcctgcgacctttccattcgtagtagccggaagcggggatgatggctcgcatggattttgtggattcggcgaacgccggcttgacatgcgcagactccacacgcgcattatatgtggggtagctcagcactttgctggcgctccatcgcggcactagcgaccaataggcaccggtcagatgacggcggccatccttgccctgtgccaccacgccaatgttctgcatgggtgcgatgttgtaggaaggctgtggcagagtgtcaacgcgcacgtcatcctcgtctaccgcgaactgtgaggccacggcatcccaatccaaatcaagcgcgaatctcctgcacatgcgcccagtctatgccatcaatggaatcaatcccaggccgtatgaccgatattcatggcgattttcctttttgttggccgctctggttccgtagcgatacgaaccaacgaggaatagcccagaatgtaggacgggttcggcaatcgggacggggcgtgacctagagtggcgcatgaccgaacaccaacaaagggaggaccatgtcggttttggacgaactggtggcgggagcgctggaggatcagcgcgcccgtgagctcaccgtatcgcttgaggacgtgaagaaggccgcgctggcggccccggctccgattgacgcgacacgatggcttaagcgcgccgacggcatccccgtgatcgccgaaatcaagcgcgcgtctccgtccaagggccacctctccgacatcccggacccggccgcgctggcccgcgagtacgagaagggcggcgcaagcgccatctccgtgctcaccgaaggccgcagattcctcggcggccttgacgatttcgacaaggtccgcgccgccgtgcacattccggtgctgcgcaaggacttcatcgtcaccgactaccagatcttcgaggcccgcgcccacggcgccgacctggtactgctcatcgtcgccgcattggacgacgcccagctcaagcatctgctcgacctggcgcacgagctcggcatgaccgtgctggtggagacgcacacccgcgaggagatcgaacgcgcacgccaggccggagccaaggtgatcggcatcaacgcgcgcaacctgaagaacctcaaggtggacgtgaacaaatacaacgaactcgcggccgatctgcccgataacgtcatcaaggtggcggaatccggcgtattcggcgcggtcgaggtcgaagactacgcccgtgcgggagcggatgcggtactggtcggtgaaggcgtggccaccgccgatgatcatgaacttgcagtggaacgactagtaaaggcaggagcacaagtgaaagcatccgaaacgaccccgctcagcgaacatcagggaccgtattggggccagttcggtggccgctatgtgcccgaggccctcatcaccgccctcgacgagctggagcgcgtgtacacgcaagccaaggccgaccccgaattccacaaggagttcatgacgctccagcagcgttacgtgggccgtccgagtccgctgaccgaagccccgcgcttcgccgcactggtcaaggagaagaccggtctcgacgcccgtatcttcctcaagcgcgaggacttgaaccacaccggcgcgcacaagatcaacaacgcgctcggccaggccctgctcgtcaagcgcatgggcaagactcgcgtgatcgccgagaccggtgccggtcagcacggcgtggccaccgccaccgtgtgcgccatgctcggcctcaagtgccgcatctacatgggccagatcgacgcccgccgtcaggccttgaacgtggcccgcatgcgtatgctcggcgccgaagtggtcgaggtgaccctcggcgacaagatcctgaaggacgccatcaacgaagccctgcgcgactgggtcaccaacgtcaaggacacgcactacctgctcggcaccgtcgcgggcccacacccgttcccggccatggtgcgcgacttccagaagatcatcggcgaggaagccaagcagcagctccaggactggtacggcatcgaccatccggacgcgatctgcgcctgcgtgggcggcggctccaacgccatcggcgtgatgaacgctttcctggacgacgagcgcgtgaacctctacggctacgaagccggaggcaacggccccgaatccggcaagcacgccatccgcttcgcccccggcaccggccagctcggcatgttccagggcgccaagagctacctgctggaaaccgacgaaggccagacgctcgacacctactcgatctccgcaggcctcgactacgcttccgtgggccccgagcacgcatggctcaaggacatcggccgcgtgaactacagctgggccaccgacgaggaggccatgaacgctttccgcgacctgagccagaccgagggcatcatccccgccatcgaaagctcgcacgccgtggccggcgcgtacaaggccgccgccgatctgaaagccaagggctatgacaaggccgtgatgatcgtgaacatctccggccgaggcgacaaggacatggccaccgccggcaagtggttcggctacctgaccgacgatcaggccgccgcgcttgatgtgaccggcgcccacggcaatactgtcgcctgaacaagaagaggagatttttgattatgaccaacgaagcaaccacgccgtccggccagccgctgggcatcagccacaagcccagcaagtcggtcgctatgttcaccaagttcaaggccgagaacaagcccaccttcatcggctacctgccctacggcttccccaacccggacgtctcgcttgacgccttcaagacgatggtcgagcacggcgtcgacgccgtggaaatcggcctgccgtactccgacccggtcatggacggcccggtcatccaggctgccgcctccatcgccctgaacaacggcgagaccatcaagcgcgtgttcgaggccgtcgaaaccgtggccaacaccggcggcgtgccgctcatcatgagctactggaacctcgtgtaccactacggcgtcgagcgtttcgcccgcgacttcgagaacgccggcggcgccggcctcatcaccccggacctcatcccggacgaggcgggggagtggatcgaagcctccgaccgtcacggactcgaccgcatcttcctggtctccccggactcgtccaccgagcgcctcgaaaccgtggcccgcaacgcgcgcggcttcgtgtatgcggccgcccgcatgggcgtcaccggcgaacgcgccaccatcgacgcctcgcccgaactcctcgtggaacgtacccgtcaggccggtgccgagaacgtgtgcgtgggcatcggcgtgtccaccgccgaacagggcgccaaggtcggctcctacgcggacggcgtcatcgtcggctccgcgctcgtgcacaccctgctcgcggacgacaacaagaccgcacgcgacccgaaggaaggcttgaagctgctcgccgccaagagcgaggaactggccgaaggcatccacaacgcccggtaaacacccggtgcgcctcacgcgggttgtgccgtgacacggtagggtagtcacagagcatcaagcacaacccgcgcgtggacacaccatgagcaccagcaagtagaggcacgatgaatctggcttatattccctcgccgaccttctccaagttcgagatcggcccgttcactatccacatgtacgcgatctgcatcctgatcggcatctgcgtggccgtatggatcctcaccacacgttggaagcggtacggcggcaccttcgaccagattctcgacaccacgctcgtcactgtgccctgcgcactggtgggcgcgcgcctctaccactgcatcaccacgccggccgactacttcccgcccaccggcaacttggtcaacatcctcaaggtgtgggaaggcggcatggccatcttcggcggcatctccgtcggcaccctggtggcgttcctgtggtgccgccacaagcactatccgttcgcgatcttcgccgatgccatcgcccccgcgctgcccgtggcccaggccatcggccgactcggcaactggttcaaccaggaactctacggctggcccaccacgttgccgtggggcctgaagctcaacgacgcggacgccatcggcaaatccgaaatctgctattccggcgcgcaatgcccggactacagaaccacgctgttccacccgacgttcctctacgagatgatctggaacctcatcggcgccgcgctcatcatctacctcggccacaagctcgccgaccggctcaaggccggccagcagttcgccatgtacctgatgtggtacggcctgggccgcacctggatcgagaacgtgcgcatcaactactccacggtgatcctgggcctgaggaccaacgtgtggaccgcgatcatcgtcttcgtgctcggctgcatcctgttcgtcgtgctctaccagtacgggccggaccccaaggcgcaggcgcgcgggcttgcggcggtcaccgccgacgagctcgaacgtcagagcatcgaagaggaacaacttcgccagaaaaagcaatccaagcacactaagtgacaccacgataaacagcgccgaaacagcgcgaaacacgggaccccaagtcccattgcacagataaggtaggaaaccatgagcaatatcgcaatcgcacccagcatcctgtccgctgacttctgcaacctcgaacgtgatctcaaggccatcgccaacgccgacctggtccacgtcgatgtcatggaccatcatttcgtgccgaacctgaccctgggcgagccgatcgtcggccgcatctgtcaggtcaccgatctgccggtcgacgtgcacctcatgatcgaggacccggaccgttgggctcccgaatacgccaagctcggcgccgcctccatctccttccacatgggtgccacccacgcccccgtgcgtctggcccgacagctgcgcgagatgggctgcaaggcctgcttcgccgtgcgtccggctgaaccggtcgagccgatcttcgatatcctcgacgagttcgacatggtcctcatcatgaccgttgagcctggcttcggcggccagaagttcctcgacaaccagatggccaaggtccgccgcctgcgcgatgagattacccgccgtggcttgaagacccgcatccaagtcgatggcggtgtgagccccaagaccgcgcacatcgtggccgaggccggcgccgacgtgctcgttgccggttccgccgtgtacggcgccgagaatcccgcccaagccatcgacgacatccgcaccaaggccgaggccgcgttcaaggcctgagctccaagcctgaaccgcaatccacctttcatccataaccgcaagaaaagaatctgaatcacatgaagacgtttgaatccctgttcgccgaactgtccgaaaaggcccagacccgccccgaaggctccctgaccgtcgacgagctcgacaagggcacccacttcatcggcaagaagatcatcgaagaggccggcgagacctggatggccgccgaatacgagggtgcggaccgcaccgccgaggaaatgagccagctgctctaccacgtccaggtcatgatgatcaagcacggcctgacgcttgaggacgtctacaagcacctgtgagaggaacgcaaatgctgagaatcgcagtgcccaacaagggcatgctatccgaacccgcgtggaacatgctggccgaggccggctaccgtctgcgcaccaaccctcgccagctggtcgtgcaagatcccgacaatggcatcgagctgttctacctgcgtccgctcgatatcgccgtatacgtgggccgcggcgccatcgacgtcggcatcaccggccaggatctgctcaagaactccggtaccgccgcgctcgagcacatgccgctcggctttggtgcctcgaccttccgtttcgccgcaccgaacgaatccccgatcaccactctggaggatgttcagggcaagcgcgtggccaccacattcgataagctcgtacacgactatctggtcgagcacggcatccaggccgagaccatccacctggacggtgcggtcgaatcctccgtgcagctgggcgtggccgacctcatcgccgacgtggtctccaccggcaccaccctgcgcaacgccggcctgcgcgtgtttgccgaaccgctcatgcactccgaagcctgcctgattcgctcgccgcgtctgaacgagcaggatccgcgtctggccgtgctgacccgtcgtctgcaaggcgtgctcactgcacatcagtatgtgctcatggactatgacattccgatcagcaaggtcgccgccgccgtggccgtgacccccggctttgaaagcccgacgatctccccgctgcacgacaaacagtggaacgccgtgcgagtcatggttcccaaggccaaggtcaaccagctgatggatgatttgtacgaagtcggcgcacgcggcatcatcgttaccgctctgcaagcctcccgcatgtagactgttagtcgatatgaccaaccagaaagtcaacgccagatacagtccggaagcacgtgacatctatttcaccgtgcccaatttgatcagcgcgctgcgaatcatctcgattcctttcatcagcgtgctgatctccaagcatgaggtgattgcggcgctagccctgatcgccatttcctcggcttcggacggactcgacggcatcatcgcgcgcagattcaaccaagtgagcaagatcggtcagattcttgatccgattgccgaccgactgctcattttctgctcgattctggccctcagcgtcgccggcatcatcccatggtggatgctgattatcgtgggactgagggatctgtggatggcgattcaggtgctatggcttgcccagtacggttatggtccgctgcccgtgcatttcgtgggcaaggctggtaccgcgctgctgatgatttccatcgtcagtcttattttcgccgatttgggcaccagtacgttcttccacttgctctacatcgccgcgctggccgccggcatctggggcatcgccatgtattggctcgccggatatatctataccaagcagggcgtcggattgctacgcaaggaactgggggagaagtatggcgcttgaggccatggccccggtctcgttccccatacccaaggagaatgagccggtacgacgccgcgccgtgttctcccactcagtccgaggcgcggaatcgcatcatgcgctttccccggatgacgccgccgccatccgcaccagacgtcgccgtaaaaccaacgacgattcgcttcagctcatcgatgatcttgtcaatcgtccgatggatccgatgttctccgactcacgactggtccatgagcatcgttcgaccttctccatctggtttaatcgcatcgtcgtattcatcatctgcgtcggcgttggctttgcctgcagcctattcgtgcaacagttgcaatccgatccgcgtaagcaggtacggcagactttggccacgcaattggagaatcgcaactcgcagatagacgaactcaccacggacgtcaataatttgcgatcccaagttgacgaacagtccaagaaaatctccggcagcgtgaaaagcgacacgcttatccaagacgaaatggtcaatggtgccacggtggtcgaaggcgaaggaatcaccatgacgctggccgatccaatcgcggcaagccagtcggatcaatcctcctcgacgagagtcggcacctccacgaacatccgagtcatcaccgatctggatctgcaacaactggtctccctgatgtttcaaaacggagccgaagccattgccatcaacggtaataggctcggcgcgcaaacctcgatacgcaaggccggcgggcatattctcatcggcatgaccgcgatacaaagcccctataccattgaagccataggcgataagagcgccttggccgaagcgatgggggagaagagacttgcaagtctttacgattccttcaaggaagccggtatctacccgcaggtgagcaaatccaattcgattacacttgaggcagcagtcactggagaagtgaagtacgcggaaaggaatgaataatggcagccgttctgggactgatcatcggcgtcgtcatcggcgtgttcgtcaagccggacattccgatcatcgtgcagccatatctgccgattatggtggtcgctgctcttgacgccctgctgggtgccgcgcgagcctatttcgagcgcagcttctccgaccgcgtgttcgtgatctccttcctcgccaacgtggtgacggcaacactgctcgtgttcctcggcaaccagctcggcgtcggttcgcagctgcagacggccgtcatcgtcgtactcggcatccgcatcttctccaacgtgtccgcgatcagacgcttcatcttccgaggctgacaagggtactgacgtatggcacgtaaagcacaatcagacaacatgctggagaaaatgcgtgaccagcatgcacaagacaaggtcaacgaccggatggaaaccgggtcgttccccacggtgcgcaagaagccccggaaggatctcaaccgggccagcaacaaatcacggctactatcctcgattctcattgctctgatgtgcgcgctgctgggtttcgcctacatgagccagatcaataacactaaatccacgtacgaaacgatggacgagagcgaactggtaaggctgctgaacgagtcgaatacgcaaatctcgaatctcgagcagcgtaaaacccagttgaacagccagctcaactcactgaaatcggcggctaacgagcaggagcaggcgcgtaagatcgccaagcaaaacgaagagaccagcggcttgatctccggcagactcccggcgaagggccaaggcgtgaccatccggatcggacgaggctcgacgactaaagtggacgcctcaatcatgttcaacctcatcgaggaactccgcaatgccggcgccgaggtaatcgccatcaataacgtgcgcgtcatcacctccacctacattcaggacgccgaggaaggcttgatcgtggatggcaccaccatcaagcccacatacacggtgaaggccatcggcaatccgcaggagctgtccaacgcagtcgatatcgccggcggtgtgggcgctcaactccaggtgaaatacggatccaacgtcaacgtgcagccttctgacagcatcattatcgacgaagtacgcgaagctacgcaaaaccagtatgcaaagacggtagaataggggattatgaccaacccgattcctagcgcaggcgaaaccaccattatcggcctgcccgcgattaatgtactgcccattaccaccaccggcgatcgaccgctgactcaagaggatctggacaccatcaccagattgtccgagggaacggcattgctgatttccgccaggggagcggtctcaggttctcgttacttgcttgacgaggatgaaatcaccgtcggtcgtgatccgcgagctgatattctgctcgacgactccaccgtatcccgtcagcatgccgtgttccgcagggtcaacggtcagttctttgtggttgacgcaggaagtctgaacgg

SEQ ID NO: 3241 - DNA, 19812 bp, Unknown
  R53_2m  MAG No. k141_7377
acggattcgagacatcagattcctcatggctcccctttgtgaggagagctgtcgtcgcagacgactgaggggagtttcgaaggggaacacgcaaaaaacccatgaaacgagagaatcgattctgaggaccgattttgcgggtttgggcgagcgagacgaaaaaagtgccgaaaacggtctccagaatcgattctcctcgacgaaaaacagccttcaacacgccgtgcgaaagtacgaaaaccaaaaaagttatccacacagttgtgcacagatgtgggtaaactcggcggataactcgtggattacccactgttttgttgtggaaaactcgtgcataactgcgacctcgatgtggaaaacccaaattcgacgaactggctgtggaaaactcgcccacttatccacaagccatgcagaatttgtccacaattttcggggacttatgaaccgttgcatttgtagggctcaaccctacttatccacactatccaccggccttattatggcgattacttactcagttacgtgaaaagcatcatcgccacagtaacagccggtcacccatcgtacgtaagttcgccacctaacggctagaatatttctcagccaatccgacgaagggaacaatcacacatgaaagtcgaaatcgatactgcagccctggccgacgccgtagcctggacctcccgagtcatcgacgcacgtccctccaacccgattctcgctggtgtcaagctggaagccattgacggaacgctgcaattctccgccttcaactacgagatttccgctcgccaccacatcgaagccggcgttgacgaagccggttccgtactggttcagggcaagctgctggccgatatcaccaaatcgctgcgttcggagaaaacgtacctggtcaccgacggctccacgctgaccatcacgtccggcaagtcgaagttcaccttgcagctcatgcccgacaccgagtacccggatctgcctgtggtaccggccatgctcggccaagtcgatgccccgactttcgttcaggcagtgaaccaggcatgcgttgccgtctcccgcgaagaaaaccgcccggtactgaccggcgttcgcatgcaattccaaggcgacaaggtcgtcatgacctccaccgatcgcttccgtttggcccgcgccaccttcacttggactccgcagaacccggacgtcgacaccaccacgctggttcgcggctccctgctcaaggatgtggcccgtgctcttgacgagcaccagaacatccgccttgatttcgatgccgatagcccgacgctgctcggcttcgaaaacgccggccgcgtctccacctcccagctcatcgacggtgaattcccggcggtcgaccgcctgttcgccgacgaatacccgattcaggccgtagtcaacaagcaggatctgctcgacgccatcagccgtgtggctttggtcgccgaacgcaatgctccgattcgcatgaccttcaccggtcaggaagtggcgctgtccgccggatcggtcgacgaggcccaggccaacgaaacactggacatcgacatggatggcgacgacatcaccgtggcattcaacccgtcctacctgaaggagggtctgtccgccgtgaccgaaccatttgtgcgcatcaagatgacgaccccggtcaagccggtcgagttcaacggccagcaggaagctgattccgacgagtccatggactaccgatacctgctcgtgccgatgcgcttcaacaactgagatccctgaatttccaacgattcgctaatgcacatctcccgtctcgcactcgaccactaccgctcatggagtcaagtagtggtcgatttcgtaccaggcgtgaatatcctgttcggcaagaatggcttgggcaaaaccaatctggtggaagccgtcgaagtgctgtccaccggatcgagtcatcgcacgtccagcacgttgccgctgatcgaacgcgggcagaccacggccaccatccgcgcgaacgtcgctgatgatgccggtcaaaccactacgtatgaagcgtcgattcatgcgcgtggtgccaaccgagcccgcatcaactcggggtcgtcgctgtatctgcgcgatatcattggcaagattcccagcgtttccttcactcccgaagatcagcgattggtgtccggcgatccgggagcacgccgcgtcatgatgaatcaggctgcggctctgctcgagcccggatacatgcagacgttgcaacagttcacgcgcatcgccaaacagcgtgccacattgttgaagcaattgaatgccaatgccaacaatggacagccgatggatgcggttctgagcggtttggaaatctggaccggccagttcatcgaagccggtgtggcgttgacccgtatgcgcgctcatgtgatcggtctgcttgccgagccatttgccgcgatttacgccgacttggccggtgccggcgagcaggtgacgctcacatatgcgccttcattcgacgaagtgctgatgttcgacgatccacatccgcagatcagcgagcattttcaacgcatctaccccggtgaaatggctcgcggcgtgaaccttatcggtccgcagcgcgatgacatgaaccttgagttggccggtattcccgcccgcgagttcgcttcgaacggcgagatgtggacgatggcgttggccttgaaaatggcattgtttgaaatcgtgcgtgaccggttgggattgcagccgattgtgattctcgatgatgtgttcgcccagcttgacgacagccggcgcacgcagattcttgatttcgccagaaaacaggatcaggtgctgattaccgtggccgctgaaggcgatgtgcccgactatgaatcggcccatcgtatcgacgtggccacactggccgaacccgcttccgtaatactgccaactctgggcaatttgtccgattcgcgggaaaacgagagtttgggtaagtatgacggaaaacccgcggtggacagcgcgtccgtagaacggaaagtgtcatgaacccgccgatcgcccgccaactcaacctggacgagaccaaactgccggccgaaatattcgagcggctctcccgtcgcggggcgaccttgaaggactacagacgccgccgtgaagaggccatcgaaaacttcggcaaaccggggcgcgatccggctgaactgggcagcgtgatgaccaccatcgccggcaatggcgtctgggcggcgaatatgaaacttgcgcaattgcgcaaccattgggaccaagtggtggggcaggccatcgccagccattcggcagtcgccgatttcacggacggcgtactgaccatccgtgccgaatccacggtctgggccacacagctgacctaccttatcccccaacttaccgataccatccgtcgcaatctcaaaggattgaccatcgccgagattcgcgtgaccggaccggccgccggatacacgcgcaaatgggctcggcggcggtagccaagataccaaacaaattcgcagaagcctcgctatggcgctcgtcgggttagacgagtaaaatcacatgcagtatggtcaaatggccagaagagccctttacgggcctcgtaagccatatcgcctccgtgaatgaccttcatgacggaggttgaccctgtagtcacggaaggaagcctgttggcagacgaaaccagcaaagaggagcagctgaaggtggctgcggaacgcatcaacaatgcggaattgaccgaaggcgaacttgacgaatccatggcccccgagcattatgaggcctccgatctgagggtgctcgaaggactcgaggccgtgcgtatccgccccggtatgtacatcggttccaccggcccgcgcggtttgcaccacctggtctatgagatcgtcgataactcggtcgacgaggcgctggccggatacgccagccatatcgaggtcaccattctgccggacaacggcatccgagtggtggacgatggtcgaggcatcccggtcgatgaggtgcccggcgagggcgtctccggtgtggagaccgtgatgaccaagctgcacgccggcggcaagttcggcggcggcggttatgcagtgtccggcggtctgcacggcgtgggtatctccgtggtcaacgcactctccacccgcgtggacatcgaagtgcgccgtcagggcttccactggacccagacgtacatcgaccagcaccccaccgcgcccttgaagcagggcgagccgatgaccgaaggcgagtccaccggtacgtccgtgactttctgggccgacccgaagatcttcgagaccaccatctacgacttcgagacgctgcgttcccgtttccagcagatggccttcctgaacaagggcctcaagatcagcctgaccgacgagcgtgagaatgaccaggccggcgacgaggtggccggcgacgccgcggacgagcccggcgcaaagcaccagaccgtcacctaccagtacctcaacggcatcaaggactatgtcgactacctggtcaaggtgcgcaaggccacgccggtggaagaggacgtcatcagcttcgaggccgaagacctgaagctcggcatctccgccgaactcgccatgcagtggaccaccgcctactccgaggccgtgcacaccttcgcgaacacgatttccaccaccgagggcggcactcacgaggagggcttccgcgccgcgctgacctcgctggtcaaccgttacgcgcgtgacaagggcatcctcaaggacaaggacgagaacctctccggcgacgacgtgcgtgaaggcctgaccgccgtgatctccgtcaagctcaccaacccgcagttcgaaggccagaccaagaccaagctcggcaactccgaggccaagaccttcgtgcagcgcgtgatgaccgacaagctcggcgactggttcgacgcccacccgaacgaggccaagaacatcatccagaaggccatcgaggcctcccgcgcccgtctggccgccaagaaagcccgcgagaacacccgccgcaagtccatcttcgagtccgccggcatgcccgacaagctcaaggactgccagtcctccaacccggaagagtgcgagctgttcatcgtggagggcgattccgcaggcggttccgccatccagggccgcaacccgatcacgcaggccatcctgccgctgcgaggcaagatcctcaacaccgaacgtgccagcttggaccgcatgatgaagtccgacaccatcgaatcgctgatcaccgcggtcggcggcggctatggcgaggacttcgacatctccaaggtccgctaccacaaggtcatcatcatggccgatgccgatgtggacggtgcgcatatcgccaccctgaacctgacgctgttcttccgctacatgcgcccgatgatcaccgccggctacgtgtacgtggccatgccgccgctgtaccgcctgaagtggaccaagggcccgcacgacttcgtgtacaccgacgccgagcgcgaccgtgtactcgccgaaggcaaggccaacggacgccagctgcccaagggcgaaggcatccagcgctacaagggtctgggcgagatgagctaccaggagctatgggagaccaccatggaccccgagcaccgcattctgaagcaggtgcacatcgaggacgccgccgcggctgacgagaccttctcgatgctgatgggcgatgaggtcgaaccccgccgcctcttcatccagcgcaacgccaagaacgtgcgttggatcgatgcgtaacggaatcctccaacctccctcgtcagagggaggtacacaacggacttagacaactaaaggaacaacagtggcagatgaaaacaacaccggcgacgagcagttcacgccggacggctcgatggagccgttgagcccgcaggaggcggacaccaccgactacggcctgatggacaccggcgaacgcatccagcgcaaggacctgcagcaggagatgcgcgagtcctatctggcgtatgccctctccgtgatcgtcgagcgtgccctgccggacgtgcgcgacggcatgaagcccgtgcatcgccgtgtgatctacgcgatgtacgacggcggctaccgccccgatcgcggctacaacaagtgctcccgcgtggtcggcgacgtgatgggtaagtaccacccgcacggcgattacgccatctacgacaccttggtgcgtatggcccagtcctggtcgatgcgcaacatgctcgtcgacggccagggcaacttcggctcccccggcgatgacccggccgccgccatgcgttacaccgaatgccgcatggccccgctggccatggaaatggtgcgcgacatcgacaaggacaccgtcgacttcgtgcccaactacgacggcaagacccaggagccgaccgtgctgccggcccgcttcccgaacctgctcgtcaacggttccgccggcatcgccgtcggcatggccaccaacatcccgccgcataacatgcgcgaggtggcggacggcgtccactgggcgctcgaccacccggacgccagccgcgaggaactgctggaaaacctgatccgcatcatcaagggaccggacttccccaccggcgccaccatcctcggccacaagggcatagaacaggcctaccgcaccggccgtggcctgatcaccatgcgtgccgtggtcaacactgaggagatcaacggccgtatgtgcctggtggtcaccgaactgccctaccaggtcaacccggaccgcctcgtcgtctccattcgtgaggccgtgcgcgacggcaagatccagggcattgccgacatgcgcgacgagacctccggccgcaccggccagcgcctcgtgctggtcttgaagcgcgacgccgtgccgaaggtggtcctgaacaacctgtacaagcactcccagctgcagcagaccttcggcgccaacatgctggcgctggtcgacggcgtgccgcgcacgctgagcctggacgccttcatccgccactgggtgaaccaccagctcgacgtaatcgcccgccgcaccgcgtacctgaagcgcgaggccgaagagcgcgaccacatcctgcagggctatctcaaggccctcgacatgctggacgaggtcatcgccctcatccgcgcctccgaagacaccgacaccgcccgtacgggccttatggggctgctggacatcgaccaggtgcaggcggacgccattctggccatgcagctgcgcacgctgacccgcatgaaccgcgacaagatcgtggccgagcatgaggaattgcagcgcaagatcgccgactacatcgacatcctcgccaagccggaacgccagcgcaagatcatcggcgatgagctcgacgagatcgtggccaagtacggcgacgaccgccgcaccaagatcctgccgttctccggcgagatgaacgtcgaggacctgatcgccgaagagaacgtggtggtcaccgtgacccactccggcttcatcaagcgcaccaaggccgacgaataccgcgcccagcaccgcggcggcaagggtatcaagggcaccaagctgcgcgaggacgacgtggtggatcacttcttcctgacctccacgcacaattggctgctgttcttcacgaacaagggccgcgtctaccgcatcaaggcctacgagctgcccgagggttcgcgcgactccaagggccagcacgtggccaacctgctgcagttcgcgcccgacgagaccatccagaccgtgctgtccatcccgaactacgaggtggccaagtacctggtgctcgccacccgttccggcaaggtcaagaagaccccgctggccgagtacgattccccgcgccagggcggcctgatcgccgtgcgcctcatggccgacgagaatggcgagaacgccgacgagctcatcggtgccgcgctgtgcaacgccgaggatgacatcatcctggtctccaagctcggcatgagcctcaagttccaggccgacgacgagcagctgcgtccgatgggccgccagaccgccggcgtgcagggcatgaagttccgtaacgacgacagcctgctggccatggatgtggtccctggcgactccgacaaggacctgttcgtggtgaccaacgagggcttcgccaagcgcaccgccatcagcgaataccgtctgcagggccgtaacggcttgggcatcaaggccgtgcaactggtcgagggccgtggtgccctggtcggcgcgctcgtggtgtccgaagacgatcaggtcatggccatcatgaagtccggcaaggtgattcgttccaacgtggacgaggtcaagcgcaccgggcgcaacacccagggtgttaccttcgccaagcctgacaagggcgacacgattctctccatcgcccgtaacgaggagaaggacgagcccgaggacagtggcgatgccgcggcgaacggcaccgccgagaccgcacaatccggcgagaatgtgaacaacgcggacgaggcgtgagcagcgtcctgaaaagctggtagcctcgcatacagcagaggctaccgccaagcctgttaaggagaaacgatgagcgagaatctcgaagacaacgagccccggatcataccgccggcagtcggcaatacgcagaacgatcatgtcgagccgctgatcggtactgagcacgctccccgcgtggcacgctccgtgtccagcgatccggaagaatccacgttgccttcttcaggtgccgccactcccgtgcgtccggcacctcgccgtagcgcccccagggctcgccgcatgagcttgtcgctgacccgcgtggatgcttggtccgtggccaaggtgacgttcatgctgtccatcgccgtggcgattattcaggtcgttgcctccgcgatcgtatgggtgctgcttgatgtggtcggtgtattcagccagattacgcagattgtgtcttccaccggtcttgatgcaggcggtttcgatctcaagaacgtgttgtcccttaccaccgtggtctccggcgtcaccatcttctcgattgttgaagtggtgatcttcaccctgctggccaccattgcggcactgatctacaacgtggtcagctcgctggtcggcggcgtgcacgtcacgctcggcgacgactgatatagctatactggcagaactcccctcagtgaaccgcaccccggttgttggactgaagtaattcagattcgatgatcggaggtgcggtttcttatgtgtggggttcgtaggcgtcgttgctgggccgagacttgggactccggcgacgctgggggtggcaggcgtcggtgttgggacagattttgtatctctgacgacgctgtggagggcttaccgtcgtcagcggtacagatcttggagttctgccgatgctgagggtgtgttctgtgtcgtttgcgtccaattcttggccctctgccgacgctgggcacagcaagcgtcgttgctgggccaagttttggactgccgccgacgcagagaatgcacacagcggtgttggtctgccagcgtgtggcagcttggcgccgttgaggaaggtctatgtggtgtggttccgccaaaggactggcaggttggcgctactgaggggactttatgggctcttccggttttggcatgtaggggccgtgcggtttcattcactttttcaatcacacaccgaatcaaaccgcacggcccctacgcaccaaaatgcgaagagccggtttcgctaactagtgcctatatgcctgcaatcaggctgatttgtgctgtcaggctggctggcgtcagcggttgatctgccgatgttgctgctcgtcagtctggactgttgggctttcgttttgacagcggaaggaagatcctcctcgcggtagggcaacaattatcagtatcataattaaggtaatcgtgattacattaaccatgatactcttattattgggcggtaggcggatcggagggctgcaatgtttgtcgcacgagagcacgagttacaagtgctggaaaagctgtttaccagcgattcgttcgaaatggtggtgctgtacggtagacggcgtgtagggaaaacggcgttgatcgacgaatttgtcaaagataaacgcgtgctgtacttcacggccatacagcaaagcgccaagatgaatcttgaagatttctcaagagcggcattgtcgttctttggtatgccggattccaccccgtcgtttggcgggtggtctgatgcgttatcgtttgttgctgaacgtgctgcacagactgacgaacgtatggtgttcgtattcgatgagttcccttatgcggctgccgccgagccagcattaccctccatgttgcagatagcaattgaccatggattcctcgccacaaaagtgacgatgattctatccggtagtaacgagggattcatggaaaacgacgtattggggtgtaaaagcccgctatacgggcgtcgtacagcacagattcgactcctgccattcgactatgcggatgcggcaaaatttctaacgaacacatctccgcaagaactggtccaatactatgcgactttcggcggtacgccatattatctggcccgtatacaggaagccgatggctttgaatccaatgtgctgcgcttgatgttcgacaacttgggcgtactgcgtgaggaacctatgatgctgttgcgtcaggagcttcgtgaaccggcatcgtattattcgatattgcaatctattgcgggtggtaattcctcgccaaagcttatcgctgaacatgcgggtgtcggatctgattcgattggagcatatctgaaaacgctggtcgatttgcgcttaattgagcgaaaagtgccgtttggtgaagatccgagtaaatcgcgcaagggaatgtatgtggtgagcgatcccttctttgcatattggttccgctttgtggggcgcaacatgagcattttggatggtaatatcagcgaggaggttacgagcagactcgcttttggaccagcgtttgatacctatgttggtcaacaatttgagacgatttgcctgcaatggcttattcgaaacaacgctatgggcaacctcccctttgttgccactcagttcggcaaatggtggggcaatgatccgattgctcacgagcaaaccgatatcgatgtgattgctgcggattcgctcgataaaacgattctgttcggtgaatgcaaatggcgtaattcattcaacgaaacggaggctattgaaaagctccatcagcgtgctggcttagtccgcggctatcaggcaggtaatgcgtggcttatgctgttcaccaagaatccggtgagtgagtccacgcgaacccgctacatggatgatgaacgaatggtgttcgtttccgcggaagagttatacactgcgtgatgcattactgggtgattgtgacgcggtatctagagtcctgccgacagccacgtggcaattacgccgaatcacgcaccaccaaatcggtgttcaggtgcatcacgcgcggtgaagagactccgttgatggctttgatgaccacgtcggccatggtccagcgcgctgatccatgtgctgatcgacggtggtgagttccggggttatggaggtggaagctaagttgttatcgggcttacgtatttggggatagcacttgttgctcgttgtacatatagcaatgcccttgcctcctcacgggaagcaagggcattacgctactgcttagtactgctcagaggcaagcgtcacagcacgccctgggcaaccatggcgttggcgaccttgacgaagccggcggcgttggcgccgagcatcaggtcaccctcgtgaccgtattccttggcggcggccagggagttggcgacgatctcttccatgatggacttgagcttggcgtcgacctcttcgaaggtccaagacagacggtagctgttctggctcatctccaggccggagacggccacgccaccggcgttggcagccttggccgggccgtacagcacgccgttcttctggtagacctcgatggcctccggggtggacggcatgttcgcaccctcgacgaccacggtcacgccgttgtccacgagcttctgtgcggattcgccatcaacctcgttctgggtggcgcacggcagagcgatgtcgcccttgacggtccacacgcccttgctgccctcgtggtactcggagcccggaacgcgctcggcatattccttgatgcggccgcgctcgacttccttgatctgcttgacgacctcgacgttgatgccgttcgggtcgtagatgtagccgttggagtcggagacggtgacgaccttggcgcccagctgctcagccttctgagcggcgtaggtggccacgttgccggagccggagatcacgacggtcttgccctcgaaggagtcgttgcgcagcacgcgcagggcttcctgggtgtagtagcacacgccgtaaccggtggcctcggtgcgggccagggagccgccgaattccagacccttaccggtcaggacgccggagtactcgtcgcggatgcgcttgtactgaccgaacaggtagccgatctcacggccaccgacgttgatgtcgccggcgggaacgtcggtgaactggccgatgtggcggctcagctcggtcatgaaggcctggcagaagcgcatgacctcggcgtcggacttgcccttcgggttgaagtcggagccacccttgccgccgcccatcggcagcgtggtcagggagttcttgagaatctgctcgaagccaaggaacttgacgacggactcggtcacggtcgggtggaagcgcaggccgcccttgtacgggccaatggcggagttgaactggatgcggtagccgcggttcacctgaaccttgccctcgtcgtcaacccaggccacgcggaacttgatggcgcgctccggctcgacgatgcgctccagcacaccggccttctcgtactccgggtgcttctcgacaaccggctgcagggtctcgaagacctcgcgaacggcctgcaggaactccggctgatcgccgtcacgggcaacgacctggtcgtagacacgcttgatgtactcgtcagtgagcatgattctcctcgatttggtagggaattaagacggttttattctatgcgcgcaggcccttgctgcatagagtctcgctcggataacgggaaagctttcggcgtggttatggagtggctcaagtttccgtttgttagatttttcgggcgattgttggatgtctgtctatgcgtgaatcgggtcgaaatggaagccgcatcacaccggaggcacgttcatatagtggacataaaggcggacttgggtgatgtcagatgtgtctgttggggatcgtgcggtctttggggtttgtggggtgtggctggaccgtggggtcgtatggtttttgtgacctgtggggtttgtggggtgtgtggccgcaggtcttcggcgcgcaggttaccgggttcgcggtcagtgtgcgaagtaggtctgcagaatcatcgtggtctcggtgcttaccggcaccgtgcggtggatgagattgagcagttcttcaagtgcggtaggggaagccacgcgcaccaccagcacgaaactgggggcgccggccaccgaatagcaggagacgatgccgtcgatattgttcagcttgtccgggatcgaggattcggctgagtagtcgagcggggtcacgttgacgaacgcgctgatgggcaagccgcgctgctcttggtcgatgatggccttgtatcccttgatgatgccgcgcttctccagcttctgcacgcgcgactgggcggcggagactgacagtccggtcgcctgggccagttgcgcgagcgtggcgcggccgtcggcctccagcatggtgaggatgcgctggtcggtctcgtcaatcgcggtcatgatgtcttctccgttcgttgtgctctgtgttcactgtacctgttgccggaatgcgatggctttccgattttgcctggtaatttcagtagttcttcctgtgttttctgttgtgtggtggaatgtttacgtttaaagtcctaattggatgtaataattccttttgaaataagagaacgacgaaataattccattgaggagggatgatatgcagaagttttccaacatgtctctgtccgaagttgcatctgctgctgcgcctgctactatgcctgctgccggtcgggttgctgtgccgaccgccgagcccgcgagcctgtccgccgaagccctgaatatcccgcgctccggcatccgagacgtattcgaccgtgtagagcgcgtgcctgacgcgatttcactgaccgtgggggagcccagcgccacggccgcgccgcatatcgtggcagccgcttgcgaggccgcacaggctggccgcactcggtacaccaacgtgcttggcatccccgaataccgcaaggccgtggccgattactccgcctgtgtgaagggacttacttatgatcccgaaaccgagattcaagccgttgacggtgccacgattggcctgtttctggcgctgaaagccgtggtgggcaccggcgatgaagtgattattccctcgccgttcttcacttcctatgacgccgaagtgatgctgtgcggcggccgcccggtcaccgtggcgctgcgtccggagcacggcatgcgcgtgaacgcggcggacatcgacgcggcgatcaccccgcgcacccgcgccgtaatcatcaactcacccggcaatccgaccggcgcggtaacttctgccgctgaactggcgcgtattgccgaagtatgcaagcagcacaatatttgggccatctccgacgaggtttaccatccgttcgtgtttggggaaacgttcggggaaacgcttgggggagaggcagccgtggcaccatcgatcgccgcggtgccgggcatgaaagagcgcaccattgtggtggaaagcctgtcgaaaacctatgcgatgaccggctggcgcatcggctacctgctggcacccgaagcggtcatcgaacagaccggcaaaatcgccgaactcatgcactcctcggtgaactccttggcgcaatacgcaggcgtggcagcactggctggcccgcaagataacgtggccgccatgcgcgaggaataccgcgccaagcgccagatcgtgctggacggtctggccggatgcccggtattgcgtctgatcgaaccgcaaggcgcgttctacgcctttgtggacgtacgcctgactggccttgactccggtgaatttgcagaccgtctgctggacgaagagcgcgtggctgtggtccccggcgaggccttcggcgaggaggggcgcggcttcgtgcgcctctcctacgccggagatgccgacgagctgcgcgagggcgtcgcccgtctgcgcgcattcgccgaacgggtatggaaccccatcaccggccaccacaccgccacctatcaccccatggaggtgctggcctgaggcttaaagcgaggctaggccgccattcggcctcgtcggcgcgagcgatggcctgcttcttggctcgcagcaagatgtagccgagtaccagaacgttggccagagctcgatgttggcatcgcgtcaaaacaaccgcattaaggctgccgcgtctcgtatcgttacgcgtaggggctggctgaggcgtaatgctgaagagtaacattgaagcgatggcaatcaagccgatttgagggagagaggcacacgatggcgtactgcggccactgcggaaatagagttgatgggccggcacgattttgcccggcatgtggagcgtctgtagacagcgcaccagttgcgacggcaccagtaccggccgcatcgccagccgtaccgcctgcgtcgataccggcacctgctgtgccggcgtctgcggtaccaccatcgataccagccgcgccggttgccccatcggtttacgccgcgtccgctgccccacagccggcaccaaccgttcccctgccggctttgccgattcccgctcctgccgcatatcaggcgactgatgcaaccgccgtcctggcaccgcagcgcaaatccagcaagaagctgatcgccgctttctgcgcattgcttgcgacgattctggtggcggccttggcgttcatcatccccaacttcaccgccgtcaaagcgatgctgggcttccggcccaccaatccgctggtcgtcaccttcgacgcgatcaactcgctgtccactctgcgcagcaccaaatacgaactcagaacccacagcatcactgacgattctcttgacgtgcggatgtctggcatgtattcgctgggcaaaaccaccaacgaatcctccgcgtccttcactagcaaaacagacgaatatgcaacgaccttcgcttggtacaaaggcgcattcgccgagaaattcgtttggcatgacgacgacccctactacatctactacccggccgaccaatatgaagatgacttaaggaacggcgttggtagtgatgtggcggacttgatattgaacgtcaaggatgcgttggtcaagaacggtgcttgggacatcaccggcgcggagcaaacgttctacgatcagctggacaagatgaacgacgatgggtactcgaacgacatcgaccgggtcaagggcacgaaaacgtctgccgaggtgaaggccgaggccagcaaattcatccaacaatatttcggcgtggagctggaagataagaatgtgcgcagccagctgttcccgaagacatcgtctgccaagtctgccggcaatacgcagctgtcgtaccaaatcgatatcaaagcgttgtctcagcatttcgtgaattactggatcagtcatgaagcgcagtatccgcatctgaaatcctgggtgattcagcaaatcgaggatgccggcgtggacgatgctgaagatgagtaccgtcaggcgctcgataatgtgcgcaactgggatttcggcacggatgaagagccggagatgccgactatcaccgtggatctgaactacggcagaaagcgtctgatgaattcgattgccataagcgtgtccggcaaggacgaatacggcgactcctataatggctcgctatcgttgacgctcagtcagcagaacgcggtgtctgtggacgaccccgatttgactgatatggtgagcaaagccaaggacaacaacggactggatttgtcctgaatatggtgcgtgggatgttgcggcggcgctaatttcctcggtgggctatcacgcactcttcccgcttgcagcggtctgctcgctgattggcgcggtgctgatcgtcttcatcaagtcagtgaagtaaacatacttattcatccctcttccttccataacaaacgagcggaggggttgggccattgttttgcggtgtgtccagtctctccgctcgtttatttgcttgattctgtggaatggaaggggcatgctctatgtcaaataagataatgcggaagggctgttctgcgtgcatatatcttgctgaacgtatttgagggtactttctggttaaagacacgccctatggtgggcagaatgctgccgttgtgtctggcgtcggtcgcaggacatgtcgtatcatgagggcacaagcttaattcagccgtcctcaatctgattagtcgtcgggtcgggttggcgtgatcggcttgcagggaatcatccggctcttccggttttggtgtgtaggggggatgcttataggtgggcttgtatggtgtgtctgaagccgccggtgtggaggaggctgcgggtgacgtagttgtcgaggttgcggaagccgagggcgatgccgcgtagggtctcgggcctgccgttgatggcctcggtgggaccgttggcggtgccgtgggcgcggtcttcggatcgatcgtccccggtgccggcaccgtggtcggcgcatttgtcggaacggcgattggcactggagccggatggctgataagtagcggcttagacgcactttacgacaatcaggtgcacagaggcggtggagatgacccgggcagtcatttcaaggataatctcgggttttggaagtggaggtatctgttggcgttgttcactcggtatgtgttggtggggcgtcttgaggacggggcgcaggtgttctgggacacgctggagaagacgccggtcaagcgcaagctggatttcggcggcgattccggctgggcgcgggctggcgcggcggccggcggcgctgccgccgcggctgcgcccggcctgatggtcatgatccacggcatcgcccggctgctcaccccggacacgaagacgcaccacacgcataccgatgacgtgacgctgctggcttttctcagaccggtcactatatcccgcgacgcatggaacacgtacgtggcggtcgccgtgatgtggctggccggactcctcctgtactggggtttctgccggctcgtgttcggccggccgaacacctacgtccccgcctcgctggaggacttggcattcgcctcctccgtgcccgccacgaagctgcgctacatgttcggcggccccatcgtcggcacgctgttcctcatcgcgatatcgggcttccccatagcgatgacatggatgttctggtcgagcgcgcaatgggtcgacaccggcagatccacacctgactggattggatggttggctttcttctgggcgttcctcgccacatgctccccgattctgttggccttgcgtttcgtcggaccgtgggactggcggggacgtttcagcccgcgcgcgggcgccgaacgctggagccggctgaaatgagcacactgctgatgggggccgggatgggcctcatggtcgcaatctcgctcgcattcatcctcgcgttcaacatgtcccggctccgctggctcatggaccacgacatccacccgctgctcgaggagcacggactgcgcgaacccgacgacgggttcacgtcctccggcgccaaggagcgcatggccgcgttccactcggacgtcgcggaggcgctggcagcgccggaacgggaacgcgaagcgagggaacggcgacgattcactgtgttcgacccgacggtcgacaagttgccgctgccggcgggcccctacccgttcgaccgtccgacggcgtcctgggcacgcgacatctacgaggaaggcgattgggcgtacgccgacgcatgggtcagggggcggaggaagccacgcgtggtgcgcgagcaacgctacgactcgtggcgcaacgaagtcctcgcccgccacggcctgaccgacgcgccatccgccacgctcgaacacatcgaacacgccgctgcacgcatccgcgccctccaccacaccagcccagccgaagcctacaaacaagcctgcaaggaagccaccggcaacacggtcaacgacgaaaccaccggagaaggaaaagaaaacggctcttccggttttggcgtgacccgcagcctcctccacaccggcggcttcagacacaccatacaagcccacctataagcatccccctacacaccaaaaccggaagagccaattatctgccggtaccttccacccgagaggaaggtgtagtcctccgggtccgggcgatatcgccgcaaggcgaaggattttcgtgtaccgttccgtgaagacggagcgacaatgaccacgcggttggtctgaatcctcgaggggtggtccttaacaggaccacccctttttcgatggagagggccatggcgcactgggagaatccctcgaacaagaacgcaaaaaccctcagaatcggtattattccaagggttgtctgtggagctagccgggttcgaaccggcgaccctctgcttgcaaagcagatgcgctaccagctgcgctatagcccc

SEQ ID NO: 3242 - DNA, 12221 bp, Unknown
  R53_2m  MAG No. k141_7383
ctctggctcccctcagagaggggagccagcaattatttgtgatgcctgagctcgggacgacgctcgactcgctcgaaggcggtgacgaggtcggcagcacggatcgcgccgcggcggtccttggcagccaccagagcggcctcggtccagatggcgcacacttcggcgccgctccagccttcggttcgctgtgcgatatccaccaacggcagttcgccctcgattgacaacgaacgggcctgcacctgcagaatgcccaaacggtcgtgctcggacggcatcgggaaaggaatctgccagtcgaaacggcccggacgcaacaaagcgggatccacgtcctcaatacgattggtcgcagcgtccaccacaacattgcccttggactcgaaaccatccatcaacgtcagcaactgtgccaccaagcgcttgccgacgccattggtatcgttctcgcgcgaggacgcaatcgaatcgatctcatcaaagaagatgatggcgcgcttgtccgcctgcgcggcggcgaaaatcatgcgcagcgtttcctcactatcgcccacatacttgctcacgatggtcgggccggacaccagatagaactgcgcgtccgccacattggcgatgatgcgggccagatgtgttttgccggtgcccggagcaccggtgaagatcacgcccttgatgggcttggcaccgatcgcacgcatctgcgcactgttgcccagctgcgtttcgataagctccttggcgcgcgtgatcacctgctcataaccgccgaacgaatcgaaggtaagcgacggatcgctgcccggcgtaatgcggtactgcttgatgtcgtcatcgtgatcggattcgcctgggcggatggccgtgggccacagcactcgttcgatgccgaacaggtcggtgaactgcacggtgttgccgggcatgattgaagtcgggtaatcgccttcaagcagttcgaggccatcggaagtctccaggaccacgccttcgttgagcgcacggcgcacgatgcccacacggggcttcaacggccacacatcatgcggcactttacgatagaaatccgtgccgacgagcaacacgtcgcccacatcgaacacctcctgacgcggaaatgtgagctgtgtggtgtgcccattaggcattacgccaaaatatgcggtgcgttcatcgtcaaaaccggtgatgcgcaccaagacgccgtcacggcgcagtacatcgttatcagccatgtcccctcccgaacatttcatgaatcaatcgcaatcagcaaaccctccccatctcaccacaggagcggcaaaacatcaaggaaaaccgctccgaaaaacatcatgggccccacttagaatgaacactatggcacaaattgcaacatctacactgcccgctgttctcgcgatctccggctccgactcgtccggcggtgccggcatgcaggccgatctgaagaccatgctggcttgcggcgtgttcggcatgagcgccattactgcgctcaccgcacagaacaccaccggcgtgcgttccattcaggataccaaaccggacattctcgccgaccagatcaacatggtgtttgaggatattccgccggtcgcggtgaaaatcggcatggtgtctgccactgacatcatcgacgtcatcgctgaacgactcaccttccatcacgccacgaacatcgtgctcgacccggttatggtggccacttccggtgccaagctcatcagtgacgatgccattgcggccttgaccggcgagctgttcccgatggctacggtcgtgactccgaatattcccgaggccgaagtgctgaccgatacgctgattcgcgatcaggaggatatggaggccgccgcccaccgcatcgtggagcgttacggctgtgccgcgctggtcaagggtggtcatggcaccgaggatgccaacgatgtgcttgccgagacggatggaaccgtgacctggtttgatggcgcgcgtatcaataatccgaacacgcacggcaccggatgcacgctgagttccgccatcgcctcgtatctggcgcttggcgacacgttgcccaaggccatcaagcatgcgaagaagtacctgaccggtgcgctgaaggcccagctgaatcttggccacggctccggcccgatggatcatctctggaagtatcgctgacataagtgtggttgttaagctccccctgtcaggggagcttaacactactgaaaaaggagaatcatggttcttgaccgtaatgccgttactcaggaagtgccgatcgacccggaaaccggcaaaccgtacctcaataccgtggccgccatccaggtgtcggccaatggcgtgggctccgaggtctcgccatacgtggctcaggccgtcgaagtgattcgcgaatccggcctgccgcaggaaaccaacgccctgttcaccaacgtggaaggcaatctggacgacgtgctcaaggtggccggtgaggccgccaagaagctcgccgagcagggctaccgcacttctctggtgctgcacatggatatccgtcccggtttcaccggccagctgaccgaaaagcccaagctggtggacgagatcctcgccgacaagcaggcgaaatagcaaagcatcgcttccaccagcaagggcatgctttgttattacacgtttcatggggcggtaactcacccatagggcggtaaatatctcatggggcggtaaaaccctcatggggcggtaggcgaaaacggctctattctgcggaaaggcaaaatccgctaaccgccccatgggccaaataccgccccatgagtgttttaccgccccatgggaatcacggttctgccttctttcaacggggtaagagcgtaagtggggcatatataggagcgttacaaactctgttatcgttcataatgtgaccgcaacgcggcgtgccacaaaatcgaacctatagttaagccccatgtagtgagctatctcacaacgattggctcgctacgtggaattcaagacttggactgcaaacgtcgttcatcccacacaatgggagggcgaacggaacacgcagtccaatcaagagttcgctcgccgcaacatcattgagcagttgcacgcgggcaggtttgcaagaagagggctcaaatatgactgctgctgaacagcagatttccggcaatcccgcggctatggaaaacgcacaagcacgtaccaccgtgacggatcaagccaaggttcaggatattatctcgcgcgtggatcgcgcacatgaaaccccgatgttccatcgcatcgtggcgctggtcgccgctggcatgctgatggacagcatcgacgtatatattggcagcgccgttgcctccagcgcgttggccacacactggtccaccgttgcgcaaaattccacctttatgtccgcaggcttcctgggtctgctggtcggttcgctgctggccggcttcgtcggtgacctgaagggccgccgcgtggcttaccaaatcaacctgctgctgtttggcggcttcaccttcctcggcgcattcgccccgaacatggccgtgctgtccctgtgccgtctgggtgccggcctgggcctcggcgctgaaatcgtcaccggcttcgccatggtcaacgagttcgcaccgatgaaccgccgtggccactggtgcgcgattgtctcgctcgtggccaactgcggtgtgccgatcgctatgctgctgtgtgcatggatcatcccccgctggtcctggcgtccgctgttcgtggccatcggtctgggggccgccatcatctggtggctgcgccgcgacatccccgaatccccgcgttggctcgccgtgcacggccgttacgatgaggccgacgccatcgtcaagcagcttgaggccaacggctccgaactgatcgacgcagccgccaaggccgacaccagcgacacccgcaacgccggcggccgttcgctcggcatctgcctgcttgtagctgtggttgctgtggccgccacgaacgtgtgctcctacgccttcacttcttgggttccgacgattctggtcaagcgtggtattaacctgtccagctcgctgctcacctccacggcgatgatgctcggtgccccggtcggctgtctgattggctctctgcttatcgaccgcatcggccgcaagcgcacgattgtgccggccttcctgttcactggcgtgttcggtttaatgtatgccttccagacctctaccgtgagcgcaattatcgttggcttcctgctcatgatgtgcctgtacgtgcttatggcttccgtggtggctgtgtacgctccggaactgttcgccaccaaggttcgcttccgttgcgtcggcttcgcgaacgccgtggccaagctgctcaatgtgttgatgcctatggtggtgggttggatgcttacctcgcttggtgccacgtccatctttgtggccatcagcgcaattgctattgcatcgatgctgattgtcggcttctttggcgcggagactgcgcagaagtcggttgggtgatcggtttcctcacagtggaataactgctgataatgtccattcggcgtcttgcgtggtgatatgcagggcgccgttttgttgttctagtaattgtcggtaacggttgagaccggtaccggtggataggtccgcactgccatccgcatccgaatccgatgacgtgcgggccgtgtcgatgcaggcgatgcggacggtgtccagtccgatgccaatcgtcattacatagcccgcttccgggtcggcatgtttggcgatgttgccgtacagttcctccagcagcccggcgatcaggccactccgaccggctgcgccatgagcaccggaaataatcgtctgaccttcaaagccaagctctgataatcggcggtcaccattgctcgcaacatcacgaatttgctcggctagcgggcaatcagcgtctgtgatgccacatgcaatgccagaagcggcatcaacggtcgaatcatgcggagtcactgcactgtgcgccgcttctcccctgccttcaataacatcaatgacctgatgcgtgcgatccaatgcgcccatagccacgctacgcagttcgcgtaattcttcttcagaaggggtcttgccatcggcaatatccttgtcgaatcgcaaaatcaggtatgccaaatcattggatacgtaatcgtgaatgtcctgagctgtgcgttcctgctgacggcggtgagccaactccgctcgagccaagctgcgttcgtgattccatcgcgccgccatgccaccaagcatgaagccaataaacaacacggccactggcatcacaccatagagggcaatcgcaccaagaatcacttgcccagtgcgatgctcggcagaagaaccgctcgattcataggcgcttccggtgaagtcgcttcccgactgccctgcgctgtcagacccactggatgaagagccaccatcagcagcgccaccatcagcaacactaccgtctagggcactactactcgccgcgccatccgcagaaccgctcatcgtgtctgagccgccatcaagccaaggaatggccacgccaccacgcgacaacatccacaccacaacggcaatgccggcaaccgccagcgccaatcgcttatcggcgtatccggcaatacccaccgccaataacacggcgagcattgcacccgacggcatccagatcggactcatgcacaacactatccaagccaccgctaccgccacgcatccggtgaccggacgaaacgccatccaccccacaatggcaacgaatatgaactccgcaaggcagtccgccgccgagacactgtcagcagccaagcccgccatggtttccatcgtgcatatcaaggcaacaaccagtatggcaatcaacagccatgcattgcgaacaccgctatccagctcggccaatcggtgtcgtaacgctttcatagcagttcctttcctaccatccatgccgttgcacataccgcccatgccaactcttaaatctcatgccgtttcacgcagattgatatggcatgagcgcgactgcgagcgccgagtttggcgagtgcgcggcgttcaaaagtcgccacagtggccacgctgatgcccaatcgctcggcgatttccttggtggtcgacccatccgcatacatacgcagggtgtcgcgttctttgccggaaagcgcgccacggtgcgcgtatgacgtatcttcgagcaccgcgtaggcggttgcggcatccatgaaggacagcgaattaccgctcccctcatctcccagtaccagctcattggtcgacaatccttgggctgcattgcgaatagcgagcgcaatgccgttcaaatcggttttaccaaccaaggcctgcgccccgcagcgagccgcctcgtcgtgaaatgacgcgagcgcgtatgaggtgacacccaccagcccaacctcgggtgttttggtacgaatcgcacgacagacttcggtaccgggcacgtcgcccatagacatatccgtaaccagcacgtcaggccgcttggtggggctcaggcatcggctgatggccacggcacccaaatcgcaggtccatatcacggcaaaatcgctggacatgcgctcgattagcgcgccgaacactttcagcgcatacgggtcattgtccacaatgccgatgcgtatgttgcggttgcgcgcttctcccattacattcaccccttcagtgtgcccgacgccgaactgctccgtcctgacatgtcatggtcactatgacaactatcattccacatttcctgcgcgatttacgatggaatcatcatcaatccttgacaaggcggtaaaggaggactgcaatgaaccgtgcacaagcactcagcaagctcaacaggagcgatatgcgcaatgccgccgccgagcgcgggacgcaacgaatattcgcgtggaaccgcgcgcattggattggcatggttgtactgatagcggtgttgttgctgctgcagtggagctcatcaatgtatctcatgcccgacgaggtccttgacagggctgccaaaaacctgttcgtatggttccccggtatggttctgcactggccattggtgttgggaatcaccaacctgatactcggttcgatacgatccggcagtctgtctttcccattggcgagcgcaatcatcggaccgctggcattcggctgtaccaatcttcgcttacggccggggttcccataccgttcctgggctcagtggtggaagctaatgcacgctgaaagcggccatcagctattggttcattcgttgatcggctcggccatgctgttgatctgttatacggccgttgcgttcatctgctatgcaatcggacgctacggtctgcgcgaattgtttgtggatccgaatccgcagacggcgagcggacgactgctcacatggattcgtcaggatgcgattcgcttcggctgctggctggcgacggcaatcatgtacggcttgctattggcgctgaccttacggggcggcatggctgcgatggccgccgcgttgctaatcaattttgtgattccgcccgccttgctggtcatcaacggcatctacgcgctacgcccggcctcactgacgtatccgtggaaaagcctgctgttcccgttggcgtgcacactggtacctgcgccgatgctcatggcgctcatcacggtgtatgaagacacgtgcccgataggaagtacctgcacgctgatcggcgaccgatacctctcctggggctcgatggatcaggtcttgcatttcgtcatcgtgttcgccgtggcgagcttcctcggattcggcgtggtgtgggccgtgcggtggattgtggctcgtcgcacaaaataagagagaccaaaatatactggaatcaggggcttcgtgcaatgatgcacgagccgatccaagcaaaggggctgaccatgagcgagaaactgatggaacagtaccggttgcgcaaacaacgcaaacgccgtaacgcttgtatcgccgctatcgtgacagtagtgcttgtccttgccgtcgccggcggcgtatggtggacggccggcgatggcagcgtactggttcgcaatatgttcaagccgaaggccacgcctgccacgcagccggtagtcgacagcaccgcagccttcgcctaccgcaccgcaccggaattcctggcgatggaaaccggcgaccgagacaccggcaatgtgaactactcccctgcttcgatgtggatggcgttggccatcgccgcgcagggcgccaatggcacgacccgctcgcaactgaatgagctgctgggctccggttcgctggccgacagcgactaccaatcgctgctgagttcggtcaacgggcaatattcgggggcgaaatccgagatgagcgccgcgaactcgctgtggatcgataacgactactcccttgccagcaattaccaatccaccgtcaagaaaatgttcgaggccgaagtcaccacgctaccgttcgacgatcaggccgccgccaagatgtccgattggattgccaaacatacgaatggttcgctcaagccgaagatcacgctgcgtgaccgtgaagtcctgtccatcatcaacaccgtctatgcggatggccgctggaaggatccgttcgaagagcagtccaccggcgacggcaccttccacggcgaagccggagatgctcaggtgccgatgatgcaccggaccttcagccaaatgacttacagccatgatgagtacaacacttggcagcgggtggagattccattcgacaacagcggcaatctggccatcgtgctgccggccaaagggcatttcgacgagctggccggcaatgccgagaaactcggatgggcgttcggcacgtgttcgtcggcatcccctggcgaggacgcaatgggttgcaccgcggacagtttgcccggatggggcgtctccgtcaactcggccacggtgaacgtctcgctgccacgattcaccgtcgacagcatgttcgactcggaagccaccatcaaggcattcgaaaaactgggggtgaccgatgcgttcagtgcaggcgacgccgacttcaccaagatggtcgacaccgattcgcacggcgagaatctgtatatcggttcgattctgcaaggcacgcgcatcgaggtgaacgaggccggcgccaaggccatgtccttcaccaaagccggcgcagacttcactagcgcgccggtggacaacatcgagttcacggtggatcgcccattcctgtattcgtacgtcaccccggacggcataccattattcatcggtgcggtgcgcaacctcggcggagtcggtggagaacactgatactttcccgacagtccgtcaattagggtgtatcgtttgacgcatggctacgatgaaggaaatcgcgaacaaggcgggggtttccgtctctacggtgtcgctggtgctcaacggacgcgacgaggggcgcgtaaagtccgaaattgcggacaatgtgcgcgccatcgccaccaagctcggctaccggtcgaatccgctggccagttcgctgcgtacaggcaagacgcacatcctcggtttcatcagtgaggaggtggccaccaccccgtacgccggcggtatgattctgggcgcgcagaccgccacaagccagttcggctatatgctcatcaccgtgagcaccgacggtgagaacagagagagcgaggaaatcgccgcactcaagcgatacggcaccgacggtttcctgtacgccaagatgtcgaaccgcatcacccatgcgccttcttcgctggccaagacgccactggtgttggtggatgccaccgactcgcttggcaaaatcccgagcgtggaaccggacgagttccaaatcggctacgacgccaccaccagattggttaaggccggatgcgcacgtatcgcctatgtgggttgctcggaaccgatgattgcgcaggatggtcgtttggaaggctatcaggcggcgctcagggacgcctgcctcgactatgacgatcgtctggtcgtcaatgtgctcaataacgggccggcactgaccgcagtcagcgatttgttcgacgccgagcatccggacggattcttctgcttcaacgatgcccgcgcctggtatgtgtacgaatgcgccgcacgccgaggactcacggtcggcaaggacatctccgtgatcggcgtggacaaccatcgcgtgttcgccgaaacgctggaaccgatgctcaccactgtggaactgccgcatttcgagatgggctactgggccgtggccaagctggtgtcaattatcgaaggacgctcgatggacgacgtctcacggccagcgaccaccgctcccctgccgccgatcgacgcgccgattccggcgaagatccactgcacgctgatcgaaaaggcctcggtgaagtaaccgaggcccacgcgatttctcaaggcctccgttcagcgcggaggcctttttgcatgtcgaacgggtacgacacgccgatgacgtcaatcgattgacgtaaatcgattgacgtcgcatagtaattactacacaacaacttctacaaaggcacagccgcccgagcaggagcgtcacataaccaataaccaaccaagtagtaatcaaaggatgattatggcaagtgcaaccaaatccgcatggaagaatccttcctatctgcaaagctctttcggcatcttcatgttcttctgctcctggggcatctggtggtccttcctctcccgctggctcaccgacccgacccacggtctgggcatgacctccgcagagcagggccagatctactccattaactccttggcaaccctggtcatcatgttcgcctatggtgccatccaagatcagctgggcatcaagcgcaagctcgtgatcttcgtctccgccatcgcagcgctcgtcggcccgttcgtacagttcgtgtatgccccgatgctgactgccggcggcaccacccgtttcatcggcgtgctcatcggctccatcgtgctctcctcaggcttcatggccggctgctccctgttcgaagcgctcaccgaacgctactcccgtaagttcggcttcgaatacggccagtcccgcgcttggggctccttcggctacgccatcgtggcactgtgcgcaggtttcctgttcaatatcaacccgctgctgaacttctgggtcggctccatctgcggccttggcatgctgtgcgtctacgctttctgggttccggccaagcaaaaggaagagctcaagaaagaagccgatccgaacgcggctccaaccaacccatccttcaaagagatgatctccgttctgaagatgccgactctgtgggtgctcatcgtcttcatgctgttcaccaacaccttctacaccgtgttcgaccagcagatgttccctaactactacgcttccctcttcccgaccaccgaaatcggcaacgccacctacggcaccctgaactccttccaggtgttcctcgagtccgccatgatgggcgtcgttccgattatcatgaagaagatcggcgttcgtaactccctgctgctcggcgcaaccgtgatgttcctgcgtatcggcctgtgcggcgtgttccacgatccggtcagtgtctccatcgtcaaactgttccactccatcgaggttccgctgttctgcctaccggcattccgctacttcaccctgcacttcgacaccaaactgtcggcacccctgtacatggtgggcttccagatcgcttcccaaatcggccaggtgatcttctccaccccgatgggcgccctgcatgacgccatgggcgaccgtccgaccttcttcaccatctccggcatcgtgctggccgccctaatctacggcttcttcgtgatcaagaaggacgaccaggaagtcggcggtgatccgttctacaccgataagcagctcaaggcccaagccgcagctaaagcaaacgcctgagcgcaaccgccaaaatcggcaagaacacaactaaatcgtgctgcccgaagcgtttcccctttttccgtttcgggcagcattcttagaacttttatctaaaaactcaataagcaacaattcaacaatcgcaagattcatcaatcattaagaaaggctattcaacgatgactggcttcactccggatgcacccgtcctccacgaaatcaagaaccacagcgaagctctggcacaggcggaagcaggcgttgcagccatggccgccgaacgcaacaac

SEQ ID NO: 3243 - DNA, 27801 bp, Unknown
  R53_2m  MAG No. k141_7400
aggaaatccagaatgcgcaacagtgtggatttaccggagcctgaggggccgatgacagtaaccacattttgtcgaggaatgtcaagatcaagcccatccagcacggtggtgtcggcaaagctcttgctcactcccctaatccgaatcatcccgatactcccttttcgctgctgttatgcacgtcaacgctcgttcgcgaagcacaatcccttaccgtagacgcgcttgctcacctgtgtttcggcgtggttatatccagtgcctatggagtgctattcacaccaatgaataacacatcggacgccgacgtattgttcgctcacagatgcagcagatcgtcaaactcgtacaactcttgtctttacttgatattcagctcgttgagcttgttcttgatatccacagccgacggttcgacctggaaagtgccatcaggatagagcaccacgggaatgtgctgctggccgctgatggccaccgcacgatcggccgccccatcctcggtttcgatgttatgccacgtatattcggcgccaagctcctcaagcgtgttcttcgcctgcttgcaatcaccgcaccatgttgcgccatagacgtcaatagccatgtcctgttccttctttcgtaatacaacaacccaaattcacaacgccccaagaataacagcgcaggtttttctcagaacgaacaattatccgcatacgtaagcgatacacgtcagtatgcgttggcaatggcttggtcaaggtccgcaatcaaatcatcgacgttttccaatccgatggaaagtctgatgagattatcgctgactccggcggcgatacgcgcatccaaaggaacctcgcgatgcgtgatgcgcgcaggatcgacgatcagcgaacgcgcgtctccgatgttcggcacataggagaatacctcggttccgtcgaggatgcgtctcacgttgttctcgtcgccgtcgacgaggaacgacagtatcgtaccgatccctttggggaagtatttggcgaccagatcatactgacccgtgttgcccaaaccggaataattgaccttgagcacatgcggcgcatgcgtgagatgctcggcaatacgcgtggccgattcgacttcctgccgttctcgcacagccagtgtttccaatcccaccatcgacaggtatgtattgaacgggctgggcaccgcgccgaaagtgcgcagatatttgatgcgtacacggcgaatgaacgcctcgcggccgaatctgctggcgaagctgcgcgctattcctttgcgttcatcgctgacgaccagttcgggagtggtgaactgtgggaatctgccgttggcccaatcgaagtttccgccgtcgataaccactccgccgatggcgttgccgtgcccggtgatgcctttcgtggtggaatgcaccacgatatcggctccgaactcgatgggccggaagaggtacggggtgggcacggtattgtcgacgataagcggaataccgttgcgatgcgcgagttccgccaatggttcaatatcggtgatttcagtggatggatttgcaacggattcggtgtagatggcgcgggtgtccggcccgattttcgaagcgacctcatcgaggtcgttgatgtcgcgcacgaaatcggcatggactccgaactgcgggaagaaggtctccatggcatcgacggaagcgccgtacaggttggtcggagaaatgatgcgaccaccaccttcggcggcacacaacagcgcatacgacaccgcggccatgccggaggcgacggccaccgcgctcacgccaccttcgagttccgccaaacgacgctcgaacacatccacagtgggattcgccacacgcgagtacgagaagccctcggcttcgccggcacccagtgcgtcaccatgtgcggcgctgaccatgtcaaacgccgcactggcgtaaatcggcgggttcgccgcctcaccgtgagccgcccggtcatagccgccgtgaatagccgcggtaacgaaatccctcgccatggattatcccctcaatgtcatgccgccgtcccttaggaaacaccgacggacgcccatactgatacggcaccagtgtaggaagcgaagcaccgtaacacgtgcttgcgggtacaggcatttcttatcgttcggtatcagccggaatgataggtggggtgcgttcatcgtaactcgttgagcgctttctgcgcgatggccgtgagaaagcgtatgccgtagccgatggcggccggattcggccggaacgtcggcccatgcgcggcaccggtctcaccggcaccgatgtgcacgaacaggccgggcttgcgatcaaggtaatatgagaaatcctctcctcccagttgaggatgatcatcatccgcgtgaagcccctgctcggcgatgacttctcgtccgatgcgggtccatccggcgtcgttgaacacggaaggcgatccgaagaaccacgagacatcggcagtggcaccgtaggcggcggccgtgttgttgatgatggcgatggcgcgcttcttggcgagaacccggtcctgcggctcggtagtgcgcaccgtgccttcgaagaaggcatcctgcggaatcacattccacgaattgccggcttctatatgggtgacggacaacacccgcggatggcgagggtcgagattgcgcccaatgaccgcctgcaacccctgcaccacgttcgtcagcacggtgatcgggtcgatgccatcctccggttcggctgcatgcgcgcccttgccgtgaatggcaacctggaatttgtcgaccgcgccggtgatgccaccctcacgtatgagtatggatccaaccggtccggctgcatcgtgcgtgccgaaaaacgcctcgacatcgtccagcacacccgtgttcagcacctgcacggaacccgtggggcgctccgcggtggcacgaccttcctctgccggctggaagatgatcttgacggtaccaggcaatgaggcacgccgttcattgagcagaatcgccgcacccaacgccacggtgaggttgaagtcatgaccgcagccgtgcatcactccggcattatccgaagcgtagtcaagtccggtattctcggtgatgggcagcccatcgatgtcaccgcgcagggcgatgacgggcttggcgcttgcgccgcgcacgatggccaccacgccggtcctgagtcccgattcgaggatttcaacgccatgcgattccagaatctcacggatgcgcgccgtggtgccgaactcttcataggagagttcaggatgacgatggaaccagcggtaccattcctgcacatcagcgttcagagcatcgggaagtgccacgaacgccgtcggggatgcgcccgatcgggttgttgctgcggtcaccggaacctcctttgcgtgacggcgatgacggacggatgcgaggacgtctcaatcccttcggcttcgctcattgtttcactcctcccaaatacgcctcctgcacccgctcgttgccgagcaggtcgccggctttgccatgcagccggatacgtccgttctgcagcacataaccatagtcggcaatcgagagagccagctcggcctgctgttcgaccatgagcacggaaacgcccaattcgtcacgcagtcgcgctatctgttcgagtacgtcttcgacgagtttgggagacaagcccatcgtcggctcgtccatgcagatgatcttcgggcgactcatcagggctcgcgcgaacgccagcatctgctgctcgccgccggacatcgtgccggcctgctgcatacgacgttccttcaaacgcgggaaacgatcgtacatggcttccagatcgccggccacaccctccctgtcgtgtcgcgtataggcaccagacaacagattctcctccaccgtcatctgtggaaacacgcgcctcgcctcgggcacggcggcgataccggcttggacccgtctgcgcgtggacagtccggtcacatcctcgccttggaaccacagcgaaccggtcttcggatgattgatgcccaaaatcgtcttcatcgtggtcgacttgccggaagcgttgcctcccagcagagagacgatggcccctttgggtacgcagatcgacacgttctgcaacgcgtggacctgcccgtaatacacattcactccatcgagcgcaagcagggcatccccgccatcatccaacgtcccggtttcatctcgtccggtaccggcaccggtgccctcgacttcgacgacggcgccaatggagttctgcatcgcaagcacatgcgactgcccggcgacccgggtatggttcatttcacgccgcttgccgagatacgcctcgaccacctgcgggtcattgcgcacatcatccggggcgccttgcgcgatgacgcggccgccatccatcgcaagcacacggtcggacaatgcagtgaccagatcgatcttgtgctcgaccaataggatggtatgtccctgcgctttcagatattgcagttgacgaagcacttcggcggtctccgactggttcatgccggcggtcggctcatcgagcagcaggatcttcggttcgctgatgtgggcacgggcgatttcggtacgacgacgattcgcgtacgacaacgtgtaggtgcaatcccgtcgacgcgcgctcagtcgttcacggaaacggtcgatctcccgatccacgcggatgttcacctcatcggcttcgcgccgagtccgcggtccaggaaccagcgccacgccggtctcggcgagcaacgacagccaacgcgcgatcggatacctttgcaggcttttgaacgggcgtgccgcgacgagtcgccggtgatatccgagattgatgttctcttcgacggtaagaccgccgaacacacgaccgttctggaaggtgcgcagcagtccccgttcagacatgtccgcagggctcagaccggcaaccggctcgtcggcaagatcgatgagcccggaatcaggctgcagaaaaccggagatcaggttgattgtggtcgattttcccgaaccgttcgggccgatgatggaaatgacctcaccttgatgcaggtcgaaagagaccttgttgacggcatgcagcccctcgaaggacttgtcgagctcgcgcacgcgcagcatcaccggcgcgtcaaggacggcctggcggtgtctttcggaatattcagccagatcatccgcgttatcgaggcgttcgttgtcgatatcgatgccggtcacggcgtctacggtggaaaatacggtctcggaatcggtcatggcgactcagcctttccgggcgaacaggccctggggacggaacaagatgacaagcaccagcagcacgccatacagcaggatgcgcgcgtcggaggcgaaacgcagcaactcgggcgctccgatcagcactatggagccaagcaccgcgccgagcggagagttcataccaccaagcacgatgatggtcaggatgagaatcgacatgttcgagttgaagatcgtcggatcaatgtacgtgtactggtgcgcgagcaacgaaccggcgagacctgcgaaaaacgcggcaagcgcatacgcgagcgccttataggcgccagtgcggatggacagcgcctccgaagcctcgcgatccgatccgacggcctcgaacacgcgccccagatgagcggttcggatacgcatgacgatgaccaacgtgacaagcagcacgatcacgtcaagcagatacatcatctgctgcgtgtacagcgtgacgccgaacaccttcgggaacggaatgccctgaatgccaagagaccccttggtcaacggctcggcgaggcgaatgatcgccaccatcaccgcacctacgccgatggtggcgatggcgacataatggccggaaaacctccatacggggaaggtgagcaccgaggcggcaagcgccgcgatcacacctgcggcgggcaacgccaccaggaagggccaatgcgcctgcgtggccagaatcgcggaggcataggcacccacggcgaacggtcctgccatgcccagaatcgtttggcctgcggagccggaaatcaacgtcagccccacggcggcgatggcatagatggcgacctgagtgcccacgccggacaggtagtcattgaagaagaacggggtggatacgagtgccacggcaccgatgagattaccccaccaaggcagcgcgatcgccctgccgcctcccaggaacgtgccggtaagcggctcggatttgacatcggtcttcggcccaagcagaccctgcggcttcacgatgaggatgatgatcaacgcgccgaaggtgatgaggtcatgtgcaccgtctccgaacagagagatgccgaacgcttccaccacaccgagcacaagaccgccgaccacagctcccgggatggagcctagaccgccgatcgtggccgccacgaacgccgtcataccaatggtgccgccgttcatcggattgatgttgccgttgaacaagcccacgaagatgccggaaacgccggcgagtacggcaccgatcacaaaggagaggttacggatggccttcaccgggatgcccatctgcatggcggcttcgggatcctgggaagtggcgcgaatggcctgtcccgctttgccgaacttgaggaatgcccataagccaagcatcgagaggacggcaagcgtcaccatcacgatgtccgaagtgccgaagcgcacgccggcgacttgcaggttataggtctgcagcagtttcgggaacggtcgggtctgtggcccgaagacgatctgcagaccattgtcgagcacctggccgacgccaatggtggcgagcagcgccgcaatcggtttacggccttcaagcggagcgatgatcgccacgttcatgatcagccccagcagtgcggtaaccacgagcaccgccacgaatgtgggcacgattccccatccccatgacgaaccgagccaccaggcgatcatcatgcccacggccacgatggaaccttgggcgaagttggccacgttggtgacgccgaaaatcagcgacatgccgactgcgaccagcgcataggcgctgccgtgtatcagtccggcgaaaagaacatcaaacattgtgtgcgttacctcgttcgtggtgtatgggaaagcccggggaatcaaccttcgtattgttcgaacttgccatctttgacgatgagcagaatcggatcgatgttatcggcgcgacgactctgccgattgaatttgaacgtgccgccattgccctggtagagcgggaaatccgtcacggtctgcagcgccttctgtatgccttcacgggtcggttcggtcttgttggcggcataggccagatcgatgatcgcctcgtaggcggtcacttcgaaattgcccgggttgttgccgtacttggccttgaagtccttgacgaactgctgggccttggcgtccttggtgccagtggcggagaaggatccggtgatgatcgaaccctcggcgtttttgccggcgagatcgaggaactccttggtttcctgaccaccgaagtacaggccgtcgtaccccagcttgtcgcgcagggtattgatcaccagagcaccgtccggcccgtagccgatgtcgaccaccgcgtcaggcttggcatcgcgcgccggaatcagaatcggcgacaagtcggtggagtcgggcagatagctggactcgtacacaatctgggtaccgtttttttcggcctcctgcttgaagtaccgataggcctgtttgccccagtcgttctcgatgtagaccaccgcgatcttcttggcttttttggccactatatccgcgttggtcttctgatacttgtcctgaccgatttggggagtccatacgtggtccccggtatcggtaaaggtgggtgccgaattattgaaaccgtaatgcacgaggccggcctgctggaagataggcgacgcggccgaggatgcgggcgaggcatagtcacccaccacggcgatgatcgacttgtccgacacgatcttgggagccaccgcggcgtcttgcttggcatcggactgcgtgtcatagtatcgaagaccaagcttcttacccttgacgccgccatccttgttcaccttggcaaccgccagatcgaagccttgctggaacagtttgccgtattgcgcatattgcccggtcttcggatagatgactccgatgttcacggtgtcgtcgctggaaccgctggcggcatccccgccaaggccgcatgcggagacgccaatcagtgttcccgcagtgaccacggatgcgatcgccgtacggatgattgtcttgatggtcatgatgttcccttctctattcgaataatcatgaagcgtaaatggggaccggctcagcccacgcggatgtcgctcaatgcctgcagcgcctcgtcgcccgccggggtcggaaccgtgcagcttggtgccaacaaaaacggtttgcccgtacgaagcgcgatggtcttggccaattcgcggcgcacctgttcgacgtcaccgtccggcgcgaacaggtcgtacggggcaccggcgaccggcacagccgtcaggtcggcatccacctgcgggtttcccggttgatactgatcccactgcagcaggtccacacccttcacgtcgaaccaattcgggtgggattcagcacgacaggtgtgcagcagcaccacggcgtccgggttggcgcgatgcaccgcgtcaatcacgatgcgatcgtatggttcggagaattcaagatagcgttgcgcgtcgaaataaccctcgctcaccgtgccggtgagcgcgtagaacacgccgtcgagtcccgctccgccttcggactcgggacgaaccaacgcacgcgcataggaggcgagtgtgcgggcgatgttggcgagcgccagcttggcgacaccaggctgatcgaagatcagatcttcgacgcggagcgtcgcggtggcgtaatcgtcacccgggtacagcggcagatcggcgatctgcagcaggacggacaatggcgaaaagacggtctgcagcacggcacgatcctcaaggccatgccggataagggcggcggcggccagagcctcggcgaaatactcattgtcacgaacgtcgagttccttgactccacgcacatcatccggttcggtgattgcggcgctgatcttcttcggcagcacgaatccggcataatcgttgcgatcgtaccgagagccccaagcctcggcatagtatatggcgcgcggattgatcttcacccattcccaatcccagcgattgacgaaatcgatggtggccttggcgaattcctcggcaccgtattcatgaccgacaagatgctgccaggcgctaaccagatacggcgtccgggactgatgattgacgatggcgtggaagtcggcgcgacgattgaccatattggggtcccttctcctgattcgcaacgttatccgtcatcgaagcgcatcggcgatgccgatgtcaagcggaatgccgcccacgtattacaggcatttcttatagcgccttatccatccgcgaaatcattgcatccttgaagcgcctatcaagaacacctatatgccatttcggaagaaacgacgacggttcgggaatccatgcggtattacgggaactgacatacatccgtatccatcatcagaagaggtgaaccgatgggagcgaatctgtatttcatcggcggaggcaatatgccgagcgccatcatagaagcggtgcgacgtaaggccgccgcatatccggtcgaccacatctgggttgaggaaatctcacgggaacgcgccgaatatctggcatccacgtacaacaccgagacggcgtcaccgacggacgccccggatgccgacatcgtggtaatcgcggtgcgtccgcaagacgatgtcgccggcgtggccgcttcagtggcgcgacgtttcgacccggcgaagaccacggtgatctccatcgtagccggctataccatcgccaagcttgagcaagggctcggccatgggtggcgtgtggcccgcatcatcccgaacacactcaccaccgtggattacggttacagcggcgtggcgctgaatggggccgcggcacgcgaggacgtggatgcgttcctcaacactttcggcaaagtgctgtatgtcgaggaacgacttatcgacgtaatcaccggtttttacccgccgaacatcgtctaccatttcatcgacgcctacgtggatgccggtgtgctggccggtctgccccgggacgcggccagagccatcgcgctcgacaccatcatcggcggcaccgaattcctcaaacagaaagacgtgctgcctcaagtgctgctcaatatcaacaactcccccggcggagtgggaatcaccgaggcatataccctgaacaaaaccggattcgcggcatccatacaatccgcggtgctggcggcggtcgagcgcaccacggcgctcggcggcgatgcaaagtaaaggcgggagccgatcatgacgcaacaattcacctgggaccatacggtcgaattcgtgaatgacctcaagtccgccgaacggacgttcgccgacgcagggctgacttcccaatacggcggcaagcatgtggggcatggcacggagaactccctggcctacttcgccgataactatttggagttcctggcattgtacgaccgcgaggaagccttgtcggagacgccggaccatgggctgatattccatgaagccggggagctgctgcccgagtatgtgggattctatcgtccggcattgcacgtgcatggcatcgaacaggcggccgaacggctcacggccaaaggccttgatcttggccatatcgttccgggcaatcgcacgacggccgccggtgaggagatacgctggcggttgctatggatcaagggcgatgatcagggcctgcgctatccgttcgtcatcgactggggtgcgagcgaatccgagcaactggcccgctacgagagcggcggactgctgcaccggcatgccatcggcgaagtggacacccgtcgcgcgattttcgcggtgcccgaccccgcggcggtggccgcgcactggtccgacgtgtttggtttgggtctcacggaaggcggggacgccgaccggcccgatgagcactatttcgatctcgatgtgggagggcatcgtgtctggcgcttcgtccagggtcaatgcaacgccatcaccgaattgcagtacgacgcccccgccggcaaatccttcgatgtgaccatcggccaggcgcgattcagaagcctgtaagtacggtccacacacaaccgcaacaacgcatgaggcgtgtgccaccaatccaacggtggcacacgcctcatgccgtaagagagccctgccaatcagtcagtcagtcagtcagcagattcaactcccgcagcttgttcctgatgtccttggcggagggctccacctggaaggagccatcatcgtacagcaccaccggaatatgctgctggccgctgatggccacggcacgatcggcggcaccgtcctcctcttcgatgttatgccagatatacgccgcacccagctcatccaacgtgttcttcgcctgacggcaatctccacaccatgtggcgccgtacacatcaatggccatgccatgtcctttctgcgcgccgcgcttcgtccgcggcttcccatcgcatccatcgtaacggcacatacggccatatcacgtcaagcgaacaccttcggagtcaatgcgccaagtacatcggagccgatgtggcgttccctgtatcgggcataggcgatatcgaaagcctgtccgaggtcttcgatcagatcgttcgcatcctcgatgccgacggcgagacgcaccagctcatcggtgatgccgaccttcagacgctcctcccggggcagttcgaaatgcgtcatgcggcaaggcagttccgcaagcgattccacggcaccaagggacacagccaatcggaagatgtgcagattgttgagcacatccgccgggtccacaccaggcactacttcaaagctcagcacaccaccggcacccttcagtcccttggcggcaagtcgctggtcaccggcccccggcaggcccgggtaatgaacggacttgaccagcggatgcgcgagcaggtaccgcgcgatggcattcgcattctcctgctgccggtccatgcgcagggccaatgtctggatgccgcggagcaccgaatctcattccgtgggcgccagtacccctccaagacggttctgggcgaagtacacgcgattggccaaatcctcaccggagacgaccacgagaccggcattgacgtcggagtggccggccaagtacttggtggcggaatgaatcaccacatccgcgccgagggaaagcggctgctgcaggtacggggtcgcgaacgtgttgtccacgatggacagcgcaccgtaacggcgggctgttgcggagatggcgcgtacgtcgttgaccttgagcagcggattggtcagggtttcaaagtagacggcttgcgcaggcgcgatgccgttcgcgcggtcgcccttgacggcggcctccaacgctgcaatgtcctgggtattgactgattcgaccacgacgccccaacgggtaaagaactcattgagctgcgaatacgacccaccgtaaatgttgtcccctacaataatacggtcgccgggcttgaaaatgctgagcacggcatgaatcgccgccaagccggaggcgaacgcaaaaccgcgcgttccctgctcaagctgggcgatctgctgttccaggaagtcacgtgtgggattgccgctgcgcgcatagtcgtagcggggcatcgcgtcgaccttctcgaaggcatatgtcgttgagttgtagatcggcgggttcacggctccggtgttgttgtctccaaccggcagtccgtggacgagctgagtattgaacctggtcattgcgcaccccctttatggtgttctctatggctgctgtgcacgaggccgttccccgtgcggcacgtctacgacgataacgtatcggacacttgaatggaacggcgttgctatatgggttgcttatggaccgttcaaatgcggtcgcggcggtcacgtggctacactaggagccatgaagattgccaaggccttgacccgtttgaccggtcctgaaaccaccccggtgttcgtgctgttgcacggctggggttccaatgaatacgatctgcccgatctgctgaactattgcggtgccggttcggctgattatgccagtttgcaggcacccatcgcctatggcatgggatatacatggttcggtgcgtgggcgcatgaaggtgtgccggagggcgaatcattggacaagcaggcggctgaggccgcccaagccattgatgcatgggttgcggagcatattcccgccactcggccggtggttgccatgggattctcgcagggcggcctcttggccgcgcatctgctgcgtttcaatccgaagcgatatgccgcagccgtctcctgctctggatggctggcaccggggtccgttgcgggcgatgccgaattggcttcgttgaagccgcccgtgttctacgggcatggtgctgcggacgacatcttcccgaaagccgatgtgacggcgatgggtgagttctggcgcgagcacggcacgttgaccgaacaggtgtatccgggcatggcccattcgatcaatatgccggaaatgcgcgatattcaacggttcttggaggccaacggattcattcggccgcagatttggtagtcaccacctcacatggcgtagtctacgtgggcgaattcggggactttgtaccatttgacggggtagccggcaccgtgggcgcagaagaccgagtcgggggtgttgtccagatcggcttcgggatcgtaggcggcggctgcgatgacctgttcggcgtcatggcatggcttgtagccgccgaaggtggcggagaaacggccatggccgtgcgtgtactggttcacgtccatcgcatagtcgcgcatttcggacaccggcgcctcgccttcgatcacggcgtattcgtcatcggtgaccggggattcgaagctgccggccatgcgctggatgtcgctcatagcacggccgatcatgtctgcgggcacttcgagccggaaccggtaccacggttccagcagtcggcagttgccctcccctgtggtgtccggccggctctcgaccggcgtctcgggccggccactgactcctgccctggcttccatcagcccttggcgaatcgcccggtacgtggcttgacggaagtcgccgccttcggtgtgcttcagatgcgcgcggccggccaccaaagtcatcttgatatcggtgagcggtgcgccaacgagcacaccgagatgctcacgctcggtcaggtgggtcagaatcagccgttgccaattgcggtccaaatcattttcggacagggccgaggccacagtgactccgctgcccggctcccctggttccagcaggatatgtgcttcggcataatgacggagcggctcgaaatgacctgcgccttcgatcggcgcagtgatggtctcacggtacaggatggagccggggccaaaggacacatccagaccgaaccggtcgtgcagggtctgctggatgatttccagctggaccgcgcccatcaattgcacatgaatctcggccagccgttccacccacaccacatgcaacaacgggtcttcgtcttccagctcacgcaatgcggtgatgaccttatgcaaggtcagatcatcgaactggggaagggccggcgagctattgtccgtctctgcgtcttggccggcagtgtcgttctcctcattgcggccggttcccgacttggcggcatcatgctcggcatcgtcccgattcacgctgtcatggccggtgccaccgcgtttggccgctcccgaggtgccggccgtatcggattcagctccggcgggcaacaccgtgtaggtcaacacgggctgcagcgacggcgattcggcgtccggttccgctcccagcccttcgccggggaaggtccgcgtcagtccggtcaccgcgcataccgagccggccggcacttcggtgaccgtctcgaatttggcgccattgtagatgcgcacctgatcgactttctcggaccacgccatgtcatcatcctcctgcgctggcgacggtgtcgacgccgcggcgcacgaggatgaggagacgatctccttggctttgagcgcaccgccggtgacgcgcagccacgtcatacggttgtgctgaccgtcgtgggcgattttgaacacgcgtgcggcgaaggcggccggccattcacgttcgcgggtgaacgtctccagcccgtccaggaattccttgaccccttcgagtttcaatgccgagccgaaatatacggggaacagctcgcgtacggcgatcatcgatcgcaatctgcccacggacagcgcgccatgttccaaatagtcgttcatcgcctcctcgtccagggtggcgatgtcttcggcgaacgcgtccaacggtagcgcgctgccctcagtggactgttccattgccggcaacggatatatcgcatcgctcagacgcctgcgcaactgagccaacacggcctcgcgggcaaatccggcggcgtcgcacttgttgacgaagatgaacgtcggcacaccgtatctggccagcagacgccatagtgtctcggtatggccttgcacgccatccgtgccggagaccacaagaatcgcgtagtcaagcacacgcagcacacgttcggtttcggctgcgaagtccacgtgccccggcgtatccagcaaggtcaggcgcaggtcgccgtgttctaccaatgcctggtgcgcgaaaatcgtgatgcctcgcgccttctccaaggaattggtgtccagaaacgcatcgccgtgatccactcgccccaatttgcggatctcaccggtacggtagagcagcgcctcggacagcgtggtcttgcccgcgtccacatgcgccacgatgcctgccactatctgtttcatcagctgtgctcccttcccgatgcgccgcatgttgccggccgcctaaccaatatatccgagaaaatccgggagggaaaaattttaccgtcagaccgggctgccggtacaataagtcaccgaacaccgactgatatgaggagcctccgtgaccacttccggcattaccgttttcggccaaccatcccagcccaatcatggtgccggcgggcgaatcgccatggacgatgccctctttcccaccgattatgtggcgctggatctggagaccaccggcttttacccgaacagttgcgccatcacggaaatcggtgccgtgcgcgtgcgggaggggcatatcgtcgatcaattccagcagctggtgaatcccttgcggccgattccgcgtcagatcaccacgctgaccggcatcaccgatgcaatggtggccgacctcgatccgattgacgaggtgcttccccgattcatcgcatggctcgctaccccggctgccggccccaccgttgagccgattgtcggtcataacgtcagcttcgatctgcgattcctggattacaacacccggcatatcgccggctgcggctttgcctgcgcggattatgacacgatgcagatcagccgcgccctgttccccgcgcagcggcatcaccgtctggctgacctgatcgtgcgcttcggcatcgcggacaatgaggaacaccgcgcattaagcgatgccatccagacccagcagtgcttcgaatggatgcggcattatgtcaccgagcatcacgaatccgaagcgatccgctggaagcaatccccggccaaaaacagcaccgaaatcctccaccagcagttggtggtaaagcggtagttacagcccgtattctttggcgatgacggaccagaggtcggcggcggcctgatcgacggtttcgttgacgatggtgacgtcgaattcgttttcggcggcgagctccactttggcggtttccaggcgacgggcctgctgttcggcggtttcggtgccgcggccgatcagacggcgcttgagctcttcgaagctcggcggcgcgatgaacacgtacaccacttccaagtcgagttcggcggcgcgctgcttgacgcggcgagcaccctgcaaatcgatttccagaatcgttggcatgccggcagccagatgctcctcaacaggcttgagcaatgtaccgtagtgggccatgccgtgcaccacggcggtttccaggaactcccccgccgcttcgcgggtcaggaactcgtcttcggtgaggaaccagtagttgacgccatcaacctcgccggggcgcggggcacgcgtggtggcggagacggacacccacacttcggggtggtcggcgcgcagcttggcttccacggtgcccttacctactgcggtagggccagtcaggacgattagacggccggcatgggtgttttcagtcatgggttcctccggagatgatgtggtgtgcagcgattatgaatccaatgtggtaacggctcaccggcgagatgaccggtaactgttacagccccgacgaacagggaagaatatgaatcgtgatgcgacgtatgcaatgagatagatacgtacgcatgccgcgacatctgattccgttctgattactggttttctgcgccttcggcagtggcttccatcagcgactgacgtacgtcaagcgcaatcgactcggtagcttggctcagtgcggcgatatccggcccatgcgaggcgataaagcgggacacggtaaccagcacgttgccgcgcgtaccgcggaacacggttttcagatccttggcctcggcaccctgccaaccgtaaccgggggaaagaatcggaccggtgaacttggaggggtccacgccggaatcctgcatccattggccgatggtggcaccgatgatcagacccaccgagcccatgccttcgatatccacgttatgcttctgcgcggtggaggcgatgccgtaggccacggtacgtcccttgtaatcgccgctctggcgcaacgcggtctgcagactcatgccttccggattggaagtcagggaggcgatgaacacgccgcgtccgttttccaacgcttcggtaatcaagccgttcaacgagcgcgcgccatagtacggcagcaacgtgatggcgtcggccagcaacggtgcaccgggcttgaaataggcgtccgcgatggcggaaatcgtggtggacaggccgccgtgcaggcagtccacgatggtgatgacgcccatttgtcgtgccgcgtagagcacgcgctcgagcgcttcgaaacctttggctccgtagcgctcgaacatcgacgtctggaatttgactgctgcggcgcgcccgttggcggcctgcagcatacgcatggagaagagttcggcgccttcggcgtcgacgttgtatccccagtcggtgaggagcttgcgatgtgggtcaatgcccacacacagcggtccgtatttggccattgaattgctcagtcgcagaccgaaatccgaacgttgtgcctgcaattcctcactgctgggtgtagtcatcagaactcccgtcgctccaattcgaacagctgcttcgaatgctcctgaatgctcatgatctgataatcattatgcttcacggcctcgatagccagcagtgcggcttggaactcggtgatggtggtaaactgcggcagatcggctgcaatagcggcagcacggatggagtagccgtcggaacgggagccgcgcgagttcggcgtgttgagaatcatgtcgatcttgccttcctcaatgagctgaaccacgttcttgcccacggagccggcggcgtgatgcacctcgaccggggcttccggatcggtgtccacgcgggtgctgatcttgtccacgatgttcgactcgatgccgtaacggcgaagcacggaggcggtgccctcggtggcccagagcttgaatccaagctcttcgaggcgcacggcgagcagcggcagctgacgcttgtcggtgtcgttcacggaaatgaacacgttgccgtgggtcggcaggccaccatcgtaggcggcgagctggctcttggcgaaggcgtgcgggaagtcgcggtcgaagcccatgacctcgccggtggagcgcatctcaggtccgagcaggatgtcgacggtcttgcccaccggggtgcggaagcgcttgaacggcagcacggattccttgaccgcgacctgctggccggggtggatgtcgccgccgtcgcccttgggcagcagcagaccgttggcgcgctggtcggcgatggtctcgccggccatgatgcgggcggcggccttggccagcgccacgccggtggccttggaggcgaacggcacggtacgggaggcacgcgggttggcttcgatcacatacagcgtgttggccatgaaggcgtactgcacgttgatcaggccctgcacgtggcagcccttggcgatggcgtaggtgccttcgcgcaggcggcggatctggtcgtcggacagggtggacgggggcagggtgcaggcggcgtcaccggagtggacgccggcctcctcgacgtgctccataatgccgccgatgtacagttcctcgccgtcgaacagggcgtcgacgtcgatttcgatggcgtcctgcaggaacttgtcgatgagcagcggggagggcaggcggccggagaccacggtatcggccttggcctcggcaagcgcgcggtccacgtacttggtgagctgcttgtcgtcgtagacgatttccatgccacggccgccgagcacgtagctcgggcgcacgagcaccgggtaaccgatgcggtgggcagcttccttggcctcttcgaggctcagggcggtgccgtaacgcggggcgttcatctccgccttcttgagcacctcgccgaacagctcacggttctcggccagatcgatggattccggggtggtgccgagaatcggcacgccggcggccttcagacgcgcggccaaggacagcggggtctggccgccgagctggacgatgacgcccttgaccgggcccatcctcttctcggcctcgtagatttcgagcacatcctcgaaggtgagcggctcgaagtagaggcggtcggacatgtcgtaatcggtggagacggtctccgggttgcagttgaccatgatggtgtcatagtccttgccaagctcctgcacggcgtgcacgcacgtgtagtcgaactcgatgccctggccgatgcgattcgggccggagccaaggatgatcacggcctcgcgctcgcgcgggcgcagctcggtttcgtcggcgtagcagctgtagtagtacggcgtggcggcgtcgaactcggcggcgcaggtgtcgacggtcttgtagaccgggcgcaggccgtaggtccagcgcagctcgcggatggtgttctcgccttcatcgcccaagccacgcaggtgggccacctgcacgtcggacagaccggcgagcttggccttcttgagcagcttcggggtcagggtctcggcctcgcgcaccgtcatggcggtctcgttgatgaggaagatctgcttcaggaaccacgggtcgatcttggtggccgcgaacacctgctccagcgtggcgccgccccagatggcgcgcatgagctgcaggtaacggtgttcggtcggggtgtggatggcctcaagcagttcggccacttcctcggcggacggcttctcgccatcccagttgaagcccatgtggcgcttgtcgatggaacgcatggccttgccgagggactcctggaagttgccggccagggccatggcttcgcccacggacttcatggaggtggtcagggtggggtcggcgcccgggaacttctcgaaggcgaagcgcggcaccttggtgaccacatagtcgatggtcggctcgaatgaggccggcgtggactgggtgatgtcgttgcgaatctcgtcgagcgtgtagccgagggccagcttggtggcgatcttggcgatcgggaagccggtggccttggaggccagtgcggaggaacgggagacgcgcgggttcatctcgatgacgatgatgcggccggtcttcggatgaacggcgaactggatgttgcagccgccggtgtccacgcccacgccgcggatgatggcgatgccgatgtcacgcagcttctggtattcgcggtcggtcagggtgaagcagggggccacggtgatggagtcaccggtgtgcacgccgaccgggtcgacgttctcgatcgggcagacgaccacgacgttgtcgttgcggtcgcgcatgagctcgagctcgaattccttccagccctcgatgccctcttcgatcaggacttcgtcggtgggcgagtaatggatgccggcgccggcgatgcggtgcagctcctcctcgttgtgggcgatgccggagcccaggccgcccatggtgaagctcgggcgcacaaccagcgggtagccgaacttctcggcgatcttgtcgacttcctcgatgctgtgggcgatgtcggagcgggcggattcggcgccggcctcgtcgacgaccttcttgaacagttcacggtcctcgccacggtcgatggcttccagagaggcaccgatcagttcgacgttgtacttcttcaggacgccggcctcgcccagcgccatggcggcgttgagtgcggtctggccgcccagggtgggcagaagcgcgtcggggcgttccttggcgatgatctgctcgaggatcggagtggcgatcggctcgatgtaggtggcgtcggccatctccgggtcggtcatgatggtggccgggttggagttgacgaggatgacgcggatgccttcctcacgaaggacgcggcatgcctgggtgcccgagtaatcgaactccgcagcctgaccgatcacgatcgggccggagccgatgaccatcacggatttgatgtcggtgcgcttcggcatatcacttaccttccttggagttgttcttcataagttcgcagaaacggtcgaacaggtaggccgcatcgtgcgggcctgctgcggcctccgggtggtactgcacggagaatgcggggatgtccacgcactgcaggccttcgaccacgtcgtcgttcagatcgatgtgggagacgaacaccttgccgtacttgccgttttcaaacggcgcgtcgacctgcttgccgatcggggcgtcgaccgcgaagccgtggttgtgggcggtgacctcgaccttgccggtggtcagatccttgaccggctggttgatgccacggtgaccgaacttgagcttgtaggtgccgaagccgagcgcgcggccaagcagctggttgccgaagcagatgccgaagaacgggtagccggcgtcgagcacctggcgcagcagctcgatttcggggccggcctgttccgggtcgcccgggccgttggagaagaagacgccgtccgggttcaggttctcgatttcggcgaaggtgatggtggagggcaccacgtgcacgcggcagccgcgttcggccatgcggtgcggggtcatgcccttgatgccgaggtccacggcggccacggtgtacagcggctccttgccttcgtactcgccgcatggctcgatggtgtaggcctgcttggtggacacttcgtcgtacaggctcaggccctgcatctgcggtgtgttcttgacgtcttcgagcagctgctcgatggtcttgagcgcgccggtggcctggtcggtcagggcgtcgccggagaagatgccggcgcgcatcacgcctgcggaacgcaggtgacgcaccagcttgcgggtgtcgatgtggctcaagccgacgatgccgttcttggcgaggtcgtcatcaaggctgccttcggcacgccagttgctcacgttcggagagggatcacgcacaatgtatccggcaacccagatgcgggaggactcagggtcttcgctgttgacgccggtatcgccgatgtgcgggaacgtctgcacgacgatctggcgatcgtagctcggatcggtgagcgtctcctggtatccggtcataccggtggcgaagacgatctcaccggtcgtctcaccgagggcgccgtacggctcccccacatatacctgtccgtcttccaaaacgaggactgcatcgtccttgtcatacatcggaattgcgatggtcccggactcgttctggctcaccaaaacccccttatgtttttcgggtattcgtaccaaggttaacggccagcgcagactcacacgccgttgggcgcaaagtctcaccccgctggcggggctgtcggcaaggtgccgacttgagaatgtgtggcgacacaagtgtccgcccatgaaaaagcctcccgaatggggaggctgaacaacaaatgactaatcgaccgtcggctgaatctcagcggacggggcagcgggctcgtcggatgcaccggacgaatcggacgaatcggaaacatcgccctcatcggtcggctcggatgcggcggcatcggaatcggacgattcctcatcggcctcttccgtcacggactccggtgccggtgctgcgttcttggcggtgcacactgcagacagcaggccatggatgaaagcgggcgaatcgtcatcgcacagggtcttggccaatgccagagcctcgtcgatggcgaccttgtccggcacatcatcgttgaacagaatctcccaagcggcgatacgcagaatgttgcgatcgaccacgcccatacggcggaccttccaacccgtggagtgttcgtccagggtcatgtcgatctgacgacggtgctcggccacgcccttgacgatttcaatggcatagtcgggaagcggggtctgggcaccgggatgtgcgatgcgttcgtcaagcagggagagaatatcctgacttttttcgtcggcttcgtacagggtgttcagagcccttttgcgcgcggtggaacgtgccatactgctgctgtcctagtcctttatacggtcggtcgtctgttaaggatgcggagatcagttgttctcgcggccggtgtaggaaccgtcctcggtgttgatcttgacgcggtcgccctcattgatgaacagcgggacctgaatctcggctccggtctcaacggtggccggcttggtgccggcgttggagcggttgccctgcaggcccggctcggtgtgggtgatggtcaggaccacggagcccggcaggtcaacgctcagcggagtgccgtcgtggaaggagaccaggcagtcagtgccttcgagcatgaacttggccttgtcgcccacgagggtcttcgggaccatgatctggtcgtaggtggtcatgtccatgaacacgaagttgtcgccgtcctcgtaggagtactggagggtgcggttgtcgacggtctcgaattccatcttcatgcctgcgttgaaggtcttgtcgacgatcttgccggagagcacgttcttgatggtggtgcgtacgaaggcggggcccttgcccggcttgacgtgctggaacttcatgacggtccacagctgtccgtcgaggttcaggacggatccgttcttgatgtcgttagtagtctgtgccacgttattcacctatttcaaattcaaactagcttaggcaaagcccaaaaattgccttggctattatgccacaccgggtatacaggaagtgaacgctggggtttcccacgtggcccccgactagactggatgaatatgcgatccttcttcgaagccatatccgtgtcctgcgtcatccccgcgcgatcgccggcggatgacgaacgcacggtgttcgacaacctgtccttcagcatggaacgcggcgacatcatcgatctggtgggtccgtccggctccggcaaatcgagtctgctgaccgcatgcgcccgactcaacccgcacgcgcacggcacgttcgtcctcgacggcgtaggcagcgacgaattcagcgcgcagcaatggcggcgggacgtctcctatctgccgcaaaaaccgatcctgaccggcaaggacgtggccgaggcgatccgcctgccctggacgctcgcgattcgaggcaaggggggcagggccgagcagctgctgcccgacgagcgcatccgcacgacgttggacgcgatgggctgcgaggacatcgacctggcgcgcgcgccacatgacctgtcgggcggtcaggcggcgcgcgtggcgttggcccgcacgctgctcaccgacccgaaggtgctgctggccgatgaggtggacgccggactcgacgacgacaacgcgtccaaagtggccgcgatcatggcggacgcggccgcacacggcatggcgatcatccgcatccgacaccgtccgccggacggacgcgccacccgcacgctgatgctcgatgcgggacggctcaccgatctgacgcgggacaaggaggtgcaaccatgaacggcgcctacgacatcgacacctggggtcttgttctggcgttgggcatggtggccgtggcggccatcgtcagcgaactcatgcacatgggcatcggcaggaccctgatgtggtcggcatgccgcgccctcgtgcagctgtgcgccatgggattcatcatcagctacgtgattcgttcgaacagcgtgtggatggtgttcgccctgatggcggtcatgctggtcgcggcggtgcagatcgtgatatcccgcgcgcgcggcatccccaaaggtcttgccgggccgatcttcctgagcctggtcatcacgatgctgctcatgctggcgttggtcaccgagctcatcgtgcgcccgcacccgtggtatgcgccccagctggtggtgccgctgaccggcatgctgctgggcaacaccgtttccgcgcttgctgtcgggctgagccgattctatgaaagcatggaggaacgccgcgacgaggtggatatgatgctggccttgggggcgacggcatgggagtccgcccgcccatccatcatctcgtcgattcggctgggactgctgcccaccaccgcttcgctggcctccagcggcatcgtgaccatcccgggcatgatggcgggccaggtgatagccggcggagatccgctgaacgccgccaaataccagtttgtggtcttcggtgccatcgccgcgctgaccttgctggccgacggtctgatcatggccatggtctatcgcacctgcttcactaccgacgaccaatatcagacgcctaaagcacgatagcctcagtatcgatctcaggccaagcctcaggcgatggtgaccggcgtgccttccggaatttggttgtagaaccattcggcatcggccacagtgagtcgcacgcaaccatgtgaggccggctgaccgagcttgttgccttcctcttccatatactcgccggagttcgccccggtcggcaccgagtggaagaggaacgggccgttgaatcgcacccaataatcagcacccatgccttctgcgggattgtagaagtgatcgcctctcatcccgataacatagttgccgcgcggggtcgtatcgttgagcccggtgctggcgatcatcgtgtagatggtctcaccgccggattgcacatacacttcctgcttggcgatactgactttcacgctgagatcggagtattgcgacaaatcaggctgcttgccggtgggattcgtccatcgcgcacgttgcgcttccttgtcacgctgctcctgaatcgcctggttaaagaccggtacctgctggcggtccaaggatgaggccgatgcagacactcgcgatgccgactgttgcgcggattgactcaccttctgcgcctgcccctgaacctctgcctgcccctgtgcgaccgactcaccgcggggccacacccgttgggcgtcaatcgtcgagaagacggcaagaacgcagcacaacaatgcgcataccgcaaccacaatgcgccgtacaacgtaaattcgttgacgacgaatcctcatccgtgctcgacgccgctcagtcatgtcttccttctcgttgcaaagacttttgccgtaagtattgtagccgcttttacgatacgtcgcgtaccaatatcacgcgcgctattccgctgtcactattcctattccgttgccgtccacttacgtctcagcaacatccacaggccgatgatcacggccaccacgccgagcccgatgccgaacagtcccaaggattgcgccgcgtgcgcggttccctgggattccaacagcacgtcctgcgtgaccaccagcgacagcatcgcatcgagaaggtcacgaatttgaccgacgaatcgatggggttgtgcgtcttatgcgaaatcaccataccgcgaatcgcaatcaagaagaacccgcaacttacgcagcagacggtcaatcgccttaaggaggcgttctggaagctgtatgaaaccaagccgatcgagaagatctcggtgcgtcagatcaccgaactcgccggctacaatcacgccacgttctacctgtatttctcgtccgtgcgcgacgtgcgtgaccagatcgaagacgacctcatcgcccagcgagacctcatattgaagcagtgcatgcatgacggcacactccccagcatcgcaccgcatatgcaaatgccatcgcaatcggaagcagcgcagcagccagcggcatcaccgcaagcccagtagcgaggtcaacccacagctggcggcgcgggaaacaggtcgcgccgcccagtacacgaatccggcgagcttctaccgagtcgcgaggaagaagaaacgcgggaaggggaagatgatgctgccgtccgactgtgtggggtattcctcgcggacttgggagaacacttcggcctcgaacttcttgcggccggcgtcgtcaagcgcctgca

SEQ ID NO: 3244 - DNA, 15240 bp, Unknown
  R53_2m  MAG No. k141_7540
aagctcttctccatggccccgccaatgatgatttcaagggcgatgaggaacagggcacatgcatcaacgaggaatatcggagcgtactgcttgtgaatccgattccatgtgtcttcggatgacattgttgccggcgttttgatgtctaccgaattctgcaaaggcaacgttccgttctttgcatcacgataggccccgaccaaaaacacgccgacgaccacggccacaactacttcgacgataagcatgcgtcaaggatatttctctccccctagactagtaatggtttgaatcccgcctgcccaccgatggcaggtcgattacgcgaggtgaccatatggctccagtggagcgtcatatcgaggaagcgctgtatcgcagtgccgtggaactgatcgagcgaaggtatccgacaggatggggaggcgcggcggcgatgcgactcgccggcaaagacaacggtaaacatgacggaagcaacggctcggaggcacttatcgtcacgagcgtggcgattgagacacccaatgccgccgcttcgctatgcatcgaggtcggagcgatgtgcgaggcgatgaagcttgatcgccgtgtcacccacaccatctgcgtcgtacgcgatgacgaacacgccccgttcaccgtgttgtctccatgcggcatctgtcaggaacggctgcgctattggggcgacgacgtgatgtgcgccgtttcagacaacaatcagggagagcatccgttgttcgtgccgctgcgcgacctgcagccgcaccattggactcaggtgtatccactcgccgaattggaacactacgagcgataagccgccctcgattgaaatccctacctccctaagctatgcagtaggctccgcccgcaagtcacactggtacaattttcaggtttgagactgtagcaagttgagtcgctttatcagtaagtctgtatttggaggtatcgatggcccatcgtccgcttatcggcgtggtcccgttgtgggacgacacactgaatagcctgtggatgctgcccggctatttcgacggcatcatcgaagccggcggcatcccggtgatgctgccgctgaccgacgaagagactacaatcgaacagctggtcagccaatgcgatgggttcctggtcaccggcggccacgacgtggatccggaacggtatggcgaggcggccggccccaagacggtcaaactatgcaaggcccgcgaccggatggaggagcgtctgatcccctccgtcatcgcggcggacaagccattgctgggcatctgccgcggcatccagagcctcaacgtcgccttgggcggcacgttgtggcaggatctgccggacgagcatcccagcccggtcgtgcatcatggcgacaagccgccgtatgacccggtggtccacgaagtgtcgatcgcgcccgattcgccgttggcccgcgcgttgtggccgctgggagacaatggcccgagtgaggcggaggccgatgaggtcgattccttcggcaggccgtatcatccgcgcgcctatacgctgggcgtcaacagttatcaccatcaggcgattcgcacgctgggccagggactggaaccgatggccactgcgccggacggcatcgtggaggcggtctggatgccggccaagcgtttcgtctgggccgtccaatggcatcctgagttctctcaccgcgccgatagcaaccaacgccgcatcctcagcgccttcatcgacgcctgctgacgcaagctcccgccaatctcgacgaaacgtcttccaagaaatggcttgcccgcatccgcagccccctaccacgacatgagcgcccttgacaacgtcaccctcggcatgcgcttcacccgtgacagcaaacaggtcaggcagcgcaaggccaaggccatgctctcccggctcggactcggccatgtcgcgggagacaagatcatgaccctctccggcggtgaacagcagcgcgtcgccctcgcacgatgcatattgaagcccggggatttgatcctcgccgacgagcccaccggcgcgctcgaccgcgatctcgcccaacatgtcttcgacgaaatgctccgcctccagcacgaatacggcaagaccctcatcatcgtcacccacgatcttggcatcgccgcacaatgcgacaacaccatcgagctacaggcggtttgacggagatattccggcagctttggtctaccgaagtcacgtgttgcccttcaatctcctcggaaatctaggtggcccatttttcaaagaatgcgatcggacgtaacgccccgtaaggagacctgcaatatgaaacgttgaatcgtcatctaaagatgacgttttcgtagatcttccggaatcgccagtcatctgcgatccggatatggcaccggtccggctcgatcgagcccggacgaccatggagaaaacgaacgatcgaatccgaacgcgggtaaagagcctgcgcgacaccattgataaagccaaatttaagaaaacagatcagtatgcataagttttacatgccttcagcctcgtcaaccggcagcgggccccagaatccagtcacagccaggcagagcgtacaacatactgcgtagtacatggcgcgaatcccaatgaccaccatcgattgatgacggccacgaatactcgtactcagccttactgctttggctcatttctgttcacttcacgctggagtaccgagacacgttgagcggaaataccggtaattcacgtacggttaccgaccattggcctgaacggtactcagcatccgcagtcacttggggtatggtcatgacggagagccatcatgaccgatctctcattattctgggatgaatccggcgaggctggaactgaatctaaatattaaaacgcatgatgcacacgttgcggaattagtccaccagaacttcggcatgctcggcaggttcagcgggttcgatgtgacgggcacgcatggcatcgagggcggcggccaggtcggccgggtactgggaccggaccgtggtccagacgcgggtgcgaggatggcggaattcgagcttcatggcgtgcagccactgccggtcaagtcccaaagcttcagacagcaccggattggcaccatacatggggtcgccgcacagaggatgcccaatcgaggagaaatgcacgcgaatctgatgggtacgtccggtctccagattcacggataccagtgtggcctcatggccgaaacgctccaacacatcccaatgcgtaacggccggtttgccggccggagtcacgcagaagcggaaatcggacactttggcgcgcccgatcggtgcctcaatggtcgctttgttctctttaagaccgccctgcacgagcgcatgataggttttctttacctcatgctcggcgaactgccgacgcatctcggtgtacgcaaggtcggacttgcacaccaacatcaagccggaagtgcctacatcaaggcgagaaacaatgccttcacgcccggccgcgccataggaagcgatatgcacgccacgatcacgcaacgatcccaataccgtgggaccggtccagccaaccgaggcatgcgccgccacgcctacaggcttatcgactacgacgacatcatcatcttcgtagacaacagccatatcagttgcgataggctcaggcccggcctgttcctccgccaaatcaaattcgacggtctcccccgcctgcaacgtgctggaccgcgcaacttcacgccctaaaacgcgcgcctgtccggagtcaaccagatcggcggctttagatcgtgaaatacccagcattttggccacggctacgtcgaaacgcttacccaccaatgcatcgggagcagggaccattcgactcattacttggcgtccgcctccggctcagactgtagggattcgtcggattgctcgataagatccttgtgggagaacggctcccccataagaatcagaatcaccaggaccacaccggcgactaccagatagatatccgccacattgccaacggaccagccatagttaaggaaatccaccactttgccgttgaggaagccgtcagcgtacataacacggtcaatcaggttgcccagagcgcctgcaaacgcgaaagaaagcgccaccgaccatttcatggagatagtgcgcaccccagccacagcaagggccacgcaagccacaacggccaacagactgattacccaagtagcgcctgaccccatgcccaaggacgcgcccggattacgcaccaaggtgaaggacaacagtccgggaatcacgcgaatggtctgaccgttggataacgcggccatcgcccaagccttggtgagctgatcgacaatcagcgcagccgcggccacacatgcaaagacggccacgcgagtgcgcagccgtccctgttggttcgtcatacgacctgtacctgcctgcgctcagttggtcttggacgaggtctggtcgacgtagttgttcgactcggaaacctgcgatgccagctggccgaggtactcggtgaggcgagcgcggtattcagtctcgaactgcttgaggctctggatgttgccctcgacgaccttggactgagcctgaaggttgtcgcgcacctgctcggcatacgtatcggctgcagagcgggtgttcttgtcgtacgcatcagctgcggaacgagtgttcttgtcatactcggcggcacgctgctgcacttccttctcgtagttgtcagcgtcatcgtgctgagacttggagtagttgtccgcatcctgacgagtcttgacggagtatgcgtcggcctcagaacgggtgttctgggagtaggtctcggcatccgcgtgaatctggtcacggtaagcgtcggcctcggagcgggtacgatccgaataggtgtcggcgtcggaacgagtacgagtggagtagtcgtcggcctcggagcgggtacgctcggagtagttgttggccttggtgaccaagtcgttgtacttgttctggctggcctcggtgatttccttggccttgttcttgcccttctccacgtactgatcgtgcagctgcatagccagagtcagcatggcggtggcgcgctcgggctcggtgcccggcatggaagcgacgccagcgatcttctgcagagaaccggtctcagtgctcggctcgaccttggaaacctgggcacgaagctggttttcacgctgcttggcttcttcgagctgacgagacagttcagcgatctgagcggactgctgctgagcggcggaaccctcctgctgagcagcggcgagctgacgggacagctcctcgttggccgcgcggaactgatcacgttcctgctgaatggcggcgatctgctggccgacggcttcctggttaccggaggcctgagcggcctgggcggtgagctgatcgatttgagcgttcagctgatcgacctgacccttgagttgctcattctgggaggaccgcgcgcggttggattcctcggcttcgctgagcttggcagaggcaagctgtgccgcctgatcattgccagcctgagcggcctgctgggcctgagccacagcgttcttcaaaccagcattctccgactggagttgctgcacctgaccggtaagatcggagatcttcgcattaaggttggtcacgtcagggcccagagactgagtggcctgaccgccggctaccgcctgacgtccaagagcctcgacggtttccgtgacctgatcaaggaagtcatcgacctcgtcgacatcataaccttccttgaatcgaacagtctggaaggtatgctccctaatatccttcggcgtcaacagagccataaatcttgcacctcgctttggggcattgcccgcacttacgttggtctcaagtcagaatgctatcacgaccccatcgtttcagaacattcaacgtgggtttttatgccagatatatgcctccggcgggtcaaaaacggcctcagaacactatcagaacaacactttctagtaccaccaacgcaaaatacagcacgatgaagctgacatcaagataaatcgagccgagcggcaatggacgaatatagcgacgtagccagcgcagagggggttcggtaatggaatacacaatgttgatcagctgggccaccacaccacgtggataccagtttcgtgcgagaacggagacccagtccagaatcatgcgcacgaacagaaccgtgatatacgcgttgatgagccatgcaagaatgcggccgatcagagagaacactaaggaaagcatgctgacagactaacaaccgcgcatgaaaagtttgctcggagcgcaataagaatcggccgactccttgctgggagtcggccgaataccgatataacgtcgaatgcgaaaactactgaaccggtcagtcagcgaacaaatcgtgtgccgaggttggttttgtcggctcttcgaccttgatgttcacctgcgccgggctcaacaggaacacgcgcggagtgacacgctcaagggaaccacgcacgccgaacaccacgccggcggagaagtccacaatgcgatatgccacggcttcggccacaccggtgagattcagtacgaccggaacaccgtcacgcaatgcgcgaccgaccagctgagcatcctcatatgacttcggatggatggtggtgattctgttcacgcgaccaccggggaacggcttggtagtcgacgatgcggcaggcgcggtggttgatgccagcggcgtgaccgtatggtcggaatcgaatgcggacttcggagccggcttctgctcctcgtcctcttcgatgtagtcgtcctcatcgtccacaacgtcgctcatgcccagataggacatcgcgtttttcatgaacccagccatggatcagtcctttcagcgcaggaaatcaggaatgtcgagatcgccggcgggatcgttcacggcgatgttcggatgcgaggtagtcggatcgtcaaagggcagggatgccgggtctgcggtcgtcggggtgaattccggacgcggagtggccacgggctgggcggccggagcggcggcgggctgctgcgtttgcgtggcagccggctgggcggccggtacggcaattgccggagcggcggcagagggatcctgcggtgtaaccggatcgaaaccggccgcgatgacggtaacacgcacttcgtcgccataggcatcgtccagagcaagaccccagatgatctgggcctcggggtgaatggccttgcgtacaagctcggtggcggcggaagcttcctgcagcttcagatcggtcgggccggcaatgttgatcaacgcaccgtgggcaccctcgatgctctcctcgagcagcggggagctgatggcgatttcggcggcctgggtggcgcggtcttcgccccgcgcggaaccaatgccgaacagcgcagtaccagcgccacgaagaatggagttcacgtcggagaaatcgacgtgaatgtaggaattcatcgaaatgaggtcggtgatgccctgcacgccggcgaggagtgcggtatcggccgtcttgaaggcttcgatgatgccgatggaacggtcggaaagctcaagcaggcgatcgttcgggatgacgatcagcgcgtcgacttccttgcgcaggttgtcgatgccgtattcggcggaagcggaacgctgaggaccttcgaagctgaacggacgagtgacaaccgcgatggtgagagcaccttgctgatgagccgcacgagcgacgatcgggctggcgccggtaccggtgccaccaccctcaccgcaggtgacgaacaccatgtcggcacccttcagggattcctcgatatcagactgatgatcctgtgcggccttagcacccttctccgggtccgcgccagcgccgagtccgcggctggactgatcggacagggagattttcacgtcggcgtcggagcgcagaagatccttcgcatcggtatttaccgccacaaattcaacattctgcagtccctcggcaatcatgcgattgacggcattaccgccggcaccgccgacgccaacaaccttgatgttggtcttgtcgttgaactcattctgcgcgatctcgctcacgtttggctcctgtcacttcacggttacacccaagagtagcgcaaacaggctactcttggagggaaattcacgcgcagaatggcgcgtgttgcgtgtattttcagtattttctcagtaactggcgtccattgggtcgtcaccgaagagcgcctcacgctcttcgtgggtggtggtacgcgattccaaccacccatacggcaagtgcaccttcttggcgaaacgcacgcggccgcgcggtttgtcgaccacgcgtggcgggtattcgatggtcgggtcgagcttgccgatctcgcggtccacatcggccaggctctcgcattccataaaggccttgcgggtggacccacccaccgggaaccctttcagataccaggcgatgtgcttgcgcagatcgtggacggccatcatctcatcgccctcatagaactcggtaagcagctcggcatgacggtgaatcacccggcagacctcgcccagattcgggttgagccgttcggtattgccctcgaaggcgtttctgatgttggcgaacagccacggccggccctgacatccgcggccgatggccacgccgtcgcagccggtctcgcgcaccatttcgagcgcgtcctcggcgccccagatatcgccattgccgaataccggaatgttgaggtgttccttgagctcgccgatgcgggaccagtcggaatgaccgccatagtattcggcggtggtgcgggcatgcagggttacggccttgcagccctcctcctgcgcgatgtgtccggcttcgaggaaggtctcatggttatggtcgatgccgacgcggatcttcgaggtgacggggatgcccgccggctcgcatacggcgaccacgcgctggatgagctcggtgaagatgtcggttttccatggcagggccgagcctcccccgcgacgggtgaccttgggtaccgggcaaccgaagttcaggtccacatggtcggccatgttgccgtcgaccacgattttcgccgcctgttcggtgatggacggattcacgccatacaactgcagcgaacgaattttttcgcttttggcgaaatggcagagacgcagggctttcgggttgcgcgccacgagggcccgcgcggtgaccatctcggccacgtaaagaccatcgggaccgtattcctcgcagatcacgcggaacggccagttggtcacgcccgccatcggcgaaagcaccaccggggtcggcacggtaatgttgccgagctgcacgggggcgatgtataccggagtctcgggccgtgccggcgcgtccgtacgcgggtcgagattgttggtctcgtgagtagcggtgatggtggtttcggtttcagattctgccatgtggttcctgttctgaaatagttttggctcccctcagtccacttcgtagacagctcccctcatagaggggagcctctatacagacccgtctttagtacagaccgccggcttcctgaacgccggactcaggccaagcctcgccgcccatttccacgggcttcaggggcacgcgggtgcgcttctcgccgatgcgggcggccacgtaatcggccaccttgtcaagagcgacgcgctcctgggccatggtgtcacgctcacggatggtcacggcgtggtcctcgagggtgtcgaagtccacggtgatgcacagcggggtgccgatctcgtcctgacgacggtaacgacgaccgatggcaccggactcgtcgtagtcgatcatccattcgttgaagcgcaggtcgtcggccaggttctgggccacggtctgcagttcaggcttcttgctcagcggcagcacggcggccttgaccggggccagacgcgggtcgagacgcagcacggtgcgcttgtcgacgccgcccttggtgttcggggcctcgtccacatcgtaggcgtccacgaggaagcacatcagggaacgggtcagaccggcggccggttcgatgacgtacggcacgtacttctcgccggtggcctggttgaagtagctcaggtcttcgccggagtgcttggagtgcgcgctcaaatcgtaatcggtacggttggcgatgccttcgagctcgccccagtcggaaccttggaagccgaacttgtattcgatgtccacggtgcgcttggagtagtgggagagcttctccttcgggtgctcgtagtggcgcaggttctctggcttgacgccgaggtcgatgtaccagcgggtgcgggcgtcgatccagtactggtgccattcctcatcggtgccgggcttgacgaagaactccatctccatctgctcgaactcacgggtgcggaagatgaagttgcccggggtgatctcgttacggaaggacttacccatgttggcgatgccgaacggcggcttggaacgggaggaggtcatcacgttcttgaagtcgacgaagatgccctgtgcagtctccggacgcaggtagtgcaggctgttctcgtcctcgaccgggccgaggtgggtgcgcagcatcatgttgaagtcgcgcggttcggtccactggccacgggtgccgcagttcgggcagacgatgtccttcatgccgttttccggcatcttgtcgccgtgcttctcggcgtaggattcctcgagcttgtcggcgcggttgcgcttgtggcagttgaggcactcgacgagcggatcgttgaacacgctcacgtggccggacgccacccacacttcgggcggcagaatgatggaagtgtcgacaccgacgacatcaggacgggtgacgaccatggagcgccaccattcacgcttgatattgtccttgagagcgacgccgagggggccgtaatcccaagcggaacgggtgccgccgtaaatttcgccggcggggaacacgaagccgcgacgcttcgcaagggatacgacttcatcgagtttggactgagccacaatgcaccttctggtttgaacggtttggggtctaataacaaccgcttcaggatagccgtatacggtgacaggtcaggcggcattgtccggtatatgttccgcgtctcacgagcggccgttcgcagcgattcctatatcgcaaacacctccatattgttcctgttgttttgcccttccccaatttgtaccactgacatcgcgttagcgtcacaaattcgggagatgttgctcggcggaggcgtccacatatcacgaatggacgggacgcgccagacctgacgacacgtatcgaacaaatccgtcacgataatgtccatgttggcgcatagcgtcggcactgtagtgcagggggactcgcatgtggttcgcgagttgagaaaggcctgagcctgacccttagaacctgttggttaagaccatcgtagggagcagtaaatgagcaatagtgcatcatcgtttgccgatgtgtccagcggttgtaccgccgggactccggttccagccgattcacccatccgcgacaatatcgccgatgccgttcgccgcgtacgcgagacgactccattggcccagtcattcaccaattttgtgaccatcaatttggtcgccaacgcgcaactggcggccggcggcactgcggccatgagtttcctgccggacgacgtgatcgaaaccgcgaaaatcgcgggcgcgaactacatcaacgtgggcacgctgctgccgttctataaggatgcgctgcccgaaatcgcccagcgactcaactacttggacaagccgtgggtgctcgacccggtggccgccggcatcggccacacccgcaccgccattcttcagaccttcaaggccgctcccccgaccatgattcgcgcgaacgcctccgaggtaatcgcgctggcgaacatgtgggggctcaataccgaaaccgtgggggacgcttccgagcaccgccccgccggagtggaatccgtcgacgacgtggagtccgcaaccggtgcggcggtggcgctggcacagtatctgaccgaacagcacgccaagcattcctcccatgacgcttccacccgctgtgcagtggctgtgtccggcatcgccgatctggtgaccgacggcgaaaccgtgtaccgactgccgggcggcagcgcgatgatgaccaagatcatcggtgcaggctgctcgctgggcggcgtggctgccacatatctggcggtttccaatccgttgaccgccgctctgtccgcatctctgctgtacaaccgcgcggcagagatagccgatacgacttcgcacgggccgggctcgttccaggtcgcgttccttgacgcgctgtggaatgttaccgccgaacaggtggcggaatccgagattttggtgcagtagtttcagttccctctgatgagggagctcataacagtttttcccaataagacttccacaagaaacaacaaaggtaggaataataatgagtaatgaatacccatacgcctccatgcgagacaacttcgacttgtccgcgtacttcgtggtggggccggaggactgcaaaggccgtccgctgaccgacgtggtggatcaggctctgcgcggcggcgcaaccttcatccaactgcgcgccaaggaggccgatgcctctgagctgaccgacatggcccgcgacatcgcgcagatcatcgaggacaatgagaagtccgattccgtggcctttgtgatcgacgaccgtgccgacgtggtgtggcaggcccgccgcaagggcatcaaggtggacggtgtgcatatcggccagaccgacatggagccgcgagaagcccgcgccctgctcggcgacgaggccatcgtgggtctgtcggctgagaccgaaagcctcgttcagctcatcaacgagctgcccgacggctgcatcgactacattggcgccggccctctgcacgtctccaccaccaagcccgaggcttccgtgggcggcaacgacggctccggcaagacactggacgccgcccagatcaacaccatctgcgctgccagcgaattcccggtggtcgtgggcggcggcgtgaccgcagccgatatggccatgctcgccggcaccaaggccgccggctggttcgcggtctccgccatcgcgggtgccgagaacccggaagaggccgcgcgcaccatggtcgaaggctggaaggccgtccgcggcgacaagaagcacggctatgcgccgcgcgtcgtagcccacacccccgctgctgatactcaggctgctcaggaaggggccgcaaagcctggctccgaggccactgagaagaagttcaccaacgccaaggacgccaaggatgcccagaagctcgccaagcagcagcgcgtggacatcgccgcccgtggttccaagcagcgcgacaaggcgcacatccgcaagaccaagtccgtaccgttcacctatcagtatggttcctacgacctggaagtgccgtacaccgaaatcaagctgagcgacacgcccggcgtgggcccgaacccgccgttccacgactacaacaccgaaggccccaagtgcgacccgaaggaaggtttgaagcccctgcgtctcgactggatccgcgaccgcggcgacatcgaagactacgagggccgccgccgcaaccttgaggatgatggtaagcgcgccatcaagcgcggccgcgccaccaaggaatggcgtggacgcaagcatgagccgatgcgcgccaaggaccacccgatcacccagatgtggtacgcccgccacggcatcatcaccccggagatgcagtacgtggccacccgcgagaactgcgatgtggagctcgtgcgctccgagctggccgccggccgcgcggtgatgccctgcaacatcaaccaccccgaggccgagccgatgattatcggatccgccttcctgaccaagctcaacgccaacatgggcaactcggccgtcacctcctccatcgacgaggaagtggagaagctgacgtgggccaccaagtggggcgccgataccgtgatggacctgtccaccggtaacgacatccacaccacccgtgagtggattcttcgcaactcccccgtgccgatcggcaccgtgccgatgtaccaggccctcgaaaaggtcgaggatgatgcctccaagctgagctgggagctgttccgcgacaccgtgatcgaacagtgcgagcagggtgtggattacatgaccatccacgccggtgtgctgctgcgttacgtgccgctgaccgccaaccgcgtgaccggcatcgtctcccgcggtggctccatcatggccgactggtgcctgcgccaccaccaggagagcttcctgtacacgcacttcgacgagctgtgcgacatcttcgccaagtacgacgtggcgttctctctgggcgatggcctgcgccccggctccctggccgacgcgaacgacgccgcgcagctttccgagctcatgactctgggcgagctgaccgagcgcgcctgggccaaggacgtgcaggtgatgatcgagggcccgggccacgtgccgttcgataccgtacgcatgaacatcgaactggagaagtcggtgtgcaagggcgccccgttctacaccctcggaccgctgaccaccgataccgctccgggttacgaccacatcacctccgccatcggcgccaccgagatcggtcgttacggcaccgctatgctgtgctacgtgaccccgaaggaacacctcggcctgccgaacaaggatgatgtgaagcagggcgtgatcgcctacaagatcgcctgccacgccgcagacatcgccaagcaccacccgcacgcgatggatcgtgacaatgcgatttccaaggctcgcttcgagttccgttggctcgaccagttcaatctgtcctacgatccggacaccgccatcgccttccacgatgacaccctgcccgccgagccggccaagatggcgcacttctgctcgatgtgcggcccgaagttctgctcgatggccatctcccagaacatccgcaaggcattcggtggcgaggccgctcagcagcagatcgtgaaggaggctgctgctggcatcgactccgaggcactggctaaggccaaggccaatgtcgataacgacgtggtgtccgccaacgtgctcagccccgaagaaatcctcgccggcatggatgcgatgagcgaaaagtacaccgcccaaggcggcaagctctactccaccgcccaggagtaatttttctctggctcccctcagagagggg

SEQ ID NO: 3245 - DNA, 5201 bp, Unknown
  R53_2m  MAG No. k141_7619
ctggttgcaatacgtccgatagatcacggccctcatcagtggcgagaattgcttttgcagcacgacgtacatattcatcccaatcgcaatcaggtttccccttagaagtgaatccactccgtaccttaggaataccggccaacgcatcagaaaccgatacgccctgcctcttctgcaaggtacggggcttgccacgttcctcatcattacgaacaccaagaagaattacgcgatgacgagcctgaggaatgccataacattcagcccttacgatgaaatccttgggggtctcaggctcatcaaccactagagagtgcaacgtgtaaccggcatcctgcatatcttgttcgatatgtgcaaatacgccctgatgacggtgctgagcagaaaggatacctttcacattctccataacgaagattgtaggatgtagttcctcgatgaatcggaggtaacacttgtaaagcgtctgcttaacatcattatccaaggcctctttgttccgcgttctccgtgcacgtcccacaagagaatatgcttgacaaggtggtccgccgataagtacaagtgggccattgtagttatcaccgcaacgagccttcaacttgtccttggccatattcacaaaggtgtcatcaccttccaccaaagtaccttgaacagcttcttcatcagccgcagcccacttatccggatattccagctgcatggcttggaaattgtaagctgatggattatcaagatagttcaggtagcttttcggcaactgcccatcagacttcatgattttacgtacgaacgagcgcaaccgtaaagtgtcatgtgcgttcttttccatttccaccgacatacaaatctggaaaattggattaccggccggatccttgagcgacgaaaaaccctcgccaagccctccggggcctgcgaacaggtcaataatcggtataacgctcacgtcatcctcattccttcaatgaatactctctgtcagcggatggtccaaaaaagagcgtaccaggaatattcagcacgtgatgactaccgctcacatgttcctgactatctgcagtgtccacggaccgcgtcctttcgtagaccaccgcaagcaaccacggcaacgacgctaatgggccaagcgctggcaacttgacgccgccaaaaggctctcagcggcgtttgccggccaaaacctggcaggttgacgacagtggggacaccgatttgagctggcccggctgaccatcagctccgcaatcggacggcggcggccattccaccgtcgccataggtggggtgggtcatgaaggcttggctggcggaggtgtcaccgcacatcaacgattcccacatggttaagcggctcatggagatggcttcaacgccgaggatggcgtcggcgatgtgcgcggcgtagagatcgcggtgcttggcgatcaggaagcgcatgagatcgaggcgcttggtcatgctggtcacgtttgaggaggccggggccgtgcggtactcgatcagcggctcgggggcgatgccgatatgggccgcgtcttttgcgggattctctgtatcccaggcactcccaaaacctccgacatgctcagtaccgccagtaaccccagcaccgcagatatcgttttccaccgtcaatccgcactccaacaacgacaggaagaagtcccagtcctcgaagccgccgcgcatcgactcgtcgtagccgccgcagcactcccacgcgacacggcgaatcatgcacgtggccgggcagcaattatgcgacacgaacgcggcggcattgccaccagtcggctggaccactgattccaggacaccgaaagtctgcagccagccgaatgcggcgaccatcgttttgtcggcggacaacatcgacaacgtgcgctcaatgaaggccggccgcaaacggtcatcgccatccaacaccactacgaacggcgtttcggcggcggcgatgccacggttgcgcgcggcggaaggaccggcgtttgcctggccgatgaggtcgatggccacaccattcgcatccatcgccccgtgccggcaatcgtcgagagtggcgttcagcatctcgacggatgcgtggtcatcggacccatcgttcacgatgatgatccgttccggacgaaccgtctggggccaatgacgactcgactgcctcgtgaatcaacgggccctgattgtagctggtaattaccactgtcactgctgccatggcggcaagtctatcgggtccggacgtgggccatccaccggcgctgcgcgctgcctcccgccagtggggaggtggcgcgctatccccggctaacgctgatgcatgtgtgcgggcacgggtttggtgcggactttggtggtgaagtagtcggactcaatcttccacaccgtgacgctgcggacctgcgcatcagtgaattccacattcggcatatgcgcctgctgcgccatcagcgtctgcaagccgtggcggcattcatccagatcctcgaccagtgacgccgtgccattgccgacgatcgacttgaacgcctcaccccaattgcacgtggtgcggcccgccaccacctcgcagtcggtctgcatggtgaaagccacgggcagtcggccaccggcggcggcgcgaatcgcgtcgagcttgcggccgcgcggcgcggagtggaaccagagcgtcagcttgccagtcgcctcgtcgtaatcaaagccgaaattcagcggcacgatagtcaggccctcggcatccgcataggccacttcaacgatgtcgcaggcggcgatgatcgcggcgatccgctcgggatcggtcacctcgcggtccgcacggcgcatcatgcgatgctcgccggcgaccgtgtgctcatcctcacgcttggcgggcttgcgagcgcccgcgatattctccatgctcatgcctgatcgtccccatccacaaccgcaatccagtcgccgtagccttcctcggccatgcgcgagcgcggcacgaagcgcagggcggcggaattcatgcagtagcgcaggccgccgcggtcggccgggccgtcggtgaacacgtggcccaagtgaatctgtgtgtccgacgtgcgcacttcgatgcggtcgcggcccggaatgcggtggtcctcatgctcggtcagcaagtcaccggcaatcgggcgggagaacgcgggccagccgcagccggaatcgaacttgtcttgcgacgagaacagcggttcgccgctgacgatgtccacgtagatgccgggctcaaactcctcgtcatactcgttgacgaacgggcgctcggtagcggcgttctgcgtgaccgcgaactgctcaagcgtcagatcccagatgcgttccacgtacttctgacggcgttttacgttcgcgattgcggcgatcggtacatggcagtagccgccggggttgttcaccagatagtcctgatggtgtgcctcggccgggtagaagttgcgcagcggttcgaccagtacggccgggcgctgcggctggcggtcgaccagctgctccagagccgccacatacacggcgcgctgcgtctcgtccgtgtagaacatgccggtgcggtactgccggccgcggtcctcgccctgctggtccacggagaacgggtcgatgacctccaggaacagcaatgtcagcgtccgcaggctgacctgtgccgggtcaaactcgactttcacggtttcggccgcatcggtgccgcccgcgcatacctgctcgtaggtcggcgattcgacggtggattgcgcgtagccgaccgtggtatccgtaacgccgtcgacgttctggaagtagcgctccagcccccagaagcagccgccggcgaagtatgcggtttgcgtatttccgtcattgtgttcgttacgttcgctcatacgccccacgttactacgtcgaggcggctcgcgatgcagtcaacgacacctctgcaccggcaaaaccgctttcgaggggctgatttgacccccgccggaggtctactcccgtttcaaggggctggtcggccgctagaccgcatgtaaaaacccatccgcgccaacgccattccgccgattttggagcgtgaatacttcggcatcagcccctcgaaacgggagtagacctccgggagagaccaaatcagcccctcgaaacggagatagcgcttgccgcgccctccttgtcaggctttctccgttcaaagaggtacattcgggcttctgcagaatgctatcttcgttcaaagaggcaccgaatacgggaaaccccgagtacaaacgttgtcattgcaacgctcatactcgagatctcagagttcaggcacctctttgaaggcagttagttgtccgcaaggggccaaatgtacctctctgaaagcagataccccgtctcaggctcgaatcggctaacctgcgtacccgtgtgcacaccttcacgaccgcagcgtgctgagcatgccggccacttcggcgggcgtcacgctgggcacgtaggcgcgcaccaccgcgagcccgatctgcggcaacgccgccgggtccgggtagcacacgtagaccggcgcttcggtgggctggaacttgcgcttgaagttgaacagcgagtggaagccgtaggcgggttccatccagtcggccacgatctgcagcgcgtgttggagcacctgcgtgccttcgctggccggtgccccgtcctccccggcgttgtcccgatcgggattcatgccggccaggggcgccgcggacaggctcatgaactccacggcgtgcgtgggatcggcttcgccctcgtcacgcagccgctcggccatgcgcgcgatcaggaactccatgatgccgttggggctgtcggtgcgatggcgcatgaaatccaacgtccagccgacgatgcgcccgtcgcgccaggtgggcaaccagctggtgacgcccagcacgcgcccgtccgcgtcgatggcgtaaagcagccgcacgcgcgggtcgcgcagttcctcgacgccgccgagcgtgaacttcatttccggcagcgccttgagctgcgcccactcctcggagatgtcctcgatctgttcgcgcacatcaagcgacgcttccaggaatgtggactgcacgtcggtcacgccgtcgcgcttggccttgttgatggcggtgcgcacgtcctgccatttcttgccggtcgtcttccagccgcgcgggtcgaccaccatttcgctgccgacc

SEQ ID NO: 3246 - DNA, 2841 bp, Unknown
  R53_2m  MAG No. k141_7641
tcgttacaaacatgcgctatgactaaatcatcttcacaccatctatcaggaggaagcatggccaaaatcaaggtcgaaggcactgtcgtcgaactcgacggcgacgagatgacccgcgtgatctggaaggacatcaaggatcgcctgatcctgccgtacctcgacgtgaacctcgactactacgatctgggcatcgagcaccgcgacgagaccgatgaccaggtgaccatcgacgccgcccacgccatccagaagcaccatgtcggcgtcaagtgcgccaccatcacccccgatgaggcccgagtcaaggaattcggtctcaagaagatgtggaagtcccccaacggcaccattcgcaacatcctgggcggcacgatcttccgcgagcctatcgtgatgagcaacgtgcctcgtctggtgcccggctggaccaagccgatcgtcgtggcccgtcacgcattcggcgaccagtacaaggccaccgatttcaaggttccgggcgccggccagctgaccgtcaccttcactccggacgatggctccgagccgattcagcacgtggtctacaactacggcgaagacggcggcgtggcccaggtgcagtacaacgtcaacgattcgatccgcggtttcgctcgtgcctgcttcaactacggcctgatgcgtcattacccggtgtacctgtccaccaagaacacgattttgaaggcctacgacggccaattcaaggacatcttcgctgaggtgttcgagaccgaatacaaggacaagtacgccgaggccggcctgacttacgagcaccgcctgatcgacgacatggtggccagctccctgaagtggcacggcggttacatctgggcctgcaagaactacgatggcgatgtgcagtccgactccgtggcccagggcttcggttcgctgggcctcatgacctccgtgctcatgaccccggacggccagaccgtcgaggccgaagcggcgcacggcaccgtgacccgtcactaccgccgctggcagaagggcgagaagacctccaccaacccgatcgcctccatcttcgcgtggaccggcggcctcaagcaccgcgccgatctggacggcacgcccgaagtccgtcacttcgccgagacgctggaaaaggtcatcgtcgacaccgttgaaggtggtcagatgaccaaggatctggccatgctcatcggcccggacgaaccgtggctcgacaccgacggcttcatgaacgcgctggacgagaacctggccaaggctctggccgagtaaatcatcgaacacatcgtacggacctacatgggtcatgtcatgtcgccaactgtcatgattgtcgtgcttcatctggaatgttcctcagcacgacaatcatgacagttgttcgatacacgcgcgaaatacccctaattgttcccggatatgtggcgatttgtccactggtccgggactttttcgtatacggcctactagaatcgtgattcagtttgttttcacgcccgcttgaggaggtttcgccgcttatggtgttcgcacgccgctcaaccaccctgctcgccgccattgtcgcatcctgcgcgatggtgctgtcactgaccgcgtgcacctcagacaataagaccgttgtagatggtcaaaccacggtgacgtccaattctgccggcggcgtggccgtgttcacgccttcggacggcattacgctgaatcagcagacgccactgaacaaatgggcgaagctggtgcccgacctaaccaaggccctggtcgacgccggtttcaagaaaggcgatatcgatcatacgacgtccgactcgttggacaagcaaagccgcgccatccaagactttgtggtcgatcatctttcgaataacaccacggacgattccggcattgccatcgcgcccgacaacatgacattgctcgtggctccagtagtcgaggccgacgcttccacttgccaatacggcgattacgtcagccagaacctgagcaccaacgatgccacggatgagggagctacttctgacggtgattcttccgaagacagctcttccaaagatgactcgtccaacactgagagcgacggcactgcatcggacgagcaggcgcaggccgtggaccggctggtctcatcgctcaagctggccaaggaatccggcatgcatgtggtattgctcggcaacagcatcgaggggtataggccggacgccttcgtcaagttctcggacgcccagaccatcggcaagctacaggcggaaaagatggtgtccaaactcaagttggataaggccagtaaagacaaccccaaatacattgaggtgctgctgccatacaccgccgtggacgaaaaaggcaacgccaacgattccacgttcgcccaagaggcgttccgtggtatctggcaggtactgggctcctactatcagaagggcgttgtggaaagcccttcaggcaccttggacggcaaatccacggaaaacgattggcaagccgtggcctacgatgccgccaaggaaggctccactgcgaaagtgcttgacaagcgtctggcaaaaaccgacgggcagtccacactcacccgtattgacggcatcatcacgatgaacgactatatcgcctccgaggtcgtcaaggaattggacgatctgggatacaccggctctgccgccgatatcaatccgcagatcaccatctcgggcattgtcggcaatatcaccggcaagagggatctcagccgcgacgcagtgccggacccgatcaaatcccctgaaaacgacaacgcaaacgactcatccagttccgatgacgatgcggataaggacacctccgcttccgaca

SEQ ID NO: 3247 - DNA, 6087 bp, Unknown
  R53_2m  MAG No. k141_7786
aagctttcgcctgacagctcccctcagggaggggagccaacaattattgaattattgcttagttgctcacttggcggcttcgacttcggcgatggaggccttggcggcttccaccacgtgctcggcggtgatgccgaggtcgatcatgttctgagcgccgtcaccctgcaggccgaactgctcgatggagacaggcttgccgtaggaaccgaggtacttgtaccacggcatggcaacgccggcctcgacggagacacgagccttgacagcggccggaagcacagcctccttgtactcggcgtcctgctcctcgaaccattccatggacggcacggacacgacgcgagccttgacgccctcgccggccagggtcttggcggcagccacagcccactggacctcggaaccggaagccatgaggatgacgtccggagtaccctcggtgtcgaccaggatgtaagcgcccttcttgacaccgtccttggccttggcagcggtctcggcaagaaccgggacaccctgacgggtcagaaccatggcgccaggcagggtgttcttcttctcgaagaagtaacggtaagcctcggcggtctcgaaggcgtcggccgggcgaatgacctcaagctgaggaatcgcgcggaaggaagcaaggtgctcaaccggctggtgggtcgggccgtcctcgccgacggcgacggagtcgtgggaccagatgtacaggttcgggatctgcatgagggcggccagacgaacggcggaacgctcgtagtcggagaacatgaagaaggtgccgccgaacggacgggtgtgggaacccagcaggatgccgttggtgatgcagcccatggtgaactcgcgcacgccgaagtgcagctggcgaccgaactcgttgcagttcggccactgcttggtggcgcactcggccggggcgaaggtggcagcgcccttgaggtcggtcttgttggagccaccgaggtcggcggagccgccccagagttccggcatgacggcggcgatggcgttgagcacggagccggaggcgccacgagtggcgacacccttgccgacttcgaaggtggcctcaaggtcgtcaagggccttgtcgaagccttccggcagttcgccggccttcagacggtcgtacagggcggccttgtccgggttggccttgcgccaggcgtcgaacttctcgtcccaggccttgtgggcctccaggccgcgatcggcgaccttgcgggcgtgggccagggcttcttcgtcgacgtggaaggactcctccggatcgtagccgaggagtttcttgaggccggcgacggcctcggcgcccagcttggagccgtgggaggacgggtcgttggtcttgcccggggtcggccaggcgatcagggagtggaccttgatgagcttcggctggtccggggcggcggcttcggccttggcgatgacgtcggccagaccctcgatgtcctccttgtaggagccgtcgggctggatgaagctgaactcgtcggtgtaccagccgtaggcctggaagcgcttgagcacgtcctcggccagcaccaggttggtgtcgccttcgatctggatgcggttggcgtcgaagatcacggtcaggttgccgagcttctggttggcggccagggaagcggcctcgccggagatgccctcctcgatgtcgccttcaccacagatggcccaaatcttgtggtagaacggggaatcttccttcggggtctccgggtcaagcagaccgcgctggaaacgctcgccgtaggcaaagccgatggcggaggcgaagccctggcccagagggccggtggtcatttcgatgcccggggtcaggccgtactccgggtggcccggggtgcgggtggcagcgccgccacggaagttcttaaggtcgtccagggtcacgccgtagccggagaagtacagctggacgtactgggtgagggaggcatggccaccggaaaggatgaagcgatcgcggccttcccagttgggatcattcggatcgtgcttgatgaagtgctggtacagcgtgtaggcgacgggcgccagggagacgggggagccggggtggccggagcctgccttctcaaccgcgtcagccgaaaggaccttcgccatcttgatggcgcgctcgtcgagctcggtctccttgaattcggtcatggattactttccttccaattggtcgggccgcgtatccggcttgtgccgggcgcttgacgccctcacattgcgatgaccatgctagcgtcggtttgcgacgttgcggtgcaattttggcgtgttttggtagtttgtgttctgttagcgttcacagtgaacattgctacgctgcaaacgaacgtattagcactcaagcctaaggagtgctaatacaatgttctaaggtgaagtgcgccacctgcacgtggcggagccaagaaagaggcaatatttctgggttcccgcgtgtcgcggcgtggcgaaccgaccgtcggggtacgccctgagtgaaccgtgactgatatgaatatgtatgcatatataaggaggcgcgcatgacgcaatcaagacgcatgctggtgctgcgcgccgtggtggaggattacatccgttctcaggagcccgtgggctccacttcgctgacgcgcgaccatgatctcggcgtcagttcggccaccatccgtaacgacatgtccgctctggaggatgaaggatatctgattcagccgcacacttcggccggtcgtgtgcccaccgaaaagggctatcgatactttgtggaccgacttgctaccgtggtgccgctcagcgaggcgcagcgccgcggcatcaacagcttcctgtccggatcggtgagtctcaaggacgcgctgcagcgttcggcacgactgttgtccgaaatcaccggtcaagtggccatagtcacctcgccatcgctggccaaggccacattgcggcacgtggagatggtgcccgttgccatgaccacgttgctcgcggtggtgattaccgacaccggccgcgtggcccagcacggcctgaccatcgcatccatgcccgccgtggacgagatcaaccggctctccaacaccgtcaacgaacaatgtgtcggactgtccctatcgaaatccgcggagaccgtgcgatccatcgccgccagcgccggctacgagtcggtgcgcggcgtggccgacgcgctggccgacgccttcgaatcgatggcattggacgaacgcgcggacgaactgtacatgtccggcacctcgcacctggcccactcccggtccctggccgatctggccccgctcttcgacgcgctggaagaacaggtcgtgctgatgaagctcatgagcaacctgagcgaggagacgaatgcatccggcgtgggcgtggccatcggctccgaaatgcacacccccggcctactgcatgcctccgtggtcagcagtggctatgggcgcagcggtgcggcgggcgaaccggcggggaacgatcccgtaggcgaacccgaaaccgaatccgagacggagagccagacgaacgacatggaacccatcgccttcgttggctccatagggccgacccacatggactatgcggccactatggccgccgtcagggccgtagccagatatttgaccgccttcctctccgagggccggacccaagactgaccgccgtctgtggcacaatgacccgcagaccaaacgaacacaaaggatcaatcaagtggcagattattacgagacgctgggtgtggaacgcggcgccagtgacgacgagatcaagaaggcataccgcaagctcagccgtaagtaccaccccgacatcgcgggccctgaattcgaggacaagttcaaggaagtgaacaacgcctacgatgtgctgtccaatccggacaagcgccgtatgtatgattcgggcgtcgacccgaacgatccgaacgccggtgccggcggcttctccggggcgggcttcggcgatatgagcgacgtgttctccacgttcttcggttccgcgttcggtggtggctcacagggcccggtgccgcgtacccagcccggccgcgacgccctggcctccgcgtccatcgacctgaagaccgccgtgttcggcggcaccgcgcacgtcaagatcagcacgttctccctgtgccaggagtgcggcggctccggcgcccagggcggcgcacagccggtcacctgccccgactgccacggccagggattcatgcagaaggtcgtgcgcaccatgctcggccagatgatgacctccgccccctgcgaacgttgcgagggccacggtaccatcatcaagaacccgtgccccagctgcatgggccacggccgtgtgcgtaccacacgtaccgtgggcgtcaccgtgcccgccggcatcaacgacaacgcgcgtctacgtttggccaaccagggcgaagtgggtgagggcggcggcgctgccggcgacctgtacatcgacattcgcatcaaggcggataagcagttcacccgcgatggcgacgacctgcactgctggattcaggtgccgatgagctgggccgtgctcggccacgatctgtccattgacacgttcgatggtgagaagaccgtgtccatcccggccggctgccagcctgaggacactgtgacgcttaagggactgggcgtcacgaacatccgcaacaaggacgagcgcggcaacctcatcgcccacgtcaatgtgctgattcccaccaagctcaacgaaaccgagcgcggcctcatcgaacagttcgccgcctcgcacgattcaggcgccacgcacgtctcccaggcatcccgtccacaggctggccaaaagaaaggcttcttcagcaagttgaaggacgcgctgagctgagagtggatgcgttcttggctcccctcagagaggggagccaagtctgttacttcagcagggagcggcacatggagcggtattcgttgacgtagccgccgccgaagaagacacagtggccggcgatggggtagagctgccagagcgtgatacgctcctgccatccggccttcaacggatgcacggactggtagccctcggtgatttcgctcagatagctcatgccgaacaggtgcagcatagccagatcctcctcgcgatgaccgccatgtgccgccgggtcgatgagcacagcctcgggctgcccggaatcggcggtccacatcacattgccgctccacagatcaccgtggatgcgcgccggtttgtcggacgcggctcggcccatcagatccggcaacgcttcaatcacgcgctcggtcagttcggcatcgcgcttatccagctcgccacgcctcacaccaaggttgaccatcgggcgcagacgtccatcagcgaaatagctgatcgggtcggtccactcgccggtatccattttcactgggtcctgcaatggtccgaaatagcatgtgccgttatatccgtcaggcgcagacccgaaatattcggcacccacatcatgcatatgggccagagccgcaccaaaagctcgtgccgcctgaggcgtgggggacgcgctgcccacacgttcgatatccagataatccttgccccagccgtatacctgcaccacgcgcgggccgccctgcgcatgagccgctcccaaccattcgagtcctcgaccctcgcattcgaagaatccttccggtgcgaatgccctgcttttgcgatacgtggccataatgctcccttcgtcgcttacgtactatatccactttcattgtagaagccgtgtatgttaccgattcttagtgttgttctacacccccttgggtagggtgttcatcgtcataacacatcaaatacttagaaatcacgaggggttatgaattttttccaagcgatcattctcggcatcgttcaggcgctgaccgagtatctcccggtatcctccagcgcgcatatccgaattttctgcgatttgatgatgggctctgatcccggtgcggcgtttaccgccatcatccaaatcggcaccgaacttgcggtgatttctaagtatttgatgtgttatgacgatgaacaccctacccaagggggtgtagaacaacactaagaatc

SEQ ID NO: 3248 - DNA, 14596 bp, Unknown
  R53_2m  MAG No. k141_7832
cttgccgactgagggaagcatggtcagtccctcagtgctttgccggtgagttcgagaaacacgtcgttgagggtgggcgggcgactggtcaggtggccgatgttggtgccggagcgtttcaccgcgtcgagcacgtcggtcaggttgtgttcgccgcgacggcaacgcacgtcgagttccttgccgtcgtaggtggcttcgatcacgcacggcagcgcacggacctcggccatcgccgaatccgccagatcgagcgtttcgatggtgatgcgctcgcccgtgtcgatcatgttcttgagctcgtcggcggttccgagcgccaggtgccggccgtggtccatgatgaggatgcggtcgcagatctgctcgacctcctccatgtagtggctggtgtagatcaccgtggcgccggcctggttgagccgctggatgccttccagaatcgaattgcggctttgcgggtcgacggcgaccgtgggttcgtcgaagaagatcaggttaggcttgtgcgcgatgccgcaggcgatgttcaggcgtcgcagcagaccgccggacagtttgccgggccggaacttgcggaagtcctggagtccgacgaattcgatggactcctcgaccagcggcgcgcggtcggttttcttcggcacgtacagcgagcagaagtagtcgatgttttcggtgacggtcagttcgttgaacacggccacgttctgcggcacgatgccgatacgacgtttcagcgcgtaggaggtcggcgtcatcggctggccgaacacgcgaatcgtgcccgaatcgtaggtgagcagcgcgaggatgcagttgatcgcggtggttttgccggacccgttcggtccaagcagcccgaaaatctcgccctggttcacgtcaaggtcaaaatagtcgagcgccaccatgtcgccgtagcgtttgaccagttggctgacgtgcacggccagagccgggttggttgtcgagtcgtgttcggaagctctgttgtcggttgccatagccactcccttccttggtgattccatcatcccaagaaggggccggacgccgccacaggcaaacgtcacgacttggccgtacaggcgtgacatttgtcattacagcccttcggcgtcggtctgcatggccttgtacaccttatcgaccggcatcaggctgatctcgtccatcgaatagttggacgccctgtggctttgcgcaatcatcggtatcatccctttacggttgtgtcgacaacatccgacgcttgtgcctcatctattcgggaagtgtgacccgttgtcttggaccgtcatgcgaataattccgcacgcccgtcaagttcgtcgtgttccgcacaccgctagactggtggtggaagagcgtcgagccggggaggtgccatgcgcgtgttggccgagaagggcttgctgctcgtgttgggcctggctttggcctggcttgtcggggtgcggctcgatggcgtgttcatcgccggcctgctgttggccgtttccgtcgccggattgatggaatggctgcgtcccgcgcaatggtcttgggtcttgtgtacggcgtatctcgtcatcgccgtggcggtgccttcatggtgcgcgttcatgccgctcatcgcctacgatactgcacagctgccggccctcgcctcggccggagcccgaactggggcacggactgcggcaagcggccgctcccccagtgtctcgcggaccgcggcctctcgccgttcccttgccgatgcaatacgttcggccccgtggctttcggtcgccgcgcgctggatatgggtgttgccgctgatcgcgctctggttcgcccgtggcaccgaccgtctccagacgctggtgatgacgatggtcgccctgcttggattcgttctgggccgggcccgcgcctcctcggacgaggcgcggcgcgcgttgctgcacgcgcaggacagggcgcgcgaatcctcgcgggccactcgttcgcgcatcgccgacatcgatgaggaacgcgcccagtcgattcgcatggcgaccctcggcgagcgcacgcgtatcgcccgggagatccacgacaatgtgggccatctgctgacccgcgcgatcatgcaggcgcaggccggcaggacggtggccgaggcgacgaacgatacggtcgccgcgcaagggttcgccacgttgggtgcgacgttggatgatgcgatgacgatggtgcgccgttcggtgcatgatcttgaggatgacggcactgatttcgccgcgcaaatcgatgatgccgtcacgtcgttcgacggcatctcccccggtttcgccgtgacgctggccaacgacatcgccaaggcgcccgcgccggtctcgcgctgtttcgcgaccgtgattcgagaggcattgtcgaacgtggtgcatcatagtgcggcgcgcgaggcgagcgtgacgttgcgcgacttccccgcgttctggcagttggtcattcaggatccggggccggccgtgtccgagtccgatgggtcccggacggccgctgtccgcccgcgtgcgatgtgtgccacgcgcgtcggctcgcgactcgccgccgacagtgttgccgatatgcgcggttcggccgatgagctgatgcgcggcatgggtttggcggatatcgaatcgcgcgtgcgcgcccttggcggcaccgcggtctgcgggccgtatgaggacggctggcgtgtgttcgtatccgtgccgaagaagcgttggaccatggaatcgagggattgatgagaatcgcaatcgtggatgatgatccgatcgtctgccagtcgttggagacgattctgacggccaccggcacggccgaggtgctatggacggcaaatgacggcgataccgccgtgcgccgttatttcgagacgccggcgagccgaccggacgtactgctgatcgatattcagatgcccggcaccagcggtttggatgccgcgcgcgagattctggccacggacccggccgcgcgcatactgttcctgaccacgtttgcggaccagtcgtatatcgcgcaggcgatgggacttggcgccaagggctatctcatcaaacaggatgtggcggcggtcgggcccgcgctgcaggcggtgatggccggtcaggtggtgctcggcgcggaagtgctcggcaagctcaccgaacggactccggatcctgccgattccgacgattccggagataccgccgattccatcgagggcctgcttggcgagcgtgagcgtgagatcaccgcgctggtcgccgagggcctcgataaccgcgacatcgccgccagactgttcctgagcgaaggcacggtccgcaatcgcatcagcgcgatactggacaagctcggcctgaccaatcgcacccaactcgccatcctctggctcaacgcccatcggtgaggggcctttggtcaagtaggtctctccctccgtcatcgcttcgcgatgccacctcgaacgcgattcaggacagcttgtagctgacctcttattcgctcgttgtcactcacccttgcctaaaaacacctccggcgttttcttcacggctcggctcatcagagggaggttgtgaaaaaccaacctcagctgtttttcatgacgatactgtcgatggtgttggccacgcgctcgcagtcgtcggagcattgttcgaggtgacggtacacgtcatgccaggcgaacacctgcagcggatcggtgcaggtggtgtgcagcgtgcgcatcgactcgatgaacaggtggtcggcgtccgttttgatcgtgttgatggcgaacaccagttcgcgcaacgtcttggaatgccggaatcgcggcagttcgttgaccagctcgcagatgctttccgtggcgcgcaccaccatatccgacatctggaccgcatcgtcgcgcatgtcggtcacattgtcgtagtacatgcggttgagtacgccttcgatgctgtcggtcacatcgtcgagcacgtggccaagctcgtcgatgtcctcgcggtcgaacggcgtgatgaacgcggtcaccagttcgtccatcatgtcgtggcgcacctcgtccgccgacttctcaatcgcgtgcatgctgtccatgcgttcgcgcagctggtccggattgaagtcgtgcatgacctcggacagcagcttcgcggcctggcatgcgtagtccgcgctgcggcggaatccgtcgaagtagaacacgtctttttgtctcgccatgatgggtggattcctttctagaacacgaccatgaacagtttggccattacgaagctgatgagaccgcaaccggggaaggtgaacacccaggtgagcatcatgtcgcgcaccacgccgaagttgatggcggagagacggcgtaccgcgcccacgcccatgatggtgctgcacaggatcatgagcaagaccagaatcatcacaccggtcacgctgggttggccattgcagaacgccatgccgaggaacagcacgccgatgaacttctggccgtcctgcgcgccatgcataaagctcatggccgccgcgcccacgatctgcgcgtaggtgaagaacccgttggtgcggcggcggtccatgccagcgcaaatcagggtcacggccttgcataccaaccaacggaacgggggcaggctcatactctgcttcgatatgctcgtcgacatttcccgccatctaccgaggattcggtcatgcgtgtgcgaaaatggacacggtgtcaatcaggaggtgcacagtggttgtaagcacggattcgagccgcacaatgcccgattgggtgaagtacggggtgttctggcacgtgtatccgctgggcttctgcggtgccgatatcaggcccgccggcccgcgccagttccatggccgcggccttgacgcgatgatcccttggctggagtacgtgcgcgatctaggcgcgtccggcctgctgctgggtccggtgttcgagtcggcgacgcatggatacgacacgctcgaccatatgcacatcgatgtgcgattgggcggggatgccgcgttcgaccagctgattgcggcctgccgggacatgggattgcaggtggtgctggatggcgtgttcaatcatgtgagccgcaatcatccggccgtccgggcggcgcttgacgagaccgctggacgcttgaatccggccgacaacccgtggcatggtctggtccgcgcgcatgtcggtgataatgacgaacccgctttggatgtgttcgaggggcacggggatctggtggcgctcgaccattcggctgacgagaccgttgactatgtggtccatgtgatgagccattggctggatcgcggagccgccggctggcgcctcgacgccgcgtatgccgtgccgagcccgttctgggcgcgcgtgttgccgcaggtcaaagccgcacacccgtattcgtggattttcggtgaggtgatccatggcgattacccgcgcatcatcgaggaatccacgatggattcgatcacgcaatacgagctatggaagtcgatccagcatgcgctggagacggagaacttcttcgagctggattggaatctcaaacggcacaacgcgttcctggattccttcgtgccgcagacgttcatcggcaaccatgacgtgacgcgtatcgcatcgcagattggcccagccaaggcgacgttggcattggcggtgctcatgacggtcggcggagtaccaagcatctattacggcgacgagcagggctatgtgggcgtcaagcaggagcgtttcggcggcgatgacgacgtacgtccgaagttccccgactcccctgccgaactgtccacgctgggagagccgacataccggctgcatcaggcgctgatcgcgctgcgccgtcgcaacccatggctgatggatgcgcgtaccgaggccgtgaagctggaaaacaagcacttcgtctatcgttcgacgagcgccgacgcccagcattccctgaccgtggacctcaacatcgagcaatcccccactttcaccatccgcaacgccgacggcagtacagcgtatcaatactgagctacctcatcagagggagctcaccatttaccgccgaatgcctcggatcagcaggtcgagcaggtacccgtacgaccggtcgacccgttcgcggccacgtgtgcggggttgtgcggaacgcagttcgaattggatgaacccgtgtatggacacccagatggaggatgcaatcaggtgagggtcatcgtcgcggatgcgaccgagtcatccagcaatctgcgcagggtgcccggcagggagccggaaatggattcggcagccatcacggattccttggatgcgccaaggatgtcctggggcaggtgggatcctcgcagcgcgtccgtcaggccggtggtgtacgcaccggcctgcagcgaccccatgatgccgacgccgagcgtgccactgagttcgcggatcgtgtcgttgacggcactgcccatgccttcctcgctgatcggcacggccgtcatcagtgtgtcggtggcggtccctggacgagggcgatgcctgcggccatgacggccgcgaacggcagtgtggcaatcgccatctcgagcgccgaacacccacgcagcgcctggaaccattgggtcgtgaggaagatgaaaccgaacaggcacaggaaggcggcgccaatggccaacgtgccgatgacggcgcacacccagaacacgctatcccatgcgaaccgttgcagcaggatgccgccgatgaccgggcccgagcgctatgcccaccccggatgtgccgacccgcagtccgacggccagcccacgcataggcgatccgtcgaacaacccgatgatggatgacagcgtggctcccatcaagttgtgtattaatatcatatatttatgaaacattgatacacatcatgtcgggaacaggcatccacatcgaaaacaccgacctacaacacaatcaggcccgacgaccatcaaaggtcgtcgggcctgattcatacgcgctgtcggactaacggcgtccggacttcatacggaatggcgcattgttgcgattcttcttggaatggcggcggtttgggccttccgtgttgccgtatttggcgatcatgcggcgttcgtgacgcttggcaccttctgaacgctcgtcgcgtacgatgcggttctcgttcttgcgatggatgcgcttgccgccttcgccctgacgggtgttgcgcatggactgcctgcggccgtcatgggaacgctcgtcataggagaagccgtagtcctcgtggctgcgctcattgcggcgcggcttacgcggacgctcgaaatcgcggggatcagtacgatcgaagcgacggcttgatccatgcttacggccgctgaaatcatcgttgcggccgtattcggccccgtcgcgcttgtcgaattttccgcccttgccgtaccgatcattgcgacggctgcgaccagaatcgcggccttcgaacttgccgccacgacgatcgtcgtaccggttcttgccgtactcgttgcggccatcgtcctgacgctcgccgtaacggttcttgccgtatccgtcgcgacggccgcccttacggcggtcatcgccatgctcgaacagatagtcgcggcgctcggcctcggggttgctcatgccggcacggcgttccgcacggttgcggttcttcttcacggccttcttgctggccttgtcgccgtgcttgcgctgcggctcgccttcggcaacaaactcgccaccttcgttctcgtgctggaattcggtcttggcaacgttctgctcgtcgcgattgcgattgcgattgcgatcgccgccgcggccggactcgtcacccgccgcgttcttggcacccttgttcttgcccttgcgtgggttgcccacgggctgcgacttgtcgaggctccagccatccacgcgctcggcgcggtcgcccacaagctcaagcacttcgggcgaatcgtgggtcacttcgatcatcttggtcttgatgccggcctggttcagcaagcggcgcgtctcgcggcgctgctcgggcagcacgagggtgaccacgtcgcccgccttgccggcgcgggcggtacgaccggagcggtgtacaaaggacttcgggtcggccggcggctcgacctgcaccacgagctccacgccgccgacgtctatgccacgggcggccacgtcagtggccaccatgacgcgcacatcgccggaatcaaatgcggcgaggttgcgatcgcgctggttctggttcaggttgccgtgcagctcggcggccggaatgccgttctgcgtcagattcttggcgagcttcttggcctggaacttggtgcgggtgaacaggatgcggcggccttcgcccgaggcgagtgtacgcacgagttcgtgcttgtcgccgcgcgtggtctcgaacacgtggtgggtcatcaggtcaggttcggtggtggccgaatcgacctcgtgcaccttgggatcatgcaggaaggtgttcaccacttcatccacgccgtgatcgagcgtggcggagaacagcatgtgctgggcgtcgggcgaaatctgctcaagcagtcgcttgaccggcggcaggaagcccatatcggccatttcatcggcctcatcgatgaccacgacttcgacggacgagagcgtgagcgcctgctggcgcagcaggtcctcaaggcggcccgggcaagcgaccacgatatcggcgccggccttcagatcgcggatctggtggatgtacttgacgccaccgtacaccgtggtggtgttcatgccaaacgtgtgggccagcggcatcagcacgtcgttgatctggttcgcgagctcgcgggtgggggccagcaccaggccgcgcgggtgcggcaggaagtcgtcggcgcggcgctcttccaggctggccttcttgcggcgcttgacttcgttgcggaactcctccatcgcgatttcgccaagcgaatcataggagccaagccgggtgaccagcggaatggagaaggcgagggttttgccggatccggtgcgccctcggccgagaatgtcgcggccggccagtgaatcgggcagggtgtcggcctgaatggggaatgcggtcttcttgtcatctgccgcaagcacgcgcaccagcggtccgggtacgccaagttcgccaaaggtaagggggcgggattccgcgctgtcgttcatctggaaatcagcggaatcgtcacgatcatcgaaattattacggggcacagtggcctttcatgtcaaaggttacgcaaattacgcaagctttccaagcttagcgtaagccccctactttacttagtgctcgccacgctgtcatcccactctttacttatgaccccatagggcggtaactcgcccatggggcggtaacttgcccatgaggcggtttgaagaaattgtgaaaccgcagaataaagccattttcacctaccaccccatgagggttttaccgccccatgggatgtttgccgccccatgggccaattaccgccccatgggttctaccaccatgtaaggcgagcaccgctccatggaacacgcaaatggctcctacccgtgaaggtaggagccattgtgcaaaaaggctgagccacaatacggcccagtagcactaaaacacactacaaaatatccggatcgtctttggcaatagtgccggttgccttgccaatggccttcagaccgtggtaggccacaagaatcaccatcgtgccgatggcaatgccgttgaaggaaatgccaccaacagtgaatgcgaattggccgatggcaataatcatggtgatggctgccaccatgatgttcagcggcttgtcgaagttgaccttgttctcaacccagatgcggatgccgatcatgccgatcatgccgtacagcagcgtggtcacgccgccgagcactccggcggggatcgtgttgatcacggcgccgaacttcgggcacaggctcaggatcagggcgaaggcggctgcgcaccagtaggcggcggtggagtacaccttggtggcggccatcacgccgatgttctcgccgtaggtggtggtgccggagccgccgccgaagccggcgagcgtggtgcccaggccgtcggccatgagggcggtgccaatctggttgtcgtagtcgcggccggtcatctgggccacggacttgacatggccgacgttctcagccacaagcacgagcacaacagggacgaacatgggaaggatggaaaaatcggcctgcggcaggtggaacttcgggaagccgatccatgcggcgtcaccgatggcggagaagtcgacctggccgcggatgcaggcatatacatagccgatgattacgccgaccaaaatgttgaggcgacccagcaagcccttgaacagcacggccacgagcagcacggccagcagggtaaccagtgcggtgtccggcgcggcttggaagttggtccacacggaaggtgccagattgaaaccgatgatggccacaatcgcgccgttgaccacgggcggcatgatgatgtcgatccatttggagccggcgtaatgcacgagcacgccaatcagggccagcagaataccggtgaccatgatgccgaagctggcgaccgcaatgcccttgttggcggtggtgaccgcggtgatcggtgcgatgaagccgaaggacgagcccaaatagctcggcagcacgttcctgttgataagcaggaacagtgcggtggacatagccgtgaagaacagggtggtggacgggtcgaagcccgtcagaatcggcaccaggaaggtggcaccgaacatggcgatgacgtgctgtgcgccgataccggcggtgcgcacccaagtcagacgttcatcgggctcgacgacctcgctgggcgccagcgtcttgccgtcgccatgcaattgccattggaagatattggacattactactctcctcgctctcgcttggggcacggcattcacaaccagccgcactacgcgccattctagctcacgaagattttgtgaagtctctcttccgggaaaggctatttgccgtaatactccagcaggtgcggatcgacggcctgcaccacatccaccaaatcgccattggacaggtacgggcgcttgaattcgcgccacggctccaccttgacctcccagcggccggtcgtctcgtcgagcacgggccgggcggtctgctcccagcgcacacgcttggaggtgcggccggtttccgggtcgcggcgcgtgtagtgcaggcaggtgcagttggtgatcttccagtcgtccgagtcggcgcgatgcaggaattcctcgtcggccagatcctcgatggtgagcatcagggcgagcatgaagtcgccgtgggtgaccatgaccacggattccgaatcggatttgcggctcagcgaggtcaggatgttgtgcacacggtcctcggccacatcggcaatcgactcgcctgccggcggacgccagtacagcggatcggtattcttgaagttccagttgcgtgcgtagttgtttttgaattcgtccttggtgatggtgttgatttcaccccaagaacgttcgcgcagcacacggttctcctcccatttggccttgggcagggccatggtggctgcggtttcgcgggtgcgcacgtatggcgagaccatgtaacggtcgaacagctgctgctggctgaccagccaacgaccgatgcagtcggcctgcttgcgtccggtggcggtgagtctccaggagcggtcgggtacggtgacgttgtcctgcgtatacagggagttgtcgccctgttcgcccgcctggacgatgacgttcgcttcggattcgccatgccggattacgtatagatcgagcggcatgctcatatggattcctctttcgttattggttacgttgtgttgttttctgctgtttcctacttgacctgcgtaatggtgttccccttgaccatgaacgcatgccgggccatgtcgatcatcggctgatcgaacttggagtcggtgtagaactcgtcgatgacggcgtccggaccgtacagttcacggaaccgtttggtcttgttggtgttgaagttgaggtacgtgaccttcatcgtctccacatccacctcgctggccacgagattcctcacgccgagtctgcggcaggcctcccccaccgtcagaccgaaggatgcggtgaggatcacatcgtccgactcaggctggtaccaaggcttgatacgtgcgtaatatcggtcccagaaatcgtccacgagctgttcgacgctcgccacccgtttggatcggctcagttccgtgagatagccttcggtcatcttgcccacgccgtattccatttgttcaagcgtggcccggccaagcttgtatttgaccgcgtaccgcagcacgggggcgatatagcggaacactttcgggtcgtggcgggcggaatacaggtacaagtcgaacaggctttcgccatcatagatggttccgtcgaaatcgaatacgcgcataccttctgcttctactctgttattccttgtctaaggctaatctcggtaagccggcgaaagcgcaaatacgcagtgaatttcacatgaacactgttttttggattgatttcggtacaggtaacgtacactggtgacagcgtggaaggaggtgcgtaatggcggcgtctgaaatcgaacaatggtggattgataagtttcaggagaacctgggtccgattcgcaaggtagccggatggacgactcagcaactggccgacgagctgggagtcgcgcgacagacggtgtctaacttggagaccggcaaaagcccgatgaccaaactgcagtatctcgctttacgtacggtgttcagcgccgaaatcgcacgtcgtgaagaccgcgatctggcacgcatcatcaagactttggtcgacgatcccattgagcaacgcattcgcgaacggcgcgcccaagagcaagacggcgaggccgttgccgacaatgccccagtcaatacaggctgtggcaacgtttctcgacaatgccattgccgagaaacgcaagcccagtgccgccacattgtgaaggcttcaaagattgccgcaacgggcaagcccacgctcagcacggcgatgcaggctcttgccgtcatcaccggcgcattggccagtggaaccgccgccggcatcatcacctacttgatgttcccggacggcggcccgaacaagcgctgagtcgccgaaatatcgaatccgttactcgcaggccacgccatcgtgatcgcggtccaacttgccgttgtatccaggctgcccttgatacaacggagcagcaccagccgcacggacttcagagcaattcgcataatgcacattttgctgcgcttgctgttgctgttgtgcctgtcgagcggcctcctcagcttgccgctgggcctcggcctgcgcggcagcctgttcttcagcggcctttcttgcagcctcttcttcagctgccttcttggcggctgcctcttcagctgctttcttctcctcagctaccttcttcgcttcttcctcctgcgctatatcgctggctttacgaacattgataacaggcttgtccccatcttccacggattgaacaacccagttcgaagctctgagcaccattttgtccgtgtcgcttttcacctcataatcagaggaggaaaaaccggcatccttgagctcgtctttcacatcggccagcgaacgccctttcttggcgatggcgacaattttcgaatatgtggattcctccttgccgtccgcaccgtcagaagaccccgagcatccagcaagcacaaggcccagaaccatcataagaatcacggtcaacgcccaaaccgcacgattgacacgcttcatgttcccgaaacgaaccctgttgctcaacattattctcccccttgtagtcgcagatctgcggatggtcggaaccacgtcaatgtgaatccaaccatcctgataattactgcttattcaatgatatattcatccattgttttcgccgatatatcgcaccagcgtttccttcattatcaactatttcgagttgcatgaatgcgccgtttataggccaagaatttcgtgcttttttgcatcaaattcttcttgggagagaatgccgatatcaaccaattccttcaattttttcatcgcctcgacttgttcttccacagacatggatgccgtgtgagaggcgggagcagcggcttccggtgccggcgcaggcgccggcgcttgaaccggggcggccgtcataggattgatggattgtgccatattcatgcccagcaacatgccaccatcgccaaagccgttgtcttggatgccttgcgcaatgcgctgctgggcagccatattgccagcttgctgggaaacgccctcgtatgcggcaacattcatcttattcgaggcgaactgctgcacgagttgacgtgattgctcggtgaactcgatactttcgatgcccacactggacacttcaaagccaaaacgatcattccacgtacccgcattggcccgatcgccacgcacgcatgctgcgatgtcattcgccttgccgggcaattgcgaaatacgatattcattggacaacgaattgatggccacaataaacgactgtacgaattcagacagaatc

SEQ ID NO: 3249 - DNA, 18723 bp, Unknown
  R53_2m  MAG No. k141_7877
ccacgctggagccgttcggatccttggcggcctgcttggtgtacgccaccagagcttcggcgagcttgtcgtcggcattctgcaggttgacgagtttgaccacggcaacgtcggaaagcaacgatgggctgacggcttcatcgaaggcatactggtcggccgatgcggcgtcgagttcgatgaggtcggcgtcgggccgcgccttcaacgcctgcgcgcacagtgccttggtgcgtgcgtcgttcaaatacgagtcgcctccgggcaccacggttaccggtgcattcgctgctgttttcgtcatgcccccatctcgccacacaggttggacaatgacctgccggcatcacgattttgccggtgccgtcaagatagtggtattcggctgggattgcgatggttgctgcaccgaataccgcattggctattcggcttgccgccgcgtaaagaggcgtctcgtctcctcaccccagagactgaggcggacgcgccaagcggaaccgaagcgcacgccagacattccggcctcataacgacggacatgctggaggcaacggctgacgaacaccagtagcatgccgataccgatttccgccgccacaatcagcacggcgcccgtaacgccgtctttccatgggatgacggccatcgtgctgccgcccagccacaacgccacccgttccatcaccagcgtgccccatgacgatatccacgcgaatacgccggccagccatggcgtgcaccatgcgcacgtcagtgccatcaatcccgccatcgtggccaatcccacgaacggtgacaccagcaggttcgccggcacggacagcaacggcaattccggttccatcaacacctgaatcggcagggtgaacaattgcgcggccacggtcatcgccatcatttcggcgatgctgtgcggcatcgctcgctcaaagacaccggccagccgccccgcaaacagcacgatacccagtacggcggccgaagacaaggcgaatccgtagctggccgacatatccgggttcaccgccaatacaccgattatcgtccagcacagggcgctcaacgcttgcgtacgccgtcccatcgcatacgccaacgcacctatcaatcccatgatgaacgcgcgggtgaccgaatcactggggaacatcgccaatgccagcagcgcatatactccagagaccagcaacgccgtcagccgccgatcaagcagcatccacatgcataaccgacgcaccagtcctgccaccagtacgaagtggccgccggatacggccatgaggtgcatgatgccggaccggcggaactgattttccaacgtttgcgcatacgtgctgttgaccggcatcggaccggcatcgccgccgatataatcctggccaagcacacccatcgtcaatcccggcaccaacacacgcccctgatcggacaattgtccggtcacggtgaaaaacgcctcctgcatatgtgcgatcgcggcgagatgccacggcggagcccgcacctgcgctaccggctgttttccttccaagagcagccatagcggtatgcgtccatatcgcgcttgctgcaatacgcccgtcaacagatagaccgcgcctcgacgcaactgcccacaatacgattcatcggcgtatacgcgcacggcgaccgtggaacgtacgtccgcgccatccacagtgatgccgctcagccgtatgtccgtctgacaatcgtatgtgcgttggtccgaagcgatcacgggcgtcgtcaccgtggccatgacttcgtggtatgaactggattggcgagcttgtgcggaggcaggatcatgccaggcaatggtgtccgacgcgattgccgtcatactgccgatgcacgccaccgcgacgcatacggtcaatgttcccgtccacctgatccgcaggcggaaagacaccacgatcgtcgccgccacagcggcacatgacgccactgttataggcaatattcgcgtgacaggccattccatgccgattatggtgacgtcaatgccagctccggcatcggcttttacctgaccggcgccgagtccatcagacatcctccatgcgaataatgcgtgcgctcccaggctcgccgcccacatcactatggcgatcggcagcatcctccaatcgcggctcccctgctcgcgcagtatccaatccccgctcatccgaccgtcacctgccctcgcatggtcgccaacgtcttggagccgatgcctttgacatccagcagctgatcgactgatgtatacccgccaatcgccgtgcgatgatcgatgatccgctgagcggtaaccggcccaatacctttgatggattgcaattcctcagcggtagccgtgttgaggttgatgagaccatgcgtggcagcgccggcatcgctgccgtccgtctgcatgtgcggagattgcgtggtatccgattcggggttcgctgtggcatcggaatgctccgactgctgcggatccgtgcgtttctcgtccgtggtgttctgcgatggcgtcgcctgatctccagcggagccgcccgtggtctgcatggcggtcggttgagacagcatggccatattcatcgactgttggaccagcaatgccaagctgatgccaagggcgacgatcagcagcaatatcacggccaaggcatgcccaatggtgaacgacaatcgcggctgatcccgggtgagtctggctgattcgccgacggcatcggcggaacgtacgccgatcagatccgataacgcgcgtttgtcacgggtcgcctgccgcaggccgctctgcgccctttggggcgggcggccggccggacgaatccgtgcatggccgggaggcggcggaggcgtcgtgggccgttccgctcgcggttggggcatggcttcgctctgcctgctgaatgcgcgcaaacggttggcggcatggtctgcgcgatggttatgagaaacgcccatgcatccacgctgatggattcatgggcgtttgtccagctgaaacggggtatgtggttctagcttatgaagttatccacaattgaggtggggcggttgacgctcccctcagtctcgctacgcgagcggctcccctcaaagaggggagcctaacccgcaacaagtcactccgcagggacgatggagacgatcttgggggccttgacgatcaccttgcgcggctctttgccgccaagacggtcggcgacggcggccagcgcctgcttctcgaggtctgccggatcgatgtcgaccggcacttcgagcttggcgcgcaccttgcccttgatctgcaccacggcggtcacggtatcgtggcccacgtaacgctcgtcggccaccggccacggctcggcggacagggactcggggtggcccagcttgctccacatctcctcgcagatgtgcggggcgatcggggcgagcatcaggaccaacggctccactgcggcacgcggcacggccttcagaccggtcagatggttgttgagcacgatgagcttggcgatggcggtgttcggacgcatgccctccatctccgcggtcacttcggcgatcgtgttgttgagcagtttcagtgtcttctcatcgggcgcgtcctcggtcacgtgggcctcgccggtggtctcgtccaccacgttgcgccacaggcgctgcaggaagcgcatgccgccgaccacgttgcgggtgttccacgggcgggattcgtccagcggccccatgctcatctcgtacaggcggaaggtgtcggcgccatagttttcgtacatgtagtccggggtcacgatgttcttgagggacttgcccatcttgccgaactcgcgattggcatgttcgccgttccaggtgaacgtcggctcgccggaggcgtcggccggcccttccacgacctcgtccgccggcacgtactggccgcggtcgtcggtataggcgtaagcctggatcatgccctggttgaacagcttgtggaacggctcggccgaatccacatagcccagatcgaagagcaccttgtgccagaaacgggagtagagcaggtggagcacggcgtgttcgacgccgccgatgtacaggtccacaccgccttcatcacccgagtacttgttgtggttcgggcccatccagtagtcgaactcgtccttctccaccatgtgcttggtgtcggtcgggtcgatgtaacgcatgtagtaccagcaggagccggcccagttcggcatggtgttggtgtcgcggtagtaggtcttcttgccgtcgcccaagtcgagctcgaccttgacccagtcctcgttgcggctcaacggtgcctccgggttggactcggcgtccatcggatcgaaggtgcgcggctcgtagtcgggcacgtcgggcaggttgattggcaatgcggaatccggcagcaggtgcggggtgccgtcttcgccgtacacgatcgggaagggctcgccccagtagcgctggcgggagaacagccagtcgcgcagacggtagcttacggtgcccttgcccacgccggcggattcgagccaggcgttgaccttggcgatggcgtcgtccacgcgcaagccgtcgagcgacagcgcgtcgcccttagcgtacgtggattcgacgtgggagttgatcacgatgccgtcatgggagacgaacggcgccttgccctcgtagttggccaagtcatcgccggattccggcagcggttcaacggtgtagatgaccggcagaccgaacttcacggcaaagtcgtaatcgcgctggtcgccaccaggcacggccatgatggcgccggtgccgtagtccatcagcacgtagtcggcggtgaacagcgggagcttcgcgccggtgatcaggttggtggcgtacaggccggtgaacagacctgtcttctcaccgccttcgtccacgcggtccttggcggtcttggcttcggcggcgagcctgtaggccttcaccgcctcgaccgggttgacatagccgcccttccagtcttcgggtacatcggccggccattcggcgggcacgttctccagcaggtgatgttccggggaaacaacggcgaacgtggtgccgaacagcgtgtcgggacgggtggtgtagatttccatgtccttgtcaccgtcggcagtggccacggtgaagtgcacggaggcaccatgggattcaccgatccagttgcgctgcatgagcttgaccttctcaggccagttgatgccgtcaaggtcggcgatgaggcggtggccgtacttggtgatgcgcatggaccactggcgtagctcacgctggaagaccgggaagttgccacgctcggacttgccttcggcggtgacctcctcgttggccagcacggtgcccagacccgggcaccagttgaccggggacttggagatgtaggccaggcggaagtcgttcaagatatcctgctgctcggcgtcagtgaggtcggaccactgcttgccatcggactcgtggcccggaatggccttttcgccggattcgaacttggccacgagctcggcgatcgggcgtgcggagcccttggagccggacgggttggtggcgtcctcgtcgtaccaggaatcgtagatgcgcgagaagatccattgggtccaacgcacgtagccagggtcgatggtggcgaacgtgcggcgtttgtcgaagctcaggcccatgcggtgcagctggcggctcatgttggcgatgttcgcctcggtggtcacgcgaggatgctggccggtctggactgcgtactgttccgcgggcaggccgaaggcgtcatagcccatggcgtgcaggacgttctcgcccttcatgcggtggtagcggctcaccacgtcggaggccaggtagcccagcgggtggcccacatgcagacccttgccggaggggtacgggaacatgtccatggcgaagtaggcggtgcgcccctcggcgttgcggcccttgccgtccttcaaatcgccgttgacgttggccgcccagaaggtgccttgctcatcccagatcttctgccacttgttttcgatgtcctgcgccagtgcggcgttgtagcggaagttgggctcttcggtttgcgtgctcttctcgttgtcactcataaatcagcaaggtagcctcgcaactggacacgtcgtcaatcgttattcagcatccgagacgatggctttggggtcaccgttcagcgaaaccatgagctttgtttggcttgtgaacgtatccttggcggccgtccagctgccatcctcaaccatgtcttccaatgcttccgcgattttctgcgccaattggctggtgccttgactcacggcgatgccataactgacctcgcccttgtccgcaatcacgtccatatactggggcccgttggccgcttgaagaccggaaagcaccgccatatcggaggctatggcatccgccgaccctacttgcacggccgtgacgcactgcgcataactgctacgctcctgaatccgagcctgcgggtggttgccgcggaagatgccgactgtctcgtcacctttcactgcgcacaccgtgccgtcgcctacgtcgcccaccgaacctgcgtcattggtgaatcggccacgctcatccgacctgaccagcaaaccgacgctggtcgtgaggtatggtccggcaaaatcaacgatcgcgctggacccatcggtgataggccaagaggcgacgaccatgtcgacctgtccattgtccagcatggagcgccggttttcggggcgaacctgcttgaagacgatctgcttgttcgcatagccgagtttggcggccacgtatttggcgatggtgatgtcgaagccctggtatgtgccgtcatgccatgctcccaccgatggttcgtcggttgcgaccccaatggcgatggtgggtccctccggcgctccggagacggtggtgacttgaatttggccgcaaccggccagaccggacaatggcaatatcatgccaaaggccgcggcgaatcctgccatcagtcgggagcgaaatccgcgccgcatcgggcggcgggcgcggagcatgctacggctgacgaacgatgaccaatggtgcataaccgtcaaacgccttacttgaacatgcgcgaacgtgtgaggaaccaggcaaccacaccggaaagcaccatggagatcacgatgatgagcaggaagccccaaggcttgtcggtgaacggcatgcccatcatgccgccgtcgaagttcatgccgtacatcgagaaaatcagcgtcgggatggacagggtgatggagatgatggtgaagatgcgcatcacgttgttcaggttgttggacacgatcgaggcgaaggcgtcggtcatgttcgcaagaacgccgctgtagatgttggccatctcgatggcctgcttgttttcggtgatgacgtcgtcgagcagatcctcatcgtccggatactgcttgatgcgctgcagggtggtgagtttctccatcacgatctcgttcgatttcagcgatgtggtgaagtacaccaaggtcttgctcagttccatgagcatcacgatctcgcggttctgcatggagtggcgcagcttcagttcaagcttgtcgctttcgcggtcgatgatgcgcaggtaacgcaggtacatcgtggcgttgcggtacaggatctgcaggatgaagcgcgaacgcatgaaggtgttgaagcctcggatcgtgccttccatgaatgggtggagcacgggcgtgtcctgcatgcagacggtgatgatgaggttttcggtgacgatgatcgacagcgggatggtctcgtaccagtcgcgtccgccacgctcctccacggtggggatgtcgacgatgatcatcgtgtaatcgtcttcgacgtccacacgtgaacgttcctcgtcatccaaaggggcgcgcaggtcggccaggtcgatgccggtctgtgatgcgacggtggcgagctccacatcagtgggttcgctcaaacataaccaggagccgttttccggtttctcgatctgctccacttggccattgattgagctgaagattctcagcatgtcgcctcacccgccttccgcgctttcttactgttctatcgctgtacggttccaaaccgagattagtctagacccaccgttcgaatttgcgagcggggtttcgcatagcgaccgtcaccagacgattggctgccaactcggcatgtgcggtcctcgcagatcggtcggcccgttctcccagtcggcgctgtcggcgatggcgggagccttgttgtattcctccaactcccacaggggctgttcggtgggggtgccgttgacgctgtggcgcactttgagccggcaccagcaggcgttgcgcatgccgccgagtgcgttcatgccgtccgggtcgagttcgagcaggttggagatggtggcggtaatccatgagccatgggtgacgagcatcagcgtggtgggcatgctgtctgaataggcggagtcggtgaccagtgcgcgcacggcatcggcacctcgctggcccacggcggcacggctttccacaccatgcttggtttcgcccccggtgtgctgtttccaagaggcgtagtcgtcggctgccacggctttgatttcggcgcgggtcatgccttcccactcgccgaagctgcgttcacgcagtcgttggtcacaggtgaccggcaatcccaaaatatcggcgaaggcgtgtgcggtctgttgggcacggaacaggtcggaggtcatcaccaccatgcgccggccggcggcgggggcctcctcgaactgtcgcgtatcagtgcgttcggcggcgtcaggaccgggctgggcgatggcttcgggatgctcggcaagccggttcaccttggcccagtagtaccgtgaagcgagcgcgaatccggtctggtcgacctgccattggcctacgatgtcgagcggcacatcgatctggccttgcaagcgatgttcgagattgtattgcgtacggccatggcgcagcatcatcacttcatcgatcatcggttttcgccacctcgttctcttgcggttttttcatactcatctcagcacaacccctagaatggcggcatggagatttctgagtcgatctgggcgttcatcgccaaacaccgccgtgaagatgtgcgtgatgtggccttgcacgccaaacatgatggcgacgtggatgtgccgttcgcgctggagcaaattgccggctggcagcgcgcttcgctcaagctacctgactgggcgtcccatgatgggctgattttcccgccgcaagtcccaatggaacaatgttccagccagttcacggctcaatacaaagcccggttagcacagcgattgttagacggggaagcagtcgacgacgccgacgattccccgacatccctagtcgatctgaccggcggtttcggcgtcgacttttcttacatgtcccgagtgtttgaccatgccatatatgtggaacaacaatccattttatgtggtatcgctcgccataatttcccgatactcggccttggccacgccgaaatcatcaatgatgattcaacagcagtgcttgatacgcttggccgagcctccatgatcttcctcgatccggcccgccgtgacgatcatggctcgcgtacctacgcgattgccgattgcacgccggatgtgctgaccctgaaggatacgctgctggccaaggcaccgacggtcatggtcaagctctcccccatgctcgactggcataagaccattacggatttcgccggcgcggtgcacgaggtgcatatcgtctccaccggtaatgaatgcaaggaattgttgctggtgttggggcgcggccgttgcgcctcaccgctcgtggtatgcgtcaatgacgggcaggtgctgtcgtacaaggccggcgataacagcgacaatcaaacccctatcagcgattctgccttggttgcatgcaatacctgtaataccgaggatctcccggctgaggaaagcgcgaacggcttcgattcctcgcattggaagtacctttacgaacccaacgcctcaatcatgaaggccgggtgctttgctgttctcgaacagcgcttcgccgtgcatcacatcagcccgaatagccacctgttcgtggcggccgaacctatttccgattttccaggcagatcattcgtcatcgaatccatcgtcaccatgaacaagaaagaactgaagcagctattggccggtctcacgcacgccaacatcgccgtacgcaatttccccctatccgtggcccagctgcgcaaaaaactcaaactcaaggacggcggcaacacctacctcttcgccaccaccgacctcaaaggccatcacctagtactgcgcactgaaaagcgaaaaagtggctccctctgacgaggaagccaccaatacgtcagctaatcagtccttggcgatggtcttgccggcggtcggaccggaggcaaggttctggatctcggtgacttcgagaaccggaatcacggccggcttcttggtgcccttttcctcggcgatcttgacctgctcgttgtagatgtcgtcgtcaacgtgcagcaccacgttgccgcggaagcggtagccctgcttcttctcgaggttggcgaaggcgatgaccagcggagagccgttcttgaggttctcgtagtgctggccggcggtgcgctcgtggtaagcgatgtgcgtgtcgtccagcacgaacagggacatcttcgggccgaggtccagttcgccgtccttggagacggtggtgatccaaccgaggttgttcttgatgaattccttgatttccggagtaatgactgccatgtcgaatcctttcatgattgctatggacaacgtatttttactctttccagagtaccggtttcgagcgcgactagcccggatgttcgctgtgagtaacctcaccttcgcacagctttcatccggttcttacctgcttggcgatgccgcgccccggccgcgcaccagccacacacctgtcacacacccgacgcccatcgaccggtcgattttggccggtagttcccgtaatctgtgagccgagagagccacaagttttcctaactgtcctgaggtgcaccatgggtttggtcgaacgtttcagcaagctgcgcagccgctggtcccgcagctttcccccgaatctcgcccgactcatgttgctgggctgcgccgcattatggggtggcagttatctgctcgccaaattcgccatggaggcgattccgccccaatggctgatgggtctgcgcatgataggcgcctgcctgtgcatgctggccttgttccataagcacatcgtgccgtatctgacgccgaagatcattgtgccggcgctcgtggtgggtctgacctactggggcacgatggtcacccagaccgtcgggttgcagaccatcgaacccgggcgcagcgcgtttctgacggcggcctattgcgtcctcaccccgttcgccacatggatcgtttcgaagattcggccgaaggccatcaacctggtcgccggcgtgatctgtctggccggcgtcggcttcgtctcgttgaagccgggcggttcgttgtcgctgggcgccggcgactggctgaccatcgccaccgcggtcatcttctcgttcaacctgactttcctgggcatctataccaaacggttcgaccctatcgccgtcacttttgtgcagttcggcgttgccggcgtattgttcatcatcggcgcgttgttcaccgaacccatgccgaacgccagctggctggcaccctcagtagtggccagcgtgctctatctgttcctcggcgccacgatgagtgcccagatcatgcagaacatcggtctggctcacgtgcctgcctcgcaggcgtcaatcatcatgtgtacggaaagtctgttcgccgtcacgttttccgctttgttctggggtgagaggatcatgtggagctcactggtgggtttcgctttgattttcgtcgccgtgctgatgtcggtaatcagaccgaccgggcagtcgctgcatcgtaattgacgatgtcccgcggcctgcggcgacgcgaaacgcacgtgtgtgcgccgcagggcgtgtccgacctgtacgaaggccgattttgaaggtctcgtgtaggcctcgccccgcttccatcgagtctcaggcaacctgtcagcccgacaccctacggtcgtgcattgtgaagaagttttttgaaggaatctccctctcatccatcgtggcgggcacccttgccgccgtcacctcgttcctgctcgcatcgaagatcggcatcggcggttcagtgatcggagcggcggccagttacgtcgtctccgccgtggccaccaagatctaccagaacgtgctcaccgcctccggcgaaaaactccaatcggcctcgtcctccggcaacgggatcacgaaggacgccgagaacggcgatgccgatggcggcaccccccgaacggccggcagccggaccgacgttcgggacgagcccgatacggcgacgggcgtgaccgccgatgatgcttcctccacacgcagaccgcgtgaaatcgtgttcagccgggcgaacggcaggacgtactcggtcgatgagctgcgcaagtcccgcttccgcgcttcgaagcacaccgccatgatcgtcaccttggtgtccggcctgctcgccgtggcggtgacggccggcgtcgtgatgctggccacgcagggacgcggcacggacaatctcgtatcccccaccacgaccacgcccgcgcgcaacgacaccggcacgcgaacgggcacccccgatcagaacaacgctctgccccagacgggcaccggcgatgattcgaagggaaccagcaaggattcgaaaaccgacgccccctccaccgacctcgacgccaacggcacctcgggttcgaccggcgccggcgcctcggattcgaaaaccgacggcaccgccaacggttcgaacggcaccggcacctcaaagaatccgaccaccgaagacccgaccagccaaggcgtcggcggcagccagaccggttcgaacggcaccggcaccggctcgacgcaaaaagatccgtcggaatcgacttcaaccagcaccggcaccagcggcaccagcggatcgccggccaccggcccagacgcgggcctgtctcgttaagtgtgtaactggcgttttcattgttgtgttccctcgcttggccagcggtcggcgaaggtgatggcaaaggcgttgagcgcgggcttccggcgcgcgctccatcgtatccgtcccttgccggtggggtccagcgagcggacggtcaggtacatgcacttgagcgcggcctgctcgtcggggaagtggccgcgggcgcggatggagcgcttgaatctcgcgttgagcgattcgatggcgttggtcgtgcagatcacgcgccggatctccacgtcatagtccaggaacggtatgaaccgttcccacgcgtccatccacagcctgcggatcgcgggatatctcgcctcccacttgtccagcatcgcgtcgcggcccgccgccgcggcggcgggcgacgtccagatgcccagcacgtcgcggtcgccctccagatccacgccaacggccacgtagaacgcgcggttggcgacctgcccgtcgcgcaccttgacgacggtcgcgtcgatgaacacggccgcgtacacacgatccaggggacgcgagcaccattcgtccttctcggccacgacccgctcggtgatgcgactgacggcctccctggacacgtccgccccgtagatctcctggaagtgggcgctgatctcgccggtggtcaggcccctggcatacagggacagcaccacctcgcccaccccgggcagccgccgctgccgtttcctgacgacgaccggctcgaacgagccatcgcggtctcgcggcacctcgatcccgaccggacctaccgaatcggtgaccacggtcttggcggtggtgccgttgcgcgtgttcgcggccctgccgtccttggatttcttgtgcttggcgcggcccaggtgctcggtcatctcctcgtccagggccgtctccagcacgcttttggtgaactgtttgagcagtccgtcgggccctgtcaggtccagtcctttttccttggccatgcgcacgaatgtgagcgccgcctcccgctcggcgttgcgtttttccgcgtccggcttcttcgtcggtgtcatgtttcccattgtcccagcacacatcgtccaccagcctttccgaccggccacacgaccggccagttaaggccagttacacacttcgagagacagtcccacgtataccggttctttgtttatgtaagggaatgattgatggttcggtttgcctgtttgtataatgcgcttatttatcttggtgccggatgtttttcggtctactatatggtggcctatcatgatgtgggcctgtcggtgctgctgatctccatcgtcaatgtggtgttcgacgtcagcgaatcggccagcgagctgcccacgtccgtgctgttcgaccggtggtcccgggaacggacgctgatcatcggcgtgttgtgccgcgtcgcgggattcatattgatgctgttctggtccgcgaacttcgccgtgctgtgcctggccaacgtgctggccggcatcggggccgcggtcgaaagcggcgcggcgtcctcgctgtacatcgaatacgcccgcaagcacgatccctcgctgggtatgaagaccttggtgtcaagactgtcggcgatgatcgctgtgtgcacgatatgcggcggtgcggtcggtgccgtgctgttcctgcttgactcccagctgatctggctgggcgcgacggtgttctacgtattggcgatcatcccgcttctcggtctgatgagggccgggtcgcgcaccaaggccgcagcgacggatgggagcgggacgacggaacggcaggccgaggcgtccgtcgaatccgatggctccgccgagccgggcgagtccgggacctcgctgacggtgttggatcatgtcaggcagaccgtggcggccgcggccgtgctgctgcggaagccggagatatggaatatggtggtgttcaatctgggtacgttgtcggtgctgacgttctggcagctgctgctgatgggccaccagaccggggtctggtggcagttcgccggcctagtgttcactaatatcgcgcagatcgtcggcagtcgtctgggtatgctgcggctgcatccacgttccggcgacattgcgatcctcgtgctcatcgtgtcggcggtggtgcttgcggccacgccgatgccggcggtgaggatcctggcgttcttcgtgttctcctgcgcgcagatgtacgtggcgaacacgatctccagcagcttgcacgagagcattgacgattcgatccgcgcgaccgcgttctccgtgggatcgctcgtattgatggccttcaccgcggtcgtcaccccgctgtgtggctacatcgccgacacgttctcgatttcctggggtacactgacgacgatccccctgctggtggccctcctcatcgccggacttgcgcgaaagcctgaatccgacaaacgggtaaaagtcgatatttcgttggattgagacgtcaagggcttgcggacacgatgtccgcaagcccttgacgtctatatgtcattcattcatggttggaatacgctcctcctacgcgtgcggttgaatggttagtccatcgctatcgtcggagggtgtcagggccgaagatgaaaccgtctgttccgggtgcgtgatccaggtggaatggattggcaacggtgtacgacttgtcgccgggtttcacgtcgtccgtgtcgaattcgttggaatccttgtcgagcagtgggccgtccagcgaggcgggacagtacacggtgacgtgccagttgccgtcgtccatggggatgagcacggtgtagtgccttggagaccgtctgctgcggcatcccttatggatgattccttgataaaggagtttcgggggcgggtaacaaaaacccggaaccgaagttccgggtttttgtctggctcctgcggctaggcttgaaccagcgaccgtccgattaacagtcggatgctctgccaatagacaacgggcaattcgactgccatgtcaggtatggtaatctcgaaccagccagaagatcgataagccaaattacctgcgactgaagtgaggacggaatcatgcgtagcgagtcccctggtctgttgtattgcgcgggtgcattaatcgcagtgacctcttgggctcttttcatgttctcgaaagaagtccatcggaaaggccgaacagtatccatcctgagattgcccgtcatttggatactgttcctcgtgagttcggcgccggctctcgcatcatatccggtttttgaaatatactcaggattcatggatccggatgtcctcgatttctacagtcagccattcatacggctactgccagcagcgacctgcatagtgaatctgtgcgtatcgacatgctgctccatggctcttgtcagcaagcgcagaaaaaccgaacatcgaaaaatctgaaccacagcgttcgagatgagatgccatggaaaaaccgctgtttccgctggccttggtgccgctggccgtcggattggtcctgatatacgtcgtgattggatccaaaaaccgggaagagaacgcaaaaggactcttctgcgtgtcttctcggcgctcatggtcgttgccggcgcgttgatcatcgcgagccaactcgcatgacgcttcacgctgcggctcggcttcccggctatcggccgcggccagtccacggctctccgcgccattcccgcaatcacgtctcttccccggtctcaagcccatgagacacttggagccatgactaccattatcatgcgcacctcgcatgataatggtagccaactgtttttggctttgttccaaggctttcgatttttgggaaacctaccgattaccctcgtttctccacgaggcacccacaggcacccaagaataatccgggaacgttccaccaccctgccggcgctcagcgtcttcgccgaccggcacggaaaagtgcaataccccctgtggtttcatgatgttccgcatgggtggtgcccagaagcattcacccggcagcatgtctccatggcggacaatagacagaacgatacgcagcccgtgcaaccgtcccagccgccaatggcatccaaatccatcccgaatcccacaggcccattgcagacagcccagatcagctggctcatggtccaaagccgcctgcgacgccaccgtcccaatagcaggaacggtcagctgcgcagtatgatttccgccctgtcggccagttcccgttcgcgcacacccatggcagacaggatcgcttggctccgcgatggcatggtggaggtcacccgtgcgaccaatgcggagaagcgaccgaacaattccaagtaatcgtccttgtcaagcaaataaccaagatccccgatggcctgatacacgttctcgttagcgcgcccatcgtaccgggcacaatagcagcgctcgtcatgcgcgcacaggttgcggtagaacaccagtctgttgaagatgctgtccagccgcttgatggtgatgcgccgtggcctgtcgtgcgtgtccgcatacaaaccggtgaaactttcggcgaccgccaatcggacggccggggactggacttggaagaaccataccgtctggccgaaggaaagatcgttggccagcacccacaacgggacctggccgttgtggtcttccatgcaatggcggatatacgccttgccgccatagtcgcccctgttgcgcgggttgccgtccaactcaagtatccgcttgaagaccttgtcgatcaatgccatggcgctcggacggcacctggaatcataatagtcgggattgagatacgggttgacctcgtcggggtgcagcccggtgaactcatgcgcgcacactgccttgagcgcggcctccgcccgtgtgatggaggaaaacaacagttcacgcaactcacggtcgaacaggaacagggcgtacagatcatcgaaacgcgcgcccgttccgtaccggtcatcaccagcggtcaggcatgcctttcggtcgaggaacaaatccttatagccattgacgatcggataatagccctcgcgcctgagcacatgacccgcaccggcatcgacggccatgccacgggagcgcagaatgcgcagctgttcgttcacactcctgtagggcttgcgcaacgacatggatccgacctcccccaatccagcgatgaaagcactgaggccaccccgcgtccacggaatggcctcagcgaaccgaacgaagtccagcttatttcgctgttacagaatagcgccaatcccccgcgaatgcaacccagccagacgtcggacgatataatgaaacctccatatcatcattccagaggcacacgccggtccatcaagaccaccaccagaaaaacccaaacgcccacaaaggagaagacgcgcgcctccacgaggcctgtatgaccctcgctctttcaagcgtctgcacgaaccaggcgaagtcgtagatgccgtatgtcgtacatcgatgatgtcgggtccccaagcagggtgctcgtggctcttcaccaggaggctggaacactttctcgtcgatgccgcaggagcgacgcaagccttccgctccttgaactgggcctggcctctccggcaagccctacgacaataggactcactcctccgcagttcgagaatc

SEQ ID NO: 3250 - DNA, 5644 bp, Unknown
  R53_2m  MAG No. k141_7884
ccgtgttcatgcgctcgaacgggacgggcatacggttctcgcgacaccactgccacaccgtctgctcgttgaagccctcacgcctcgcccattccctgacacgcatgacttaattatatcacacgaaaacaaactaaagcagataatcaatctagcaggctataacccctcagtcgctgcgcgacagctcccctcacagaggccgagccgtaaagcggacagcccagtggactgtccgtaggcgagggtgagccgataggcgaaccagcatgtcgcgagcgaagctcgtccttaattgcggacgagccagagcataaatcagtccgcggaggtgaagccctgcggctcgccggcctcggcgaacttggcgttgtgggccttcttggcggcggcgatcatcagcttgatacggttgagctgattggcctcggaggcacccggatcgtaatcgatggagacgatgttggcttccggatgcagacgacgaatcttgccgaacatgccacggccggtcacatggttgggcaggcaggcgaacggctgcgcgcagatcacgttcgggcaaccctgttcgatgagttccagaatctcggccgtcagcagccagccttcaccggcctgcacgccgatggaggtgacttcggcggccttcttgaccagttcgggcatcggctcgtcctgcttgaacttgccgttcgatgtggccagcgcggccttgatcggcgcgttgtacaggtcgaggcccttgcgcatcagggcgtaaaccgtcttgttgccgcccatgccgaggttcttctcgttccagtcggtgatgtaggggcgggtggtcatgaattccatgatgccgggcaccacggcctcgcaatcctgggattcgatgacgtcgaccacgtggttgttcgcgtccggctggtacttgacaagaatctcgccgaccacgccgacacgcaccttgcgtggaatatcacgcagcggcaatgcatcaaaggacttcacgatctccttggccagcacgttatacggcagatagcccttcttgatgctcggcgtcttggctgcggtcttggaatagccgtgatgctcgatggtctcacgcacgatggtgtcccacagctcgtacagcttgttggccgaacctttctccacctcatacgggcgtacgcggtagaggcacttcatgagcaagtcgcccagaatcagcgccttgatggcacggtgcagcaggggcagggtggccttgaagccggggttgtcttcgagcccctgggtagaaatggcgatgaccggaatctgcggatagccggcatcgaccaaagccttgcggatcaggccgaagtagttggtcgcacggcacatgccgccggtctgggtgatggcgagcgctacatggtcgggatcgtattcgccttccagaatcgcgtcgatgagctggccgacgaccatgatggccgggtagcaggcgtcgttgttcacgtatttgaggccggtttccacatcgccacggctcgcgtgcttcaggatgtcgaacttgtacccaccggaacgaatcaccgcttcgaccaaggacatgtggatcgggctcatctgagggccaacaatcgtatagttcttcttcatgtccttgacgaacttctcgcgatgagcgtagcgggacatggtggcgttgttgtggccggacttcttggcgttcttggcgttcgtcacgccggtggtgccgtccgaagtgccgttcttgctggcgactgcggcctgcaggtcgcgttcggcggcacgcttggaggcggcgcgcatggccttggtgagcttcgggttggcggccatggtgctgtcaagcagaatctggcggccgggggttggcgcggtggagccggtcttgcggaatccggtggacttggggccttgcacggccttggccgcggcggcttcgcgggccttgttggcttcgcgttcctcgacggcggccttgagcgagcgcagtcgaatcttggcggcacccaggttggagacctcgtcaatcttcagcagcgtgtacacgtccgccttgtctgccaggatttcggccacctgatcggtggtgatggcgtcaaggccacagccaaaggaattgagctgcacgagttcgaggcccgggtaggaggccacgaagtgtgcggccgcgtacagacgggagtggtaggcccactggttggtgacgcgcaacggcatcttggtgactgtgcggtctcccacgtggcggaatccggcggcgttcttggagcgcgggtcggcttcgccttccgagaggaattcggtgaggttgagcttctcccccggctgcagttcgcagatggaatcctcggagagcaccaccatgccgagcgagcagatggtttcggggatgccgtggttgatttcggggtcgatgtggtaggggcggccggcgagcacgatgccgcggcagttgtgctccttcatgtaggcgagcgcggtcaaaccttcctgctgcacgtcatgcttgaagaccttgtcttcggcgtaggcggccttgaccgcggtttcggcctcttcgcgggtcacgttggcccacgcaaactcttcgacgatgcggtcaaccatgagctcatggttggcgaggttgaagtacgggtgcatgtagcgcacgccgtcctcgcgcagctcaggaacgttggcgccgacgacgagcggatagttggccacaaccgggcagttgtaatgattgtccgtgttgggcacgaggttctcctcgtagctcacgcacgggtagaagatggtcttgatgcccttgttgatcagccacttgatatggccatgcaccagcttggccggatagcagatgttttcggaggcgatggattcgatgccagtctcgaacagctcgtgggagctgcggccggagatcatcaccttgaagcccagcgtggtgagcagcgtgaaccagaacgggtagttctcgtacatgttgagggcgcgcgggatgccgatttcgccacgggtggcctttttatcggtgagcctgcggtaggcgaagcaacgcttgtacttgtagtcgtacaggttcgggcggtcggaacgcttctttttggcgtcgccaccgcgttcgcaacggttgccggtcacgaagcgtgaaccgtcggagaacgtggtgatggtgagcttgcagtggttctggcacagcttgcacacgtcacgctcggtggtcatgctcatgttgtcgagcgcttcgccggtcagaatggagctggcggtgtgggtcacaccgtccacgacaacgacatggacttcgggcttggccgtctcggtcttcttgaaggctgcggccttgggctcggacttgggtgcgggctcggccttggactgttcctcggacccatcggccttaaccaccacgtccaagtggtcggcctcatcctgatagtgcatgcgggcggtcagggcggcgccaaacgcgcccatgaggccggcgatgttcgggcgggtgacctgacgttcggtgagcagctcgaaggcgcgcagcacggcgtcgttgaggaacgtaccgccctggaccaccacagtgtcgccgagttcgccggaatcacgcaacttgatgaccttgtacagggcgttgcgcaccacggagtagcataggccggcagcgatgtcctcgatggaggcgccttccttctgcgcctgcttgaccgaggagttcatgaacacggtgcagcgcgaaccgaggtccaccggatgggtggaagccagagccttttgggtgaattcctgaatcgtcaggcccatggacatggcgaaggtctgcaggaacgagccgcagccggacgagcaggcttcgttgacggcgatcgagtcgatgacgccgtcagtgatggccagatatttcatatcctggccgccgatgtcgatgacggcggtgacgccggggctgaccatttcagcaccacgatagtgggccatggtctccaccacgccctcgtccaggtgcaggccggtggtgatgaggccttcgccgtaaccggtggcgcaggagcgtgcgatccatgcgccttcgggcagctcggattggatcttcttgacgatgttgatggcggcggtcagcgggctgccttcgttgttggcgtagctggaccagacgatttcacggtcgtcattgacgagcgtggccttgatggtggtggaaccggcgtcgatgcccaggaagtgcgggccatgcgcgccttcgagggtgccgatgtggatgtgttccttgtggtggcgcttgttgaagtcctcgcggtcggcctcggtggggaacagcggcggcatggtgggcgtgttggagggcaggttcttcagctcgtccagacgcatgaggatctcatcgcaggtgtgggcctcgaaatggtggccctgatcgtcggaatccatgtcggcctgcaatgccgaaccgtaggccacatacaggtgggcgtcggtcggcacgatgaactcgtcgaccttgccttcaagggcacgctggaaggcggcgcgcagttcggacatgaagaacagcgggccaccgaggaagatgacggtaccgtggatcgggcggccagcagccaggccggcaatggtctgcgtggccactgcggtgaagatggaggcggcgagatcaggcttggccgcgccgtcgttgatcagcggctgcaaatcggttttggcgaacacgccacaacgcgaggcgattggatacaggttctcgtagctcttggccatctcgttgaggccggcggcgtcggtgtcgagcagtgtggacatctggtcgatgaacgcaccggtaccgcctgcgcacgaaccattcatacgctgctcgggcgtgggcttcaggtaggtgatcttggcgtcctcgccgccgagctcgatgatgacgtcggcttgcgggtactccttatcaatcgcctcggtttcggcgatgacctcctgaatgaaaggcacatgcagattgtcagcaagcgccagaccgccggaaccggtgatagacaggcgaatcggctcatcgcctcgacctagttccacgagctctttacggatgtcgaccaacaggccggccacggtggcacgcacgttggcgtggtggcgtcggtaatcggagaagagggtgtctttcagggaatcggactgatcaagcaccacggccttgacggtggtggaaccgatgtccaatcccacacgcaggggcttcgggtgtgaagcgggctttacgctcgcgtcagtgacgatgtcaaccatgtgttcctcttaattccgacttccgggtatgtgcgccttcaggcatcatgagccgtttcgggacggctggcagatacctgcggacggcttcgcccggctacttcttctggaatattagtccgaccacctgcccaacgtgacgccgggcatggtgatttcgctcacgggaagggcgttccccaacagttccgacgatattgctgagtgcggcattccggacctgctactacgaggcctgttggccttcgccggcttcgcggtctctcaaatagatttcggggatatctcgttcttgatcgtggagcttggcccagatgaccggttcgccggcttctagggacttggacacatcgaggatgcgctggtttctggagccacggaattgcagcagcgagtccttctggtc

SEQ ID NO: 3251 - DNA, 16674 bp, Unknown
  R53_2m  MAG No. k141_7941
ccgtgttcatgcgctcgaacgggacgggcatacggttctcgcgacaccactgccacaccgtctgctcgttgaagccctcacgcctcgcccattccctgacacgcatgacttaattatatcacacgaaaacaaactaaagcaaataatcaatctagcaggttataaccctgttcaccagcggcttcggctccatcttcctgcccgccggacgctcgatccgcgcgcgagactcttccttctgctggtggcgaacctcatgctgttcttccatgtagggctcgccacgcaaatcgtcatggtcgtgctgttcctgttgcccctgctggcggccgcccgatggcgaaccgcgttgaacttcggcgtgacctatgccgtactcaccgcgctgggaatgctcgaccccgatgccctgggactgccgtggctgcatgtggtctccgcgctggccgtgggcgtcacgatgatgctgccctgtttcatcaccgactcgcatggctcaacggcgtggccgaccggtacgtggtattcgacggcggacatatcgtgcaggattacgaggccgatgaattcctgtccctctcccccggctgcgtggccgccatgggattgcgggcgtttgacttggaaccgtatcggcaccggattgcggccctggcttcaagcccggccgccgaatccggctccacggacaatgcctcgctcgccatcgaatgggtcgccgaggacgacaccagcctcgacacttacgaatacgccatcgaccatgtcatcgagcacgggctcgaaagctcccccaccttcgtactccgcaccgctgatccggccgccgaagacagcccgttccgctggctgctggccatcaaccctctgccttcgcgcaaggcgttcgccgagggcgggctgctcagccacctgcatttccagtacgccaacgatctgcacacgctcgtcgccacggatgaggccaccggcaccgagaccttgcgcaatccgcgttggtacgcacaccatgtgcgccaacgagggaaccaccgaggaccgttgcgccatcatccgtgcgttgcaccacttgcagtagatctggcaacatacggcggtatgacggctccccgctagtgaaacagcagcgcttcagtagccgtgcgagtgcagatactcgtcatcgaagccgaaataatggccgatctcgtgcaacacggttttgcgaatctgttggcgtagctcggcccgtgttgagcatacgcgttcatgcgaccccttgaacagggtgatgacgtccggcatcacgccgctgtagcccgtggttcgcttcgtgatgggtatgccctcatacagtccgagcagctcaccgcacggattgctcattgtggccagttcgcgctcattgggctcgtccgcaacgacgatgccgacattctccagcacccgcgcaaaccgttcaggcaaatcatccaacacctgttcaatggcccgttcaaactcatcgtcaccgatgtgcatactcaatccttcacctgttgcttggcccccacgataacagacatattccgggttccggcttcttgcgggtgccataacgttgcgcggaacgcttccaatcattcattaggtcgattcttcattcattaggtcatgaggctgcgattgtcggtgttggaatggcaccattccagtggtgactgtcagagctcaccgacctaatgaatgaagaatcgacctaatgaatgcgtccggtcatatctcattgtgaaaatgacccggtattgcggtattccgcaattgcacttccaacgattctgaagtattcatccagattctgcgtggtagcgaacgttcttcttgtggcgggaaaagtcttatagcccgcgaaggagaggttgttccttttctcgatatctccttcccatcggtttcggtcatagtggtaccgtccgtcgtattccagaatcacatgatcattcggatacaccatgtccacaatcacttctttgttctgcaatgggaggtatatcggagcattcacctccaattcgggtaatccacgttttaccgattcaaggcgaaggatgctttcctgcggcgaatcggtgttctctctgcacaacgagagcgctttgcgaaataatctgatacctgggaatctacctatatcggcgaggaacaacgatatcttgtctttcgttgtctgtttcaaatgctcattacggcaggtggcccaatccaaggcaatgaccatactttccacatcgacgaactgtgcgatctgacacagcgcctgttccactgaaaccacggcgataagatcatcaatcatcgtctggtcaatgccatgaccccaataatggcattgcgtttcggtgagattcgacaatctttcagccccggacaccgtaacgtgcagtttgttggggtcatagttgggcttgtaattcagcgtggccgtcatgccagcaagctgtagcctggtgccatggctgaagcaaagctcctgtgaagtgcgcatcgatctggcacggcattgttccagtgttttctgggcgaggtctcgtgcctcatcaagtgtgaagaacgtgttgtatgcataggactccatgccatccccctgatggttgtatccgtgaaccgcgttattcacggatacaactcacgatggcataaccaacttctgcgcgcaaccagctcggccgaatcggtggatatgtgtataacctgccagctcagctgttgcggttgatctcgatgtcggtgacggtgaggttggcctcgttgatcaggttgaagaggatgacctcggccagcggaccgggctgcatgaaggtgtgctgcttggcttcggagacgtaatcgtggctatcacggtagaaggcggtgtcgatgccgcccggatagacggcgaccaccttgacgctggtgcccttgtatgcggcctgcaggctcttggtgtagcccttctcgccccacttggtggcgcagtacacgctttcgttcgcgttgccgcgcgtggcggcggtgctcatgatctgggcgattttcacgtcgcgctcgccacaggccttgagggtttccaccgtccacagaatcatgcctttgagccccttgaggcatttgtcaatgtcagcggcttcataggcggtgggcaccttgaacgaaggctggccggcgttgttgatgagcaggtcgatgtggccgagcgcggcgatgctcgccacggattccttgacaaatgcttcgtcggtgatgtcgcctacgaaggcgcggtaggattcggctggccactgcgcgctcagctcggcctgacgttcggcgttgaagtcgatgccggccaccagccagcccttggcgatgagttggctggcgagctcgtagcccaaacccagcgcgctgccggtgacgatggcgatcttctggcctgttgtggttggcatggttgattcctttgcatgcttgcgagactcccctcagcgaggggagcctagggttaacccgttctttgctgacagctcccggtaaggggggccacggtaggactattcttcggctacgagttcgaggtacgaatcattccagaggtcttcgtcgccgtcgggcatgaggagcacgcgctcggggttgagcgcctcgacggcgccctcatcgtgggtgacgagcacgatggcgccctcatacttggcaatggccttcagaatctcctcacgggaagcggggtcgaggttgttggtgggctcgtcgagcagcagcacattggcccgcgaggtgaccagcgtggccagagccagacgggtcttctcaccgccggaaagcacgtgagccggtttcatcgcgtcgtcaccggagaacaggaacgagccgagaatcgaacgggcctgcgtgttatcgagctcaggcgccacatgctgcaggttctccaacacggtggcgttcagatccaaggtgtcgtgctcctgcgcgaagtagccaatcttgcagccgtgaccgtattccacggaaccggtgtccggctcctcgatgtgggccagcaggcgcagcgtggtggtcttgccggcaccgttgtaaccgaggatcaccacacgcgagcccttgtcgatggccaggttcacgccggcgaacacgatgttggaaccgtaggccttggaaatatccttggccatgatcggcgtgcggccgcagggcgcgggctcagggaaacggatgtccgccaccttctcggccttctgcgcctcggaggtgttttccagcagcttttcggcgcggcgcatcatgttctgcgctgccacggccttggtggccttggcgtgcagtcggatgccttgcttcatgagacggtcggccttcttctcggccacttcgcgttcgcggcggcggcgctcctcgtccaccacgcgctggtgcaggtaggccttccagccgagcgaatacatgtcgatctggccgagctgcgcatccagatgccagaccttgttcaccacttcgtccagcagttcggtggagtgggagatgaccaggaagccaccctcgtacttcttcaagtagccgcgcagccattcgatggaatcggcatccaagtggttggtcggctcgtcgagaataagggtgtcggcgttggagaacaggatgcgcgccagctcgatgcggcggcgctggccaccggagagcgtgccgagctgctgctccatgacctcctgcggcaggccgagcgaggcggccatggaaatcgcctcggactgggccgcgtagccgccagccttgtcgaagtcctgcatggccttgtcgtaccgggtcatggccttgctcatcacgtccggatccgggtcggtcatatccttttcggccttgcggatgcggttgatgatggtggcgatgtcacgcgcgctcatcatgcggtcgagagcggtctgcgtgggatcagaggcgtgcgtgtcctgcggcaggtagccgagcttgccggagacgcgcaccttgccggcggtgggcaacatgtcgccggtgatcacgcgggtcagcgtggtcttgccggcgccgttgcggcccaccagaccgatcttgtctcccttggccacatggaagttggtggggtgaagcagcgtgcgcgcgccgatctgaatttcaagtccctgcacctcaatagccatgaataacctacttgcctgttacgaatactgtctcttaccaaagtccgactgtccatcatagcgaacaccatgccgaccgggctcagccgacgctcatgcgtccatacgcttatacgcccgtagactcatgcaataacctgcaatgtgcgcgataagacagttgaatcgtgatttccgtcgtacactatccatatccgggcacgcttgcggcgcaatgcgtgtgcagtataggaaggatttcccacatggaaccaaattatctcgtgttattgggaatcgtgatcgtgattgtgggtttcgccctcaaacttgatgcgattctgatcattatcgtggcggctgtggtgactgcgctggtcggcggcattggcgtcgacggcttcctgaccacgttgggtacgtcgttcgtctcgaaccgcagcatggcgattttcatcatcgtgttgctggtcaccggtacattggagcgcaacggtctgaaaaccgcagccgcgcagctgatcggcaaagtgaagaatgcgacgcccggtatggtgatcgccctgtatggtgtgatgcgtctcgtgttcgccgcgttcaacgtgagttttggtggcgtggccgggttcgtgcgtccggtcatcatgccgatggcggtaggtgcgattgaagcgtccggtcacgagccgaacgacgagtatgtggaagagctcaagggcatggcttccggcatggagaacgtcgcatggttctttggccaggtgctgttcgtgggtacggccggtgcgctgctcgtacagtccacgttgaagccgctgggttatgacgtcgaactgttgcgcatggccattatcgagattcctgtcgcggtgattgccgtggcggtcaccgccgtctattacatcatcaaggacacacgactgcgcaagaagtactacggtgccgaagccgccgctcaggccgccaccgctaccaccaccggcaaggaggcctgatatgtcgttcttcatggaccccagcgtgaccgtcggcacgaaaatcctcgagttcttctatattttcatgggtttcatgtccgtgtatgcgggcgtacgcaacctactcgataaaaccaacaaggcccgctacggcactttcgtgttctggacggcgctcggtatcgtcatcgcattcggccgttggattccggccattacggacggcgtgctcattatcatcatggtcattcccgccatcttccgccaagtgcgtaagggctcggcatccgattcgagcgctcccagcaccgccgaagtggccacgaacttccagcacatcggcatgcgcatcttcattcccgccctgtgtctgggcgtgttcgccattatcggcgccctgattcccagcgtcagcgccctgaccggctgctgcatcggtgtgatgattgccgccgtgattctgttcgcgttctcgcatgacaacaagccggtcgtattcctcaacgattcggaacgcctgttgtctgccatgggtgcgctctgcatgctgccgatgctgctggccagtctcggcgcgattttcacagccgcaggtgtcggcgacgtgatcgccacgctggtcggcggcattattccgaagggcaacgtcacgctgggcatcatcgtattcggtgtgggcatgatgctgttcacgatgatcatgggcaatgccttcgccgcgattaccgtaatgaccgtgggcattggcgcgccattcgtgctcgcctacggtgcggacccgacggtgattggcattctggcgctgacctgtggctactgcggcacgctgtgcacgccgatggccgccaacttcaacatcgtgcctgtcgcgatgctcgatatgaaggaccgcatgggcgtgattaagaagcaggtgctgcccgcattggtgatgattgtggtgcagatcgtctatatgctgatcgcgcaataacctcgttgtccaaataccacaacaatccgtgaaataaggagctaatgatgagcaagattctggtgaccggattcgatccgttcggcggcgagccggttaaccccgcattcgaggcagtcaagctgttgccggatgaaatcgccggtgcgacagtggtgaaactggagattccgacggtgttcacgcgcagtgcgaccgtggttgaggaagccatggtgcgcgagcagcctgactatgtgctgtgcattggtcaggctggtggccgttcggctctgaccgtggagaaagtggccattaatttggccgaggcgcgtattcccgataatgatggcgagcagccgttcgatacgccgttgcgtgaggacggcgacaccgcgtatttcgccacgttgccggtcaaggccatggtcaggaacatcaatgaccacgggattcccgcattcatgtcgtatacggcaggcacgtatgtgtgcaacagcatcatgtataacgtgttgtatctgattgaccgcaaattccccggcgtcaagggcggcttcattcatgtgccgtatgcgaccgcgcagggcgtgggcaagccgaacggcacgccgaccatggaaatcgcgaccatggcgcgcggcatcgaagccgccatcgaggccgctgtgagcaccggaaccgacgccaccgacatcatgggcgaaacccactgatacgcatattgtcatgcccctgctgacagcagttgtcagcaggggcatcgctatgcgttgaacgttacagttcgcgcagctgggcggcgatctggatggattcgacgctggcctcggccttgttgcgcgtctcctgccattcggtagcgggcacggagtcgagcacaatgccggcaccggcctgcacgctcgcctcatggtcgcgcaggaacgcggtgcggatggcgatggccatgtccatgttgccagagagatcgaagtagccgacggtgccgccgtagatgccgcggtcggccggttccaactcgtcgatgatttcgactgcgcgcggctttggcgcgccggaaagcgtgccggccgggaacgcggacttgaacacatcgaatgcggtcagcgaggggtcgaccttgccggtgaccgtcgagcagatgtgcatgatgtggctgaaacgcttgatgtccatgagctgcacgacttccacggactgcggcacgcacaccttgctcaggtcgttgcgggacaggtcgacgagcatgatgtgctcgctgcgttccttcggatcggcaagcaattccttggcgaatttttcgtcttcctcaggggtggcgccgcgagggcgggatccggcaatcgggaaggtcatcgcgtggccgttgtccaccttgatgagggtttccgggctggagccgatcacgttgaagtcgcggccctgagcatcggtcaacgccatgaaatacatgtacgggctcgggttcagcgtgcgcaacacacggtacacgtcgaacgggtcggcaggcgaatcgatgtcgagacgctgggagatgaccacctggaacacgtcgccgtcgacgatgtgctgcttggcgcgttcgacggcctgctcgtagtggcttttctcggtgcggaagcgcagctcaggctgggcgaccgtttcgtccaagatgttgacgcgggactcgcccggagccggggtggcggcatcgtgctgcatctggtcgagtcgagcgacggcctcgttgtaggcgacgtcggcgcgggtggatttatcatccacgttcaccgcgttggcgatgagccacaccgaaccggatacgtggtcgaccacggcgatatcggtggccagggcgagcacggtctcaggctggccggtctcgtccggagcttcggcgcgcagggtcggttcccagtggcggatggcatcccagccgaccgtgccgaccagaccgctggtcaggttcggcaggccttccacatgcggggccttcagagtcttcaacgtggcgtgagcgacttcgaccacgtcaccggtgactggcacaccaaccgggaccttgcccaaccagtcggcctgaccgttgttggagcgcagctgggccatcgagttgacgccgatgaagctgtaacggctccacgtgccgccgtattccgccgattcgaggatgaaggtgccggatcggccgccggcgagacgctcgtagaagccgaccggggtgagcgagtcggcgagcagacggcgcacgatcggaatcacacggtagccggcgtcggccagttcgtggaactgttcgcgactgggccaggtggcgccccacttcaggtgtttgacgctgcattcgctcatattcgctcctttacttacaactcgatgtcttgtttcgtagtacgcggtcgttcggcttcccccagtcagggaagcccgttctactgctcggccgggcggtggccttcgaccacggacagggggccgccttcgaggaagcagctgcgcttgccggtgtggcaggcggcaccgacttggtctacttcgacgagcagtgcgtctccgtcgcaatccagggacacgcccttgacgtattgcacatggccggaggtatcacccttgcgccagtattcctgacgggaccgggaccagaaggtcacgcggccggtggtcagcgtgcggcgtaatgcctcgtcgttcatgtagccgaccatcagcacctcgtgtgtgtcgtactgctggatgacggcagcgaccaggcccttggcgtcacgcttcaggcgtgcggcaatacggggatcgagttcagtggaattgtcgtatgtagtgtctgtcatacctatcttctttttgtggaccaccctcagtcagcttcgctgacagctcccggattatgtgcgacatgtgcatagcgcactgctacgaacaatccactggattgttcgtccagcgggagcaaggtgtattcgtttagcgaacggtgtagccgtgcttcttgagttccgccttgacatcggcgatggtcaggatgccgtaatggaatacggatgcggccagcaccgcgtcggcacctgcttcgatggcgggcgggaagtcctcgaccttgccggcaccgccggaggcgatgatcggaatcttgacttccttgcgcacggcgcgaatcatctcgagatcaaagccttccttggtaccgtcggcgtccatcgagttaagcagaatctcgccggcgccaagctgctcggcgcgcttgacccaccagatggcatcaatgccggtggatttgcggccgcccatcgtggtgacctcgaagccggattgcgtgtgttgctcgcccttttcgcggcgggcgtccacggagagcaccagcacctggttgccgaaacggtcggccacgcggctgataagcgacgggtcattgatggccgccgtgttgacaccgaccttgtctgcaccgcagcgcagcagcgagtcgacgtcctcgggcgtgcgtacgccgccgcccacggtcatcggaatgaacacctgttcggcggtgcgggagaccacgtcaatcatcgtgttgcggtgggagctggatgcggtcacatccaggaaggtgatctcgtcggcgccctgacgatagtattcggccgccagctccaccgggtcgcccgcatccttgaggttttcgaaatgcacacccttcaccacgcgaccggcgtcaacgtccaggcacgggatgactcgtaccgccaacgacatgcttcactcccctgttcggctttgcattacagtccttcagactacctaccgcccgttacatgcgccgcacccgtttctggaatatgagaatccgagctgacgcgcccgctgcgcgatctcaagaccgccgcgccctgccgttatatcgccgccgatatcgagaacgcgggcggccattacgtcgacgagcagctgcacgtggacgacgccaacggcttcaagctcatcacgtcccgcaagcccgctgatttggactacttcgtggacgcaatcaaggatgcgctgaagtaactaccgctccttagcggccaactgcccgcaggcaccgtcaatgtcctggccgcgggtgtcacgcagtgtggcggtgatgcccgcgcggtgcaggatctccaggaaccgctgttcgtctcccggcttggaggcggtccacttcgagccctcgatggggttgagcggaatcgggttgacgtgggcccagttgtcgccgtaatggttaagcctcttggccagcaactgcgcatgctcggcctggtcgttgatgccgcgcatcagcgcgtattcgatactgacgcggcgcttggaggccagccaataatcgtgcgcggcatccaacacctgcgtggtgttgaaacgcttgttcatcggcaccagctcgtcacgcagttcgtcgctgggggcatgcagggaaacggccagacgcacgggaatgccttcggcagtgagcttcttgatgccggggaccacgcccaccgtggatacggtgatgttgcgcgcggaaatgccgaagccttcgggaggcatggcggaaatctgtcgtacggcggacagcacggagttgtagttgcccatcggctcgcccatgcccatgaacacgatgttgctcaggcggccctctcccccggccactttgccgtcacgcatcattttggcggccacacgcacctgttcgattatttcaccggtggacatgttacgggtcaggccaagcttgccggtggcgcagaacgggcagcccatgccgcagccgacctgcgaggaaatgcacagcgtggtgcgggtcgggtatcgcataagcaccgattcgatgagggagccgtcgaacagcttccacaaggtcttgatggtggtgccttcgtccgccacttggcgggtcacctcggtgatgagctgcgggaagaacgcggcggcggcctcgctgcgcttggctgccggaaaatcagtgaattcggcggcattcacatcgaaatggccaaagtaatggttggcgagctgcttgactcggaacttcggcaatccgagttcggccgctttctcgatgcgctgctcgggcgtcatatccacaaagtgcagcggcggcttaccacggcgggcatggtccttggatagcacgtcacggaaggcacctgatgtgccgccgggagtaatgccggtttccggagtgtcaggatgctgtgtggtcatgatgggttcgcttcgctctcaatatcagaaaatagtcaaacatgcaatagaaatatcagaatccaccatacggcgtgccgcatacgaatcagatggcccatgtcttagcccatggcgaacgcatattgaacgatgattgcccccatatatgacatgtggcaccgtgcgatatacacacgatgccacattgttcatgcacgaggcatgcgaatcacagtccggtgacccacagcaaggcgcaggtgaacggtgcactcatcaaaatggaatccacacgatccatcacaccgccgtgtcccttgagcagatggcccatgtctttgatgccgatatcgcgcttgagcatggaagcacacaaatcaccgaacgtgcccacggcgccgatgagaatacccgccacgatcggcacccaccaacgagtggcccatttcgaggcatcatacgtgcatgcgaatacggcgaatgcgccagccatggcgaagagcatcgagccgatcaggccctcaacggacttcttcggcgagatacgcgggctgagcttgtgcttgccgagccaggcaccggcaaacaaaccacccgtatcggagagggcgggcaggaacaccagcatgatggcgtgtgcaatcggatgcccattgaaagtcagcgagatgatgatgcagctggccagcaacggaatgtacaacacggtaagcacggacacagccacatggctgagccgggaatgatgctgttccccgccctcatgattgaacgaggattcgaggcgcgcgctggcatccgtgttggacagtttgccggcaaccgccagagataggcggttgccgacgctgatttttgcgctggccgcgatggcgaccagaataatcgacacgatgatactcagcgacatcgtgatgagatggtacggggaataataggtggcgatgagggtgaaggacgcgcacagccacagcatgaacaccgggatgtgcaggcctacggtggcgaagtccaccctgagctcccacagcgccagaatcatgaacacgactaccagcagcacgaagaggtcgacgctgagcagcaggcacgcgacaataaggatgaccagtgccgcgcctgtggcgatggcctgcggcatgttgcggccggtcttcttgttgatccggtcgagcgtctcctcggcctcttcatggagttgttcgttgcgttccataattctccggacctggtctgaatcagacctccatgatctccttctgcttggtctccagcagagtatcgatctcgtcggtaacggacttggtgaccttgtcaagatccttcagcaggcgatcgccttcgtcctcacccatctcgccgtccttgacggccttgtcgatggtttccttggtcttacggcgaatgttgcgcacggcgaccttgccgtcctcggccttgcccttggcgagcttgacgtactccttacgacggtcctcggtgagttccggcatggtcaggcggatgacgttgccatcacggttcgggctgatgccgaggtcggagttgcgcagggccttttcgacggcaccggcctgggaagcgtcaaacggggtgacggacagggtgcgcggttcgggaacgccgatggaggcgacggccttaatcggggtgggggcaccatagtagtccacggtgatgccgttgagcagggccgggtttgcgcgaccggtgcggatgccggagaagttttccttggtgttttccacggtcctggccatctgttccttggcctggtcgataagagacatattcactccttgtgtgttggtgttcgtctgtgttgttcgtctatgaacgtttgattcgattgtaggcgtttgcggcttactcggccacgcgcgattcggcggtggagaccagcgtaccgatttcatcgccgacgagggcgcgggtcacgttgcccggctcttcgaggccgaagacgcggatgcgcttcttgttgtcgcgggccatggacagtgcggaggcgtccatgactgccagattgtccacgagggcgcgattgtagctcagggtttcaaaacgcttggcgttctcgtccctgcgcgggtcggcggtgtagacgccgtcgacgccgttcttacccataagcacttcgtcgcagtggatttcgagggaacgctggatggaaaccgtgtcggtggagaagtacggcatgccggcaccggcgccgaaaatcaccacgcgacccttttcaaggtgacggatggccttgagcggaatatacggctcggcgacctgtcccatggtgatggcggtctgcacgcgggtggcctgaccctcctgctccaggaagtcctgtagagcgaggcagttcatcaccgtgccgagcatacccatgtagtcgccacgggaacgatcaataccggcctgctgcagttcggcaccgcggaagaagttgccgccgccgaccacgatggccacctgcacaccctgttgtacggccggaacgatttcctcggcaatgcgacgaatcacatgggtatcgatgccgaccttgccaccaccgaatgcttcgccggacaacttgagcagaactctgcgcggcttgtcgctatcagtcatatcatgcctttctcaaaaccgaaagtgcgaaattatccgtagacaagcgtatcggtttacgacgacaccccctagcaacgacacccttggaatagcgaaacgccatccgattattgaataaccggatggcgtttcgttgaaattacgctaagcgcgtggagtaagccttaggctcactcctcttcgcccttgccgacctcgacacgagcgaatgcggtggcgttgccaccgcattccttgaacaggtcgccgacggtcttggacgggtccttgacgaacggctgctcgagcagcacgacttccttgaagaaagcgttgagacggccttcgacgatcttcggaacgatcttctccggcttgccctcggccagggacttctcggtggccacgcgacgctcggactcgaccacatcggccggaacgtcctcgcgggtcagccacttagcgcccatggcggagatctgcagagcagcttcgtgagccacggcggcgccggccttgtcggtggcgatcatggcgacgatgctcggcggcatctcggcggacttcttgtgagcgtagacttcgacgtgctcgccggagatcttggcgaactggccgaccttgacgtgctcaccgaacagggcggcggcctcctcgacagccagcttgacggtggtgtcgccagccttggcctcgagcagctcgtcagcggagttggcgtcggcgtccacggcgtagccgagaacttcctcggtgaactcgacgaacttcggggtcttggccacgaagtcggtctcggagttcagctcgacggcgtagccggtctcgccattggcggtctcgacgaccttggaggcgatggtgccttcctgagccttgcggccttcacgcttgccggctgcggcgatacccttggctcggatgatttccttggcgcgggcgacgtcgccttcggcttcggtcagagccttcttgacgtcgagcatgccggcgccggtgtcttcacgaacctgcttgatcagtgcggcggtaattgctgccattgattattctccttgagaaattttgcttacccatgaacgatgggaagcgcttattcaggcacttcccatcgtagagcatcactcggccttgggggcctcggcggtttcgccctcggcggcagccggagcggcggcttcagcggaagcctcggcaggagcctcgttggtcaggagttccttctcccaagcggccatcggctgctcggcggcttcgccctcggccttgttggcgccggagcgctccagcagaccttcggcgacggcgtcagccatcaggctggtcagcagttcgatgccgcggatggcgtcatcgttggccgggatcgggtactcaacggtgtccgggtcggcgttggtgtcgacgatggcgacaaccgggatacccagcttgtgagcttcctcaacagccaaggcctccttggtgatgtcgacgacgaacatcgcggacggggtgcggttcatgttgcggataccgcccagctgcctgttgagcttgtccttctcgcgctcgagcaggaggagctccttcttggtcaggccggagccgtgcacgtcggtgaagtccatttcctcaagttccttgaggcggttgacgcgcttggagacggtctggaagttggtcagcatgccgccgagccaacgctcggagacgtagggcatgttcacgcgggtggcctggttggcgatagcttcctgagcctgcttcttggtgccgacgaagagcacggtgccgttgtgggccacggtggtcttgatgaagtcgtacgccttgtcgatcatgtcgagcgacttgaacaggttgatgatgtggatgccgttgcgctgggtgaggatgaactgcttca

SEQ ID NO: 3252 - DNA, 66818 bp, Unknown
  R53_2m  MAG No. k141_8024
gttgtcgccttccttgatgccggcggtttcggcggcggtgaccagcgtggccttggtcgactgggcggccttggtggcccacgggtcgtaatcggcgccgttgaccacggccaccttggcagtgccgaacttggcaacatcttggctggtgggctcgtaatcgtgcgcctcaacgttggtcttggtcatgatgttggtgacttcgacgttgctgccgccgaggtcttcggccacggaaccccactggttgatggaggcgacgacctcgatcttgccggaagacgcggcgctgctggaatcggacttgttgccggcggcattgctggaaccgcaggcggccatcgagaacagggtcgccgcggcggccgcgatggcgagcgcgcgcttggcgttggacatgatggacatgattggattttcctctctaattcggctgtttggccgggcgatgctgctgttgctgcatcatcgcccgccccccaacacgacagaataacatgtattgagaattattatcatttgcatttacgtcggcgtgttgcacgcgcacacccgcgctgccggcggaaatcccgcgccccgacgatgacaacgcgggatcccgccgttttcggcagacgaaacggcagtatccccgcgtccgaacgatacccgcgcgggggttctgccatttaaggcctcggaaacgacagaaatcccgcgccaccttcgttcggacgcgggggttctgccgtttgccgcacatgtcacaacggcatcgcggcacagaccgacgcctgcaccaggtcgacgagccccacggtgtgggcatcctcacagaccagcgcatcacgcaaggcgattgcacggatgatgtcgcggcaggcgcactccccgtctgtatccaaatggcgtgccaggcaaccggcaccaatgaccggcaattcgagcacgcacgaggcctcacggatcaggcgggagaccactacgccggtcgaacgctcgtcatagacgccgttctcctcgcccatgccgtacaggcacaaacggtcgtcgtcaaagaatcgctcttcgaattcgtcaaggcctacggcattggccaccgcacccacgaacatcgactcaccccactcgttgagacggaaggaatcggccagatactgcgcgaccggcgtggcctcaaggcccacaggcagcgagaccagaaacgcgccggcccgcccttgcagcgatccgagcgtccgttcaaggtcatgtttgaccgtgcagctcatgcagcacccctcgagcccgaacgaatcggactcgccgaacaccaccccgcttgcctggggcttcgcgacgttgcgcacgatatcgagaccggattccacggcttcgttcgggcgcacgtcataagcaatcgagcatacggacgggaaggaatcgaccaacgagaacgccacggagtccaggctcaggcggtcggcgccggtgagcagcaccacgggcgtgcgcccctccgcgtttccctgtgattgcaatgccggatgaatcatgacagcctttcttatttgataatggttatcattatgatatagttgcaggcatgtccaaaacatgtcaaattctgggaacacgcgccggggtcggcaaccgcgtctcccactcgcacaggaaaacacgccgaaccttcgccccgaacctgcagtccaagcggtactgggtgccgtccttgcagcggcacgtcacgcttaccgtgagcgccaagggcatcaagaccatcgaccgcatcggcatcgaggcggcgatcgcccgcatccgccgcgatcagaacgtcaactgaaccggccacggcatcacccccatgctcgggcagtcagtaggcccgccactgtgccggcgcgtaaccgcgcaacaaaccgcgctaacgagctgcatcacccacatggcaccgcgacgtacgcgacataacagcgtgacacccacacatagaaagcaccactcatggcaagcaaatcctccgcaatccgcccggtcatcaccctgaagtccacggccggcaccggattcacctacaccaccaccaagaatcgtcgtaatacgccggatcgtcttgagctcaccaagttcgatccggtagttcgcaaacgggtgctcttccgagagacccgctaatccatctgttcgttcattggacaccagtcgcgaggcgaggaagaggcttaagcacccgccgaaatcgtttccttgttggcattccggcggtttcctctatcaccatttcatgaactcatcttccgaaccttgcggcatgcgcccaatgaacgaatgcactcgtcccagctccggccggcgcgattcccgcgccccggagccttatcaaggagccggacatggccaaaaccagtaagatcaaccgacaattgcagcgcgaacgcatggtcgccaagtatgccgaacgccgcgccgaatacaagcgcgacagcgtcaaccctcatctgaccgccgaagaacgcgccgaggcgatgcgcaagctgcaggccctcccccgcgacgccagccccacccgtctgcgcaaccgcgattccatcgacggccgcccgcgcgcctacaaccgcaagttcggcctgtcacgtatcaatctgcgtgagaaggcacacaagggcaaactgcccggcgtggtgaaatccagctggtgatcgggccggcacaaccggccgtcaggccgtctcaggccatctcaattcaccggattccacccgcgcgtccgacgccattctcatccatatcaccacacaacaccacacaaccaaaggtccataaccatgcaagagggcatccaccccgaatacggccccgtggtcttctatgaccgctccgccgacaagtacttcctcaccaagtccacactggtggccaaggccgtaaacctgccgaccatcgactgggaggacggcaacacctacccgctcgtcaatgtggaggtgtccagctacagccacccgttctacaccggcaagaatgtggtgatcgacgccgccggtcaggtgcagaagttcaacgctcgttacgggcgcaagtgattcgccgcacattccgcaaagaccgtaagacaagaagaaaggaacggacatgaaggtcaaggcatcggtccgctcattggcccgcaaggatggctcctatgtcgtccgccggcgcggccatctgtatgtaatcaacaagaagaacccccactggaaggcgaggcaaggctgatggcactgcccaagtacaaggcgtcccgagcaaacacgcattcgcgccgagccaactggaaggccaaggtgcctcagctggccacggtcagaacgcctgaaggcgaagtggttcaggttccgcagaatctggccgcagccgtacgaaaggggtatatgaagccataaccaacatcgtggattccgcaatccatcaagtctcgtaacaacaactcgacggtccgctccacaggccggcggcgtacgttctttctcccatttccttccgtatgccgtcacctgccggggcgaaccgccgttttatgaggccaccgcatccgatctggccaagctcgccaaggcagacatcgtggtgctcaacggcgccggctacgacggctgggcggaaaaggcgcagcttgacaagaaacgccagaccatcgtgaacgtgggcggcctcatgggcgtcaccgccaccgacgagcacgagcattcccatgaccacgccgagggcgaagaaggccgccatcaccaccatggtgctacgaacccgcacctgtggttcagcccggaagccgtgctgaaggccgccgaagccatcaacgccgtctacgcggacaaggccggggccggttctgccaccgccgccaccgtgcaacgtcacttcaacgacaggaagaaaccctcaaggaaatggacaactggcccacgtattacccggcatccatgagcaaggaggaagtggccaccgagatgctggcccaccgattcgccatcggcccaggcaaccatgtgcaaagttccccgcatatcgatgtgtaccatcggtatgcggggaactcgcatattatctcgaccactatcatgcgtacggtgctaatatgacggcgatatggcaggtgatattcgcatgaaagaacctcgcacgcagcgcacggaacaggtgaacaccgcgcaacaggaccattcggcgaactatctgtttctgattatcggcacgccgctggtggcgttcctgattgcggcttccgcgatgctcgagtcgcgtgggtttccggttccgctggtgcgtatcggcaccggtgccgcggggcttatcctgcaggcgattccgttcatgctgctgggcgcgatgatgtcggccgtggtcagcacgttcgtcagcaccgattctctggcccgccacataccgaaatcgttggccggcggactggccgcggcattggcggccggcctgtgcctaccggtgtgcgattgcatggtggtgcccacgttcgcgaatctgatgcgcaaacgcctgccgctgccgtgtgcggtgacgtttctgtgcgcggtgccggtgatgaacccgatggcgatatggtccacatggttcgcattcaccgacaaaccatggatggtggcggcccgcatggggttgggcatggtagtggcgatagtcgcgggggtgtcgttcgcggtgtggccgctccgctcccctgcggtgcgtgagaggccgctgacgattgggcggtcgttgatttgcgaggattgtgcaggggcgacgggtgattcgcctgagagccacccccagtcggctttgccgacagcccccgccggcgggggcacggggcgcggattggagcggttcacgcatttcattcggcatacgcatgacgactttatgcggatgatgccgattctgctgttcggcacgatcatcgcctccatcatgcgcaccgcattgtcgtcgttgaccaacggttcaagcacgctcgatgacgccggtgccatcgtactgattctggcggcgatgggactggcgttcctgtgttcgctgtgctctacttccgatgcggtgatcgccgccagcatgattggcgcgctgccggtctccgccatgcttgccttcctggtcttcggcccgatgctcgacctcaagaacacgctgatgctggccacggaatgccggccacggttcatcatccgtttcatcgcgaccgtggcgacggcctgcttcctcgccgcacttgccgcccatctggtgatgggagcgtagccatgaagcgcaaagtcacactccccgaccgcgtggaggcgctgtgtttcgcggcgctgggcgcggccatcgcctatgcggcggtgggcggatcatacaccacgctgaccacgccgcgttcgctgccgtatctcatcatcggtgcggcactgctgttcgtgctggcgaccgcagcatggctcggactgttccacgccacggagcgttcggttttgcggttcctgatcgccttgattattccggcgctgctgatcgccgtgccgttccagcccagcagcggcagcggcggcttcgacgagtacgccggcggccgcgctatcgccattccccgcagctcgcacaagcctgatggcgcctcgcagctgcacggactcgacacggcgaacaagaccctgaccatcagcgacgacgaattcggctcatggttcgagcagatcgaccataatccgcagcgttacgtcggttaccatgtgcaggtcaccgggtttgtgagcaagtcgcgtacgttcggcgcggacgagttcgagctgtcccgccagttcatgtcctgctgcattctcgacatgaccccattcgggttcatagccagctccggcaaggccggcaccccgcacaatcacgactgggtcaccgtcgacgccgtcatcaagcagggcgcctacggctccgccggccacgagcgccaaggcctgatactgcaggtccggtcggccagcaaagccgcagccgccccgaccggctacttctactggcagtaaatgacgcgtctcccgaaatggaaagcactgcgctgcgccatgactcgccccatatcggcagaaatcccgcgttacaacgaaaggtacgcgggggctcggctcaaaactggcagaaatcccgcgcaggcctcgttgaaacgcgggatttctgccagttgattcaaatcatgtgacaacatgcgggcatctgatttgctttaataacgataatgaatatcatttgttaacagaaagggacagaacgtcatgagcatcgagcaaaccgcgaccactcggcgcgtgacgcgaccccgactcctcatcacccaggtcctggcggaactatcccgattcgccacggcccaggaaatcaccgacatcctgcgcgagcgcggcacgcgcatcggcacggccaccgcctaccgcaatgtgcagatgatggcctcccaaggcgagctcgacgtaatccacgtcaacggcgaggccctctaccgcgagtgctcggaccagcatcaccaccatcacatcgtatgccacgaatgcgggcggaccatcgaaatcgagattcccggacttgagcagtggatcgacaaagccaccaagcagttgaagtaccagaccatcgcccacgaactggagattttcgacctgtgccccaagtgtgcggcgaagcatgccatcgaaccgcctctcagcgtcggcacctcaccaaaggatggaccactgacgacgccagacgatactggccgtcggcgctcgaacaaataatggcgcagtcccgacgctactggccttcagcatcggtgcccttccaatccttggcgcaatagcgacgatataagctccactcgcatcgttagattgccaacgcttggcgcagcaccgacgccagacacgctcatcgtcgtcgttccaccaatatttggattggtaccgccaccacctataccaggcgtcgacactcggccaacaatcggcccgttaccgacacaaaactgcatgaggtctcattgctcttaatagcagcgatgggcctgataatcactttcacccactttcgccgctgccgtctgccgccctacagttgcagacgaacaaacgctgaaaggaacaacaatgactatcaagaccatcgatgagcatgcttacgagatcgttaccgaagagggcaccttcgccgtctgcaaggacacgctggccaagttcgacgccaccaagcacgagcacggcgtggccgcctgtggccgctgcggctgctgcttcaccggcgactgctgcgacgacaccggctgcgagcacaaccacaccgaagagtgcgggggcaaggcttgcctgcacgcttgccacgagaaccgcgaaggccacgagtgcgccttctgccaccttgccttcgacaccaacgagaagtgccacgatgagatcctggccgacctcaaggaactcaaggccgagctggctgtctgagttttaggtttccgatttctcctgcggattgactcctctcagggaggggagccagattccgacacgaaccaccgcgcttaccgtatgatgtctacgggcgcggtggttttgtttttctcgatgatggcgcagatttgctcgggcgcctccttgcagccgcgccggacccatagccagataatcgatgagacggcggagaccagaatttccagcgcatagtcgcgcggaatgccgccgtagctcagctcggcacccacacgggccgcctgcccaagcagcatctgcttcaacacatccttgacccggtcatacatctgcatatcgttgcccgaacgggacagtgcgtcgaagaacgcatactcacgcttgacatagcgcaacgcctcggcttcgtgttccagtcctacaatctggtggccaacctcacggccaaggagaacgtggagctcgcctccgaaatcatgaaagacgcgcaggaaccgacccaagcgcttatcgacgtggggcttcaggaccgtatcaacaacttccccgcgcagctttcggcccggacatgcaaataaccggcaccgacttctttaatcagaacaatctcgctgacataaccgtcatcagcgattatggcctgaccaaagctgacgaaaacattattcgcagcgcgccgaagtggccaaggcgatgaggggcggggccgtctccgagtccgcgccgatctactacgaggagatgtcgaaagtggccggcaaggagaacgacaaacagtcgattaccctgatcgccactgatgacgcctacaatttcggcgactacatcactgcgttcgcgcaccgggcacaagccgcaggtgctcaccgaccgtggtgcgatcatctccgaacgtatggcggggatgatggacgccaaggtaggcgacacgattaccgtcaccgattcgagcggtaccgagcgcaaggtgcgcgtggacggcatcaccgaaatgcatatcgggcatttcatgttcatgacttcgggtggctgtaagcacgtgttcggcgaacagtaccagtcgaacgcctatatggtgaggctcaagaaccatgagacctccaatgtggagtcgcgtagcgccaagctcataaagttggacggcgcgaagggcattgtgcagaacacgacttcgaagaaacaggtggccacaatcgtcgacttgccggatcagatcatggaagtgctgattctcgcggctgagctgctggccgtggtgatcctctacaatctgacgaatctcaacgtctccgaacgtatccgcgaactgccgaccatcaaggtgctcggcggactcggcgtgctggtctaccggcggttgaagacggtcgacatgctcggcgccctgaagtcggtggaatagcagcggaatagcaaatgggatcggctttgaagccgatcccattcaattattcgctcactgctttctgagccttctgcgctttctgctccttttggcaatcagggcatagtccgaagacctccagggtgtgggattcgacggtgaagccgtggccgtcggccactttgcgcagccaagcctcgctgggcggatcgatttccacggttttgccgcaccgcttgcacaccaagtggtggtgatgtccgtcgtcgccgcataggcggaacagctgctggccgtccaggcggatcgtgtcggcggcaccggcatcggccaaggcgttgagctggcggtacacggtggccaagccgattttcgagccttcgtcctccagcctgcggtgcaggtcctgagcggagatgaactcctcacagtcggccaaggcggcgcgaatcgcgtccttctgcttggtctggcgttcgatatgttcaaccatcgataaggtcacgccttctttttcaggtcgtcccagcagccggtggcctcaaggtcagcaaccgtggcatcagggttgtcggtgagcacggtgatgtggcccatcttgcggtcgtggcgcacttcggccttgccgtagtcgtgcacattccactccgggtgggtggcgatcagcgcgcgcgtcggctccacatgctggccgagtacgttgaccatcacggccggcgagagcagcttgggcttgggcatgggccagccggcgatgccgcggatgtgggcgtcgaactggtccatcgagcaggcctcgatggtgtagtggccggagttgtgcgggcgcggggcgagctcgttgacgatgacctgatcgtccttggtgatgaacagttcgatggccagcgtgccagccagttcgaagcccttggccaagcgaatcgccagttcatgcgcttcgcgagccacatgttcggacacttcggcgggggcgatggtcatgtgcaggatgttgttacggtgctcgttacgcacgatggggaaggtgacgaagtccttgccgttgccggagaccaggatcgaagcctcgaatgcgaagtcgacgaagccttccaggatgctcggcgggaagccgccaccacggtcggaacgggagcggatcttctccaagtcggcgtcggaacgcaacacgagctgaccgtggccgtcgtagccgccggacacggtcttcagcacggccggataatgaatatcatccaatgcggcgtcaagctcatcgaagttgttgacggcgcgccacggtgcggtggcggtgccgtggtcgttgatgaaccgcttctcatgcacgcggtgctgggtcacgcgcagcaggtcggtgccctgcggggtggcggtgatgccgcgcacctcgtcgatggcatcggcgtccacgttctcgaactcgtaggtgagcacgtcggactgcacggccagatcatggatggcggttttgtcatcgtattcggcggtgatctggaagtcggccacctgaccggtcgggcagttcggcgtcgggtcaagcacgccgacgcggaagcccatgtagcgggcggacaaagccatcatgcggccgagctggccgccgccgatgatgccgatggtcgatcccggcatcagcatcgaaacacgaccgcctgtttcctcagacaagctgggcattggattcagccaccttttctttcagttcgttacggtaatcctcaagcttgtcggccagttcgggctcgaaggaggagagcatctgcacggcgagcaggccggcgttggtggcaccggagttgccgacggcggtggtggccaccggaatgccgccgggcatctgcacgatggacagcagcgaatcccagccggacagggcgtgggagcgcacgggcacgccgattacgggcagtgtggtctgcgcggcgatcatgcccggcaggtgggcggcaccgccggcaccggcgataatgaccttcaggccattggcgcgggcgttgtgcgcgaactcggccatgagctcgggcgtgcggtgcgcggagatgacctgcttgtggtaggcgacgccgaactggtcgagaatatcgcaggcgcgcttcatggtctcccagtcgctggccgatcccatgaccactgcgacttcgggcttggattcatttgccattatcatttactccctagttattgagaataaggcccactgtactcctgatagcggagttaagccacgcagcgaatcgttctcaatacataattctgtgaggcttacagctcaataacgatcttgccgaacatgtcgccggcgatcattctggcgaacgcctcgggggcggcgtccaacccgctgaccacggaatcgatcaccggatgcaggtcggcgtgctccacgaagcgcagcagccgggcgaaatcctcgcgcgaacccatggtgcagccctgcacgcgaatgtcctggaagaacagtcgcgtgagctccgcaccgggctggtcgccggtggtggcgccgcagatggcgatggtgccgccgggacgcaccgaccgcaccgaatggccccatgtggccgcccccacggactcgatcaccgcatcgaccttgcgcggcaaccgcgcaccggtctccagcgcggcgttcgcgccaagtttcagcgctttggcgcgcttgtccgcgtcacgcgaggtgacgaacacttccagaccggcggcatgggcgagctggatggccgcagtggacacgccgccgcccgcgccctggatgagcacggagtcgcccggcttgatgccggcggcctcgaacaacagcgagtaggcggtcagccagctggtgccgagtgcggccgcctcggccgtggtaaggtttgcgggcttggcgaacacgttggcggacggcacggaagtcttctcggccatcgtgccggggtatttctcggagaggatcgtacggcgctcgcccggggccacgcccgccccatcggtgccgacgaacgtgtacagcaccacttcgctgccggccttgagcccatgcttgccggggatgtcctcgtccagaatgcccacggcatcggtgcccaggatcatcggcgtctgttcggcggcgagacccacaccctgtagcgaccagacgtcgtgatggtttacggtcaccgcgcgcaccgaaacggtcgaccagaacgggcgggcctgaggttcgggctgctcgcccaccgccaacgcggcaagcggatcgtcatggttgacggtggatgcgtatacggccttcattgcgcgctccttggtatcaaaaggaattaccgcattcattgtcccacatcgcgcagcgaacgaatcacccatttacggagatgttgggggcattgattcgtcatgtggacctcggacaatgccgggcgttagcattcaacttcggaaagactagcgaagggagattcgagggtatgcgcaacgcgtcaggaaacggatttgattcaagcgattccttcgccgtctccggtgctgccgagggggccgcgcgccttcacgacatccccccgagcattaccccttcccatggcgacgactcccatctgctgagccgcattgccagcccggccgatgtcaaggcccttgctcccaacgagctcgccgaactctgccgtgagattcgcgccacgctgctggcatatggccaccaacacggcggtcatatcggctccaatctgggcatggtggaggccacggtggccttgcatcgcgtattcgattcgccgcgtgaccgcatcgtgttcgatgtatcccaccaaagctacgtgcataagatgctcacgggccgcgccgacgcctatctggacccggaccgtttcagcgaggtgactggcttcaccaatccggatgaaagcaaacacgaccagttcgtgctcggccacaccggtacctcgatttcactggcttgcggtttggcgaaaacccgcgatatggaaggcccgaacagcggcatcggcaatgtggtcgccgtgatcggggacggttcgctcagttcgggcgtggcgttcgaggggctgaacaacgcggccgagcagggcggcaatctcatcatcgtgttcaacgacaacgagatgtcgatcgccggcgatttcggcggcatgtacggcccgctcgcccgtctgcgcgcatccggcggcaccgcccagccgaacctgttcaacgcgttcggcctggattaccggtacgtggaatccggcaacgacgtcgccgcgctggtctcggccttcgaagaggtgcgcggcatcgatcatccggtggtggtccatatccacacgctgaagggcgcgggatacgacggcgccgatcacgtggccggcgcaccctcggcctcggccggtaacgtccatgagctggatccggcagtctccgacaccggcgtgcgccccacgagcaacgtgctgcacagcgaaccgtggcattcggatcactgcaacctgtccgaccatgaaccacatgaaggccagtgcgaggcctcgcattggcagaatccggatgccgcaatcggcaagccggacgatccgcgcaagcattacggcaaaatggcgatggccgcgctcgaaccgcgtttcgccaccgagccaggactcgtggtcatctcccccgccacgccgggctccaacggcatcacccacgaattccgcgaacgcgcgggttcgcattacgtggacacgggcatcaccgaatcgcatgccgtggcgtacgctgccggcatcgcacgggcgggtggcacgccggtggtggccaccacggcgtccttcttccagcgcgcgtacgaccagttcttccaggagatgagcctgaaccgttcgcgagtcacggtacttgattttctgggcggcttgtccggttcggacaatacgcattccggcgcatatgacgtgacgatgttctccaatattccaggggttacgatgctggtgccgacttcggctcgcgactatctggctgatttggcatgggctaccgcgccggccggttcggcggacgcccctgctggtccggcggtgattcgggtgccgggcgaggcgattctggcggcggaacgggatgcgacgctgctgccggtgacgggtgggcagattgctgaccgcccccagtcagcttcgctgccagcctccgccagctccgccagcgggggcatatctgccgcaacagtccgcgggaccgttagcgtaacggctcagcatgccggtgcgcgtcacatgctggattggcgggtcaatcagacgggctcgcaagtcgcgatcatcggactgggcaatgcgtatccgttggcggagcagacggccgccgcattgtctgacgattatggcatcacggcaacggttatcgacccgcgccagtgcacgtcgctggattcagacgtactggagtcgttgcgtgatggccaccagcaggtcatcacccttgaagacgggcagcttgaaggcggctggggcgagaaagtgaccgcatactatgcgaatcatcatgtctcggacggcagccgtaatcctcgtgtgctgaacttcggcgcagccaaggaatttaccgaccgcgtgtcgctgggcgaactgaacgaacgttatggactaacggtggagcaggtgacagaggcgatcactcgttgtttttgatggcgtctagggccgggattttaacggctttattggccgggccgaagccgaatagcaagccgatcagcgtggaaaacagcacggcgaacaggaacagccaccacggaatcaccgaataacgggtcacattctcgccaccaactatcgcctgccagagtatggtccagatagatgttccgccaccggtaccgtcgccggagcccccgccggcaccgctgaccataccgccagacatgccgccgctcatgccgcccgcatacaacgcgccgacaacgttgatgcccagcgatatcagtccgctcagcacgcagccgatcaatccgccgaagaatccgatcgcgccggcctccgcaagaaacatgacgcgaatgtcacgaacgtagcagccaagcgccttcataatgccgatctcgcgcgtgcgctcggttacggacataaccattgtgttggcgatgccgatggccgcaaccaacagcgaaaccgcaccgataccgcccagaatcagctgaatcgcgcgcgactgttcttccaacgacttacgcatgtcttcataggaggaggtctcgtagcccaacgctttgatctgtgattcgacttcgggcacggacttgaggtcggcggccttgaccagcacctgattataagcggtggcttttttggcggcggctggatcgactttggcggccagttccttcaacgcctgcaaatccatgaccagaccgtcggaggtggcatagcccttgttgtagtcgcccgccacaatgccggaagcccgcacatcgagggtgacgttttccgactgacccgcggcgctgccgcttgcgccgcccgcgccgccaccgccgcccgcgccgcctgtgccgccgccaccgccgccgtacatgttcatgctgtactggtcgccctgataattggtgccggtggtcagactaatttgcgtggcgagcgggtcgaagaacggatcttcgtcctgatctttctcgcactggccggtggcctggttaaacgtgcatgaggaatactgaccgccacgtgtgctggtgcgttgttcgccgttcttcagggtgtccatgaaaccataggcgaaccattcgccggcaagcacctggtcttttttgaccggtttctcgccaccgacgagcttgtagcccatctggtcgagctgggtcatgtcgatgcccatgatctgcacgtaatcatagatgtaacggccgcccgcgccggctctggccgtcacgttataagggaagttcatcatcggcgtcacgccggatacgccgctcatcgcgcggaaggattccacggccttgtcgtcgagcttggtatcgcccatcttggacgagccgccatcgtccatcggaccggcataaccgttggtgtacacggtgacgatggacagatcgcccatcgatttgagcatcttctcgttctgctcgttaatgccttggcccaaagagaccatgagcacaatcgagcagcagccgacgataacgcccagcacggtcagaatcgtacgggatttacgccgccataggttttgtctgcagagccgcagtatgtcgccgaatcgcatggtcgggcctttcaggccttgtgggatgagccggctggtgcgactgatgaggctggggtgactggtgtgataggagcggtgtctgccgcagcaccatccgtcacgccggtatcggtcttatcatccttgccttcggaccaatcatcccagtcctcatcaatatcgttcttcttggccttctgcttgcgccggcgacgcaccagcagcacaatcaccacgataatgaccacggcgatcacgacgatgaccacatacaccagcaccggcaatccctgattggcgttctggtccatgttcggatcggccatgccggaatcatccatcggctgcatatcggttacgggtatggtgagcgggaattccttggtcttggtctgtccgtcggaatcctcgtacgtgactttgagcgtggtcttcagctcgcctgacgcgtgcggtgtgaaggcgtaaccaatcgtgccggtggcgccggaagccacattgcccacgtactgggttttcatcgtggcatcgaaaccttcgccctccatcgtggcctcgacgttggcgatatcgcctttgcccttgttcacatattccatcgtgaccgtgttttcctggccggcgatcacctggtcgggcactacgggatcactgatttcgaaccggtcaggctgactgatcggcacggaaatcttgacgtcagactggcttgaggagcgggcgctggcgtccacatactcgtatcggaagttcacggtcacggactgggcaccgcttttcgcggaggcgagcgcctgcatcggcacgctttgcgtcatggcgtaaccggcccacagcgcgtcgacgtagaacgtgttcgtgcctcccgcgatggcgaagctctcgccgccgtccacggtgacgaccatgttcgtcaccgccacctgccccttgttctggaaggtgaagtcgagattgaatttggatccggcggccacggaatcacctccatacgcgaagttggtgatgatgatgttgggcaccggtccggcgatcggcgcggaatcgccgtcgcttccctgagacgtactgttcgtgccgcttgtgccgtctgtgccgtcgaccgcgtacgcctgatgcggaagggagatgacggcaagtgccagtgacagcgtggagagcaacgcgacgatgatggcgatggtgtggtgggagaggtgcttcatcggtcagttccttgggttctatgggcggacggcgtggacggtgtagttggtgtggttggggcggacggcgtggacggaacagttgggcgggaaaggtcggtgttgagccgatcgctggtgatgcggccatcgagcaaggtgacaatgcggtcggcgtatgaggccatctgcggatcgtgtgtgaccagcacgatggtctggttgaagtcatgggcgaatgcgcagatcatcgtcatgacctcggttttggttttggagtcaaggttgccggtcggctcatcggcgaacaccacctcgggcttggtcacaaacgcccgggcgatgccgacgcgctgctgttggccgcccgacatctggcgcgggtaatggctgagacgatggccgagcccgactcgtttgagtacgccacgcgccgcacgttcgcgctgttccttgggcacgccgcggaacattagcggcattgccacgttttcgagcgcggtcagattgggcagcaggttgtacgactggaatacgaagccgagatgcttctggcggaaggccgccagctcacgctcgtcgagtttgctgacgggtacgccgccgattctcacgccgccgcgcgtcggtttttccatgccggccaactggttgagcagcgtggatttgccggagccggattcgccgaaaatgcagcagatctggccttgcgggatactgagattgacacggtcaagcgccaccaccgtctcatcctcgacggggtattccttgcgtaggtttcttacctcgatgattgctcgcggcacgggcccttcttccttcgttcgtcgccattggcggacgcgcgatagctggttattatccagcacatctcaagtcagtgtataaccgttatgcaggagccgcaccccttaagggtgttcccggatggcagtgataagcatataaccgctgatctcaaggtcgacagttcaggctccagacggacccagaccggcataatactcaaaagcccctggcccccacagacgatgagggaccaagggtttattgcatcgtgaccccggacgggctcgaaccgtcgaccttgagattagaagtcacatgctctatccagctgagctacggggccaaactcatgtaagtctagccgtaggggtgtaaaacacctcggcgtaacgtcggcttgcaccggtaccatcggcgatatggggacaacggagagcaacgtagatcacgccgcatcgggccagaccgtcgcaggcgatagtggtgagctcactttcacatacgcacagggtcgttttgccagtgaaggcagggattgggaaagcccggttgtgaccaacatggctgcatccgtctctgccgatgccggcaatgcccccgccggcagcatcatcaacaccggcgccaacaacactttgaccagcaccaccgaatcgtcgcttgccaccctgctgtccgaccaatgcccgttcgttatcaaggccaccattttcgagggcaatggcaaaaacgccattcgcgaacgtcacacattcaccggctcggtgctgcaccagctcgaccaagccagcgccctgctgaacggcatcaacgaatccggccaacacccggccatagccctgcgcgaagcattggtcaacgcactggaacatcgcgattacacgtactccggccccacactgatcaatatcttcgattcccgcctggaaatcgtctcgctcggcggcctgaccgatggtttggaaatcaacgatctgctcaacggcgtatgccagccacgcaccccgcgtttggctgaattgttcgccgatctgggtctctgcgagaactgcggtaccggtattcaacgcattatggacgcctacgcgcagagcgcggtcagtccgcaactgcgcgtaggccccacttcggtggcaatggtgctgcccatcccggtctcggccgaggccgcatccttgcatcggaccgataccgatgcttccgccgcgcccagcaccactgacgaagcgcagcgcgccaaaatgtattcattccccacgattcagcgcatgacggataacgccgcagatgctttggccggcgcacgcatcatcggctgcgcgccattgcagacgctgattctcggcagtggattcggcgagcgcccggacggtgacgaccaggtcagtacccgcccgctcgatacagcgacgctggaaccgtcgcctcaaacgttggagcagttcacgctcaatttcctcgcgttccgcggcgtgaagctcagccgtaaaaccatgcagaaagcgcttggcctgaacaaggatcagatgacgcagctcttggaccagctggagttgagcggcaagatcgaacgtcatacgcacgccaagtccactacgtattcgctggcacatgcctcaggacggtaacgaccagagcggcaacaaagcggcaacgaccagagcaatacagcccaaggcgcgataaagcagcagctcagttctcgaatacgcgatcgcgaatcatgcgaccggattcgtcgagcgcggtggagaaccggccgtagtcggacagaatcacgcccatgtacagcatgtccacgagcgcggtatcggccacgcgcgagaaaatcgcattgccatagatcgtgtgcgagtcacgacccgtcagcaacgtcacgtcggcccagctggccagcggcgcgccgatggcattggttatggcgatggttttcgcgccatgcgatttcgccaatcgcaacgctttgaccgtatccgccgaactgcccgaatgggagaaggcgacggccacagcgccgtggggcaggtgcccggcaccgatctgctgcaggtaagcgtcggtattgagacggcatgtcagtcccagatagccgagcttggtgaacagatccatcgccggtgtcaacgagttctccacgccgaaaatatcgatgaactccgattcggcgagtagggcgaccgccttgcgataggccttggggtccaacgcactgtgcagctcatcgatcagcgccttcgcgacataggccgctttgccgggaatctcatcttcgccatcccacggattcagatcgaatccagccaacggattgaaggtcactttgtgctcggcggccggatggcgcaacacgtaccgcagttcacggtaaccgccgaaaccgagcttgcgggcgaaacgaatcaccgtcggctggctgacgtgggcgatgtcggccatctggccgacggtcaggtcggccgcctcctcgatatgatcccgaatatactgggccacggcgcgctccgccggacgcagcgacggatacacgtggtcgatgcgctcacgtattcccaccgaggattgcacagccgcgctcctagtcgtccgtattttccattcctgtttcgagggtaccggctgtataccggcgaacagtcgacttggattgaccgcaacatgaacggtgagcgaactcttccgtttacctttccgctccatgccctctacaatcgaaaccatggtgcggattagcgtgggaagccccacccatcacacaagcgggcggctgtacggcgtgttcttcgaggacatcaaccatggtgcggatggcgggctgaacgccaacatggtgaacaactacagttttgacggcgtctatctcgaccatcacacgtggcgtatggccggcgccgaacgatggcgtacacaggccgattccctgcgtttctgggatttcatcaactgttccgccgccagcctcggcagtgagatacgcgggattcacggccagcgggtgaccaccgactgccccgccccgccaattcacgcacatagccgatacgctcgcatcacgtccgatgttccttccgaaaccggccctgcatatctggaaaacctcggctataacggaggcggcgacaacgggggcgagcccgcgttctccatcgtcgccgaccacacctattccgtcagtctcgcggtacgtccggttcatgggcgggccaagctgtccgtcggcgtggtcgataggtacggtctgccgctcaccagcaccactcgattgtcgtatatcgtggacgcagatccgcttgacgatacggaagagaccggtctgaggcaggacgatggtgccaatgcgcaggattccggcgtttcgatcagtccggattcgtcggatggtgccatcgccatcggccgtgacggctggtaccggttcaacgccgacgtaaccggcctgaacaccgattacggcaagctgcgtatcaccattgacgccggcgaacgcaccacgttcgatctggatctggtgcagttcatggatgcggactattggggcgcgggcgacccgaaatggcgttacggcaagctgcgccgcgatctggtggaaaccattcaggcgttgcatccagcgtttctgcgattccccggcggctgcatcgtcgaaggtgtgacgcccggcaatgaatatcgctggaaggataccgtcggctccctggccgcgcgacgccaacagtattcgatgtggtcgttcaagatgccggatggttccagctattcgcagagctatcagatcggcttctacgagtatttctgcctgtgcgaggacctcaaggccaagccgctgcccactctgttcgccggcatcgcatgccagtcgcccggccgcgatccgcgccacatggatatcaattcggccactttccgcaacaatgtgattcaggactacctggacctcatcgaattcgcgaatggcgatccggagtccagctcgtgggccgcggtccggcgcgatatgggccatccagaaccgttcggcctggacatgatcggcgtgggcaacgaaaacttcggggctgactacgtggccaagtttgacatgatcagcgaggccattcacgaacgatacccggatatgctgtgtgtgatgagcgccggactgttccccttccagccgacgatgaaacgcagctgggaccatgcgcgagcgttggccgcaaccgattccggggcacatgattccgccatcggtgacgcgattatcgtcgacgaacattcttaccactcccccgaatggtttgcataccaagcgtcacgattcgacgcttacccgcgttgcggcgccggcgtctatttcggcgaatattcagccaacggctattttgccggccaaccgcagaccgaacagggcgcgaacacgtggaagtcggcactcggcgaggccgcgttcctgaccggttgcgagcgcaattccgacgtggtgcgcatgacctcctatgcaccgctgctcgcgcatatcccggctaaggggtgagcgcagaatcttatcgaattcaatccggcgcatgtgaaccccacggtgaattatgaggtggagcggctgttttccacgcatctgggcgacacgacatatgccgtgtccatcgagcagaccgcgtcacgccccgccaaacatctgtatgtcagtgccaccgggcatgacggggatgacgcctgccgttacatcaaaatcgtcaatacctccgattccccggtggatgtgacgttggaaatcgcgcgcggactggccgggctgggcgcctcgccatcgcgaccggtgcgtttggaggtgacgacgttaagcgccagtccgacggcgaaaaccactatcggataccgcggcgaggcttcgggggcgattgtgccggaacgtcgggcttacacattgccgtcgccgtcttcattgctggcgatgaagatcaagccgtacagcgtcacgctggtggcttcgcgctgattgacatcggccattaggccgattcctttgccgttagaatcaccctcaaggatgagggggaatcgtgcagattcagggaataataggggctatcccccatagcgaatacaagcacgggagggcaggatggaaaccacggcggccagaagaccgccggccaacgatgaaggagtatgcggtatgtttatcaatctgttccgcaggcagcgccctgcgctcgcccggctggcccgcaactccaacgcctatcgtcagccgatggttgcggccgtatcatcgtccgcagtcggtgtatccagcatcacctctgcagccaacacagccaacacagacggcgtatccggcgtatccacgctggatgccaccatcggccgcattcatgacatcccgcagtcggccatgagccgactgaccggctcccccaccgtatacgcgcggtagaccggcccaacccacaacggcggctcagagactcggctcgatgatccagctcaaggtcagcaatacggccaaaaacagaacgttgacggcggagtagacggccagataccggcctttcttgtgcgggtattggcgcacgacgttcttgtaagaaataagcgaggccatcgaggcgatgagcgtacccatgccgcccaaattggtgccaatgatcagatcgcgccattggtcgcagaagccggaaagcagaatcgtggtgggcacattgctgatgacctggctggagccgaccgccacctccagcggatggccgccgaccagcgagcgcgccagttcgtagaattcgggcacgcgcttcatgttgccgatgaagatgaagaacatgcagaaggtgagcggcagtccccaatccacgtatttgaatacgcgccgatcggtgaacaggaacacgacgaccacgatcacgcacatcacccacaggggaatcacgtcggagacggccagtaggcagacgatgaacagcagcgagtagacgatggtgcgccagccgccataaccggcgccgtagccggtgatacgaatctcgtcgggctggtgtttgttgcgctcgggagccagcacgccggtttcgaggtcgcccaggtcgccgaccggtttgccgccaaacaccacggaaatcacgatgaccagcaacacggccgccgtgccggaatacggtgccatgatgccgaggaattccatggtcggcatgccggtcagggctttgagatacaggttgtgcgcgttgccgatcggggtgagcatactgcccacgttcgcgccaatggtcatcagcgtgaccacgaggatggtcttatcctcttgcccagccatgatgagcacggccaccgcgaacggcacaaacgtgaccagcgcaacgtcattggtgatgaacatcgcggaaaagaacgtcaaagcgacaagcgtaatgaccagtccgcgcatggtgctgaccttctccagcaatcgcgaaccgatgatgcggaacacgccgatacgctggaatccgcacaccacaatcatcaggcagatgagctggctgatggtgctggcgtgaatgtagcttttgtaatcggcgtccggcggcacaatgaaacacgaaatcagggcgagtattgcggcgacgatgagaatcgtctcatttttggctacattgatcagccagcgtcgcatccattcctccgtgaataacccaatatcgcagccgttctattctacgcgcagaccggcataaggtacgtagtcgcgttgcgctggcggacatgagtttttggaccggtgccgcgcaatgctgtgcccgtatatacggctgcatcattgtgtggcaggccagacacgaataccgtacgtgactggctcaaaccaatggaacatagtttcattcgaggaagaggagcgatgaagttgcgtattaccccagtattcccggtcaaacgtttcgccgccgtgtctgcacagaacgtgaagaacgtgcagttcgattacacgaacatgcccacgtacaacacgatcaccaagtagcgcgcactgccgcactgatcggcggcacttgccgcatacatgaatggccggtgtgctgcggattccttaccaagaatccgcagtacaccggccattatgatatatgccgcaatacagggggcaatcagccctgcaccttacctccttgcgcgctacggtatccgaagttcatcatctcgctgttgtaggcgaccacgccacggccgaccgccggcagaacgatcatgccgccatcgccatgatgcgcggcgacttcgtccaaagtggccgtcgcggcatcctcgacgttctcgccggagaaacgcacacgatccgacacctgatgggcggcgaccaccttgatgaatgcctcgccgatgccggtgcaggacaccgccaccgtggactggttggcgaacgtgccgcaaccaggcagcggcgaatcacccacacgaccgtgcatctggttggtgatgccgccagtggacgtgccggcggcgatattgccttcggcatcgcgcgccacggcgccgatggtgccatgcttctcccactcatcgccaccggactgagcctcggccaaggactgacgacgctgttcggtgatgaagtactcgttgctttcggtcgcgacgccccaatcggcaatctcggcatcggtcgggtccgcgaacagcacatgcttggtctgctctttgacggcacgcgccgcatcgatcgggttcttcacggtgcttacgccggtgaccgcaccgacctcgccatcgccggtcatcaggcaggcgtccatctgggcgatgccatcgctggtcagggcggcaccacggccggcgttgaattcgggagcgtcttccatgacgtggatggcggcgaccacagcctcatgcgccggcgctccggattccaacaactggtatccggcatcgagggcgcgctgcagatcaagttcgacctgggcgatgcgttcaggcgtgctgtgcttgccacgactgcccgctccggcgtgaatgataaacgtgatgccggtttcgctgcccgccagttcagtggtcaccggcgaaacggaggatgtggtcatatcgtgtccctttctggagtcagatggatgtgctgacgccaacgtatcgttgcttccgcatgtatgatagccgttgatggccgcgaccggttccgcatttcgcatcatcggctcgcgatggcgtgactcgttactgcgccacctcgccactacgccaggggcaatgcgatgccggctcgatcggccaggtcacgcaacgaccacgtggtctgccccgttcgcccgacaacgctatgcgcatgccacagcgaactgatgatggcttcctcgcttattcattcgtcgaatgcacccatcgatgtgggtatgcagccatcaaaaaaactcgacaaccgcaatgagccagtcacttggctacatctgtgctatcgtctcgccaatgattcgaatgccggtatcaatgtcagcagcatccgggcgcacaaagttgagacgaatatgggaatcatccatttcgtcaacgtcgaacacgctgcccggcatgaacgtgacgccttgggaacggcaggattccaatacatccagagagcgcacgccgtccggtaaggaaacccaaatatagtagccgcctgcaggcacggtccaatacacttcatccggcgcataccgctccaatgctgcgattgctgcatctcgtcgaatgcggtaagccttaatcaaaccgcgcaaatgttcggcgacgcggccttctttaagcagttccaggcagatgcgctgcgatgacgtgctcgtatgctggtcgaccatacgccgcagagccgccagccggttaatcacatgcgggtcggccacaacccatcccgtgcgcaggcccgaagtgacggttttcgagaacgtcgacaaatacatcacgtatcccgcattctccatgcccttaagcggtatggggcgatgtgcgtcggacgatcccccgccgtaccacaaatcgccgtaagcatcgtcttccacgatcagacactgatagcgccgcgccacgtcgatgagttcgctgcgtcgttcgggcggcagcgtggtaccggtggggttttggaacgtcgggacggtgtagatgagcttgggccggaatcgcgcgcaatagccgtccaacaggtctgtacgcataccgtgctcgtccactggaacgccgatgatgcgcgcatccgccgagcggaaggtctgcaatgccgggaagaacgtggattgttcgaccagcacgcagtcgccggggttgatgaacgcgcgcacgatgaggtcgatgccctgctcggagccggagagcaccatcacgttgcggacgccgcattgtacgcctcgtgcgcgcatatgttcggcaagcagcgcacgcaactcttcgaatccctcgataggtgattccggttggccgtcgaattcccgcgattcgaacgcctcgatgctcaccttgcgcaacaaatcgtccgggatatccgccgggttcggcgaaccggtggcgaagtcaataatggtgtcgccgcgctgcgcccgctcggccgaggcgatgtcatggtaggtaaaccggttggaataatcagagaacaacaccgaccatggcggacgcacgacggttggctccgggccctgaaccgaacggctttcacgaatcgtatggaccgccgcagagctgctgccctggtccgtcgtcaagaaaccagtggaggtagcacgttctacgtcgccggaagaggaggcttgcgatgttcccatttctgccgacgatcgtgttgttcgcgttatcgcattcccgaaatcactgtttgacgtgtgcggtgttcggcttgcggaggcagccggcagcacgaacgtgcctttgccgactttggaggcgataagaccttcgtccttgagctgctgatacgcctgcaacaccgtggtgcgattgacttcgagacgcgaggacagctcgcgttcgggaggcaggcggtagccctcggccatcgcgccggagacgatctgttcacgcagcccggcggccagctgccggtacatcggcaccttgctgcgtcgattcagctcaagctgcatggcagatcgtctccttgattcgtcagtcggataccagtctagcggcagacgaatcgactacagcgacaggaagagctcgtggatgcgggtatcgtccgtgagttccgggtggaaggcggtggccaggatattgccttgacgcaagcccaccacgtggccatcgacttcggtttcgaccgtggcctcagggccgaccgacaccacgtacggtccgcggataaataccagtgggaagtccgtgatacgctgcggatcatccgctgcaccaaaatcggcggtggcctggaaactaccgagctgacgaccataggcgttgcggcgtacgacggcgtcgagcgcgccaaagtagacattgtcgtcattgtcgagctttttagccagcagaatcatgccggcgcaagtgccgaataccggtttgcctgccttgatgtgggcggcgatcggctcgaacagcccggtcgaatgcaggagcttgccctgtgtagtggattcgccgccaggcagaatcacgcggtcgatggattcatcgaaatcctcggccgcgcgcagcagtttccacggcgcaccgagcttgtccagcaccgccgcatgttcggcgaatgcgccttgtacggccaggatgccggtcacgccgtgcttgacgttttcgacgtccgcggactcttctttggaaatatattcaacagctacaaccatgttgtctccttgggccttgactcccgctggcgggagcgccaccctttcttggctcccctcaaaaaggggagccaaggtaacgcactcactcgccgcgagcggccatgatggtctgaatctcgtcctcgttgatgccgaccatggcttcgccgaggttttcggacagcttggcgagcagatcggcgtcctgccagttggcggtggccttgacgatggcggcggcgcgcttggccgggtcgccggacttgaagatgccggagcccacgaacacgccttcggcaccgagctccatcatcagggcggcgtcggccggggtggccacgccaccggcggcgaagttcacgacgggcagacggccgttgtcgtgcacgtacttggccaggtcgtagggcacggccagctgcttggcggcctcgtagacctcgtcgtcgcgcaaggccacgagctcgcggatctgcttgttcatggtgcgcatgtggcgcacggcctgaatcacgtcgccggtgccgggctcgcccttggtacgaatcatggcagcaccctcggcgatgcggcgcagcgcctcgcccaggttcttcgcgccgcacacgaacggcacgtcgaactggttcttgtcgatgtggtacacgtcgtcggccggggaaagcacttcggattcgtcgatgtagtcgatgtcgatggcctgcagaatgcgggcctcggcgatgtggccgatgcgcaccttggccatgaccggaatcgagacagcttcctgaatgcccttgatcatggccggatcgctcatacgggagacgccgccggcggcacgaatgtcagcggggatgcgctccagcgccatcaccgcgcacgcgccggcatcctgcgcgattttcgcctgttcgggcgtggtgacgtccatgatcacgccacccttgagcatctgggccagattacggttgagttccgcacgattctgcgtcatgagtttcccttcgttcgacgctgcttggtatcgcgcttcattattgaacggattggattggccccacccaaaccagtccaatttggatggggccaatccgcaacttctgcacccatccaatccggcaaccggttgtatggccttatgcatccggcacgtattcgaagatgcgcgcaatcagtgggaggtattagccgacggtgttgccgtagatttgggcttggaggtctttacgggcggtttccatgcgggtgatctggccgaggagggttatcttctcttcgccgtcgggcagctgggccatgcggcgtttggccaaaccgatctggcgcatgaagcccatgtccaacaatcgggtgagaagctcagtggcgtagcgctgctcctccggcgtggcaggacgcagctgtactgcggcggcaccgccattcacgccaacacctcctcccgacacgttggcctgcaccggctgcgcaccgctaccggtgtcgtcgccaggcagtggcaacggcatgacggccagctcgttgatcacctgattcagcatcggcccgccggccttggtgaggttgtgcatccacagcccctgcggggtatcgtcggatggcagtccgccggcggccgcgatcgcctggaacagggtgcggaacaccgaagtcatgaaatggtcgatggtcagctgcccgaacatggtgcggtcgatggcgcgcggcacctgaatcagcacggccatgaactgctgttcggcgatgaatacggcgtcgtcgatcttgaaatatgcctgttcagcggcgtcacggcgctccaacgccttgcgcgtggccggattggcgtatgggttggtgccgggttccacacgcggctcgtcacgctcgaatcgacgtttgggcgcgtaggcgtcctcatcgcgtacatgcatctgccggcgcgcgttcatcacctcgcggcgcatcacctcaagatccacgccgatacggcccgcggacttgcgcgcgtaagcgtcccatagggagcggtcgcgaatctgcgccaccagcggggccacggctttcatcgcacccacttggccgggcgtgtaggtcaggtcgaaccggccgatggcggcgtcgatcacgaagtcatacaacggtttggcgcgggcgatcagcgagcgcaccgcctcgttgcctcgctcgatgcgcaggtcgcacgggtcgagattgtcgtcggccacggccacgaaggtttgggagaggaaggccgaatcaaggccgaaggcatgcagcgcggctttctggccggcggcgtcaccatcgaacgtgaacacgatgcgcgagctcaacggctggtccttgaccttcaacggcccgaccagctggaccgcgcccagcgaatcgtcggcgatcaggcggcgcacgatcttggcgtgctcggcgccgaatgcggtaccacacgtagcaatggcggtgtcgataccggccaagtgcatggccatcacgtccgtatagccttcgacgatcaccacctgtcgcttcttgacgatggcggatttcgccaaatcgatgccgtaaagcacctgggttttgcggtagagctgcgtgtccggcgtgttgatgtatttggcggcgatctgatcgtcttcgtatagtttgcgcgcgccgaagccgagcgtgcggccggtcgaatcgcggataggccacgtcacgcggccgcggaaatagtcatagatgccgcgctggccttggcgggccaagcccgcgtcgaggatttccttctgcgtaaaccccttggaggccaagtggcgcacaagattatcccaaccttggggcgcgtagccgcaaccgaaacgttcgcagtcggcttgggagaagttgcggcctccgagcagcttgcgggcgggcagtgcttccttggtcaggatctgggagacgaagaagcgttgggcttcctcgcaggcttccagcagtcgggtgcgcttggagccggtgttctcgcggttcgggccgttgccgctgttctcgtagtgcagctcgatatggtacttgtcggcgagcagttccacggcttcgcggaagtcgatgttttcggattgttcgacgtatttgaatacgtcgccacccaagccgcagccgaagcagtgccacacaccgagtgaggggcgcacgttgaagctgccggttttctcgtcgtggaacgggcacaggcccacgaaggtgccggtgccggagggcttaagcgttacggtcgcagatacgatgtcatacaggtccgcggcggcgcgcaccttctcgacatcttctttcttaatcattccgaccataagtctctagagtaccgcctcacctgagacacggtaaatttttaccgtcggttatcatttcttccgcgaaactcccttcagtcgcctacagcgacagctcccctcacccgaggggagctggctcgcgcagcgagactgagggaagcacccgtccaacacgccctcagcacaagatggagtgtagggccagagcggagttgtcggtcaggcttgcgacctgatcgatggcgacgcgcaggcgctcgttgtcattggtggattcattccaatcggccaggaactggctttccaaagcgtcggatgggagcggcgaatcggccataagcacatcgaccaaatccgatacgatcttgagctcctcctgatggaatggctcgcgctcgcgaggcgccatgacgaagtacacggcgatgcccttcaacgccacgatctcgtaattcgtgtcctcgggaatcacgatgttcgcggaataccgggtcaacggcccgggcccatacgtgtcgcgcgtggcggtttccaccgaccagcagaagcgaccgatcaaatcggacgtgatgttcttgagctgtgccaacgattcgcgcgaaccattgaaatgtgcagggaacaaatgctctcggcgcaatcgcatgaacgcggccagcagcttgtcggcatcccacttcgccccataccatgcgcgcgtctgctcgatgatgtggtccagcatcttcggatcggcgagcacaatcggatcgaacgcgccggtggcgatggaatcctcgacatcatgcacggagtaggcgacatcatccgaaaggtccatgatctggcattccatgggcttggtggcctggggagcgccgattttgagccagcggaacaccggttcgtcatccgggtagacgcagaacttcttcgaccgctcccccttggggtgttggtcggcttcggccaaggtccacgggtatttgacggccgcatccaaggccgcacgggtcaggttcacgccggccgaacgcccgtccgggtgaaagatcttgggttcgagccgggtcaggatacgcatggtctgtgcgttgccctcgaagccgccgatattgctggcgatgtcggcgagcgcacgctccccgttgtgcccgaacggcgggtgaccaaggtcgtgggccagacaggcgcagtcgaccacgtccggatcgcagccgagcaatgtgccgatttggcgaccgatctgggcgacttccagcgtatgcgtcagtcgggtgcgggcgaaatcgtcggtaccggcaatcagaatctggcttttcgcgcccaaacgccgcaaagcggacgaatgaatcagtcgcgcgcgatcgcgttcgaaagccgtgcgcgacttggatttgggcggctcgggtgcccatcgctcctcgtcgaaggcgttgtagccctcatcgctcagcacctgttccccatccaacgttgtttccatatgccaagcataggcacacatatcggccgcagtaatcccgacttcccgaatatgtgccactgacgtcaactcaacggcacatattcgggagattggggccgatttcccgaatatgtgacgctcagcacatgtcaacggcacatattcgggaagaagggattacggggtgccaccgtatggcggtaatgcaccttatagcagcgtggcggggtcgagcttggcgaggtcggcggcgggcagtacttcggcggcatgctcgtaaaggcgcgggatgcggttgcgcaggcaggtgaagatctcgtagctgatggtgtcggcggcgcgggcccaatcgtcggcggtaggctcaacgtaatcctcgccgcggcccgggccgaacagttcgaccgtgtcgccctcgtgaacgccgagttcggcggcggatccgtgcaggtccacgatgaactggtccatgcacacgcggccgcacacgcggtagagcttcggaccttcagtggtcatgatgcgcaccgggccgcccggcttctccacgtgcttggcaccttccatatcgaaaccggaagcggagcggtggatgccatcggcgtagcccagcggcacaatagcggtcgaggtgttgtccggggtcaggtaggtgcggccataagagatgccatggccggcctccacatccttgaccgtgccgagctgcgcctgcaggcgcatggccggggtcagatgccagtcgcgcggggtgcccatcgcgggatcgggctcgtagccgtacaggccgatgccggggcgggtaagttcgaagtgaatctccgggcggtccaaagtggccgccgtgttggccaggtgacggatctccggcggaatgccggcctgttccatgcggcgcgtgaagtccttgaatgtttcgatctggcggtcggtggaggacacgaattcgggcacatcgggcgaatcggccacggcgagatggctccactgacccacaatatgcaacacgccctctttggcgagcggcacgagtttggcgagcgcggcgtcgaatccggccggcgtgaaaccgttgcgaccgaagccggaatcgaccttgacgtgtacgcgggcgggcttgccgagcttgcgtgcggcggcggccacggcatcgatgccgggcagggagccgaccgatacgtcgatatcggcagcgatcagctcatcgaatggcgcttcggtgccgttgtagacccaagtcagaatgcggcaacggtcggggccgatgccgagtttgcgcagcagcagtgcttcatgcgattgcgcggtgccgagccatgtcgcgccgccggcgagcgcggccagtgcggcgggcagcagtccgtggccgtatgcgtcggccttgaccacgcccatcaccgccgtgccggagttcgggccgccgaccacggagaccaggtgggccatgttgtcgcgcatggttttgaggttcacgatggcctgtgcggggtattggcggcgggtggccgcatagttggccttgccttgctcggacgagaatgcgatttcgggtgctgcgttcatgctcataggcacctattgttgcgcaggaatgtgacgtgtggtcacaatcgtttgttttcgcccggcagtcgtacactaatgaccgatatgcggtttctcggaagccgcctttgattcccggcgttgaggcgtgccgggatcccggaaatccgtccggtctagccccatatcttaagtttcatgagagaagaacatggatctgtttcgtaagaaaagcgtggatcagcttgtcgccgaatccactcccctgaagcgcacgatgcgcaccttcgatctgacgatgctcggtatcggcgcgatcatcggcaccggcatcttcgtgctcaccggcaagggcgcgctcaccgccggcccggccctgtccgtatcgttcctgctggccgccatctgctgcggtttcgccggcctgtgctacgccgagttcgccgccatggctccggtctccggctcggcctactcctacgcctatctggcgttcggcgaactcgtcgccttcgtgatcggctgggatctgattctggagtatgctctgcaggcggccaccgtgtccgccggctggtcgggatacttcaacaagttgttggaaggcttcggactgcatctgccggtcgagctgaccgccgcctacggcaccaacccggacgtcaccacctacttcaacctgcccggcttcgtcatcgtgctgatcatcacgtgggtgctctcgatcggcatcaaccagaccaagcgcaccaacgacgtgatggtgctcatcaagctcgccatcatcgtgctgttcatcgcatgcgccgtgtggtatgtgaagccgtccaactggcagccgttctccccgtatggcgtctacaccttccagcccggctccacccagccgtacggcatcgtgccggccgcgtcgatcgtgttcttcagcttcatcggattcgacgccgtgtcctcttccgccgaggagaccatcgacccgaacaagacactgccgcgcggcatcctgctgtccctggccgtttccaccgtcctgtacatcatcatgaccctgatcatgaccggcgtggtgccctacaaggatttcgccaggtacatcgacgcgccggtggccggcgtgattctggagaccggcatgaactggctcgcggtgatcgtgaacctaggcgccctcatcggcatgaccacggtgatgctcgtacagctgtacggccagtcccgtatctgctacgccatgagccgtgacggcctgttcccgaagttcttcggccacgtgcacgagaagtaccgcaccccgttcaagggcacctggttcttcggtctgctgaccgcgttcgccggcggcttcatcaacatcaacgtgctgttcgagctggtgaacatcggtacgctgtccgcgttcatcatcgtgtcggccggtattctatggatgcgcaagacccagccgaatgcgccccgcggcttccgcgcgccgggcgtgccggtcaccccgattctgtccatcgtattctgcttcgtgctcatcgccggtctcaactgggagacctgggtgcgtttcgccatctggttcggtctgggcctgatcgtgtacttcggctacagccgcaagcgctccaagctcggccttgagcagaaggccggggctgacaccaaggtcgctgcgactgaggactgaggtctatcggctgaccgatagtcgatggctgctttcgtgaaaaccgtacgctgagttactttcagcgtacggtttttgcgatatgcacgagtttgaacgggcggccgacggaccgtacgtgcgcgacgacgtggaccttacctgaccagctccaccgcggaaccgaacacgctggcgacagccacactcaccactcgtggcgctgataggcgattctggtggtgtcgaccggccggtcgagcagctggatcaggccgcaacgggcgaagccggagctttcgagcacgtgctgcatggccttgttattggggtgggtgtcggcgcgcacgttgccgtagtgcttcagggcccacctgatgcagtcgcgggccgcgtggcgcaccagaccggatgcggcgatgcggtggatggtcacataggtgtcgttgtccagccaggcgccgtcgattttggcgtaggtcggatccttgcccgggcacagggcgaactgggccagaatgcgttcgtggccattgcaggtgtcgaccagcagcatcgtacgctggttggcgatgtcgtcttcaatcaccgattcacgcggaaattcgttgccccactgggtggggttgccgttggcggccatcaacgcgcgtgcgcgtgcgtagattttatgcatctgcggcagatcgcgcatggtggcgtggcggaaacggcggcctgtcgccttgtttgcagcgttcgactgagtcacttctcacctctccgacatgccgggttgccggcacggtgaccggcgattaactgacggccaacctaccatgccgtaggcacaagaaatcccctccgcgttgcatgacggacactaataaacaatggcttccgtccgcaggagccggacagtccagccgagttgaggacagccaccctcagtcggcttcgcccccggctcccgccagcgggagccgaatcagaattgaatcgaatcagatgaatcagacgaccttgcgctcgaacgggtcggagctgatgccttcctcaaggatctgcttggcccattccttggcggtgaacaggctgtggtcgcgatagttgccgcagctcttctcggtggtggcgggcacgtcatcccatgtggccttgtatgcgatgaactccaacgattccttcaacgccttggccacatcctcggtggagtgggtgccccaggtcagcaggtggaagccggtgcggcagccgaacggcgagcagtcgatgtagccgggaatgcgttcacgcagcagcacggcgatggtgtgttcgatggtgtgcaggccgccggtggggatggcctgctcgttcggctgggtcaggcgcagatcgtaattggagatcacgtcgccgtgagggcccgtttcggtgtcgatgtaacgcacgtacggcgccttgaccttggtgtgatcaagctggaatgattcgacgacgggcttttcggccttgtcttctgccatgctgttgcctttctacttgctgagtgttcggtcatgaagtatcgaacagtcatcgtagtcgcgccagcccaagaacgcccgcaaatactccgcggttcgctataggagattgttatgacgcactcccggcattgaacgaggcgatggtttgcatgaagcgctggccgtagaggtcgagcttgtgttgaccgacgccgttgaccgccagaaattgcgcgttggtaaccggcttgatgcgggccatgtcgcgcaaggtcttgtcggagaacacgatgtacggcggcttgccgatttcctgggcgatggtgcgtcgcagttcgcgtagcttctggaacagcgattcctcgtcatcgtccgggatatacgagcccagcgcatcgccgggaacattggcggaatcggcagtatcagccactcccccgctccgaccggaaccggccgccgccgacttgcgttccacccgtttgatctcatagtggaagtcgggagcggcggttttggccgcccgcgcaccgaacatgacgattggcatacgcccttcggcgattgacaggtacccgtccgtggccatctggctcaacacgtcgcgcacgcgagcttcgttcacgtccttgagcatgccgaaggtgggcatccgctccgggttcagccatgccagatcctgcgcccgcgaaccgcgcaggatcttgacgatcttgccggaaccgacgcgctgccccacgtcatgcacgcaacggctgatcgcctgcgccacgcgggtcacgtcgatggtctcgaacgtgctttcgcagttcgagcaggcaccgcatctgccggactgcgaagagtccgccgcaatgtcttcacccgccgcggaaccagcattcggcgacaattcctgaccgaaataccgggtcatataccggtgcaggcagtcggtggtgcggcagtagccgaccataccgtccagcagccggcgcttggactggcgaacgatctcctgctcttcgggagtcaatcgctcgttctcataatcgttatccagcaaccgacgccgggtgacgatgtctgactcattccacagcagcgtgcatcggctgggctcgccgtcacggcccgcgcggccggcctcctgatagtaggcttcaatggattcgggtagattgtggtggatgacgtaacgcacgttggacttatcgatgcccatgccgaaagcgttggtggccacgaccaccggcaccttgtcggtgatgaagtcgcgctgggccacctcacgcgcgtccggcgacatgccgccatggtaggcgacggccggatgccccatctggttcagcgtgtcggcgagcgcttcggtggtcttgcgggtggcgcagtagacgatgccggattcgtccggatggtcggccacataccgcgccacccatgcggccttgtatttggtctccagtttgaccacatcaaaatacaggttcggccggtcgaatccggtgacggtgacggccggattccgcaatcccagcagtcccacgatgtcccgacgcacccgttcggtggcggtggcggtgaacgcacccaccggtggacgctgcggcagcccggcgatgaaatcgccgatacctaagtacgacgagcggaagtcctgaccccactgggagacgcagtgggcttcgtccacggcgatcagcgagatcggcgtacgggcggcaaagtcgcggaatcgcccggtttccaagcgttccggggccacgtacagcagtttgatctgcccggcggcggcttgggcgaacaccatcgcctgctcgtcgggagtttgagtggtgttgatgaacgcggccggcagaccgaggtcgttcagcgcatcgacctggtcgcgcatcagggaaatcaagggagatatgaccaaagtcgcacccgggctgagcgcggcgggaatctggtagcacacggacttgcctgcgccggtgggcatcacgcccaagacatcgcgtccggcaagcaaagcctcgacaattccttgctgtccgggcctaaacgagtcatagccgaagtatcgtgtgagcgcctccagcgccgcctgatgtgctgtcataaacgaccagtgtaggccgaccgcggatggatttcatcgtataacggaatacctcgtaacgatgtacgtagcccttccgtattattatgcgtcaagaaacgttattcccggcatatcacacgatatgccgctttgagagaactaagacggggcattttatggccaacgatacattttccttctcctctcctgacgatcaggagacggcggtgctgcagcctgtggccgccgatgggctgttcgcagccgcggccacaggtaccgccacgccacagcaaagcgacaatggcaccaataaccatgctgacaatacagcctatgtgggtgaacatgtcatggcatctaccaccgctaaatcacatggcaaggccgcacggattgccatcataaccatatttgcagtgttgcttgccgcattaatagcctatttcttcgtcggacgttggtacttccaagacaaggctgcgcccggtgttcatttgggcaatgtctctgtcatgggccagacccgcgaagaacttgcgaatactgtgaagcagcagctgaataacaccacagtgacgttcaccgccgaaggcaacagcgtcaaagcctcgctgaaggaccttggcgtcaccgtcgacacggataaaaccgtagatgcgctgttgaacgcgaagaccggcgacgtggccaagctcaatattttcgatcagccgcatatcgctctgaccgccaccagggacaaagagactgccgaacaattcgtcaccgccggcctggtcgatgaggccgaccgagcgcagattgccaccgttgtctacaacaagagcaccaagcagttcgattacaccgcgggtcaggatggcaagggtccggatatcaatgttgtcaatgctgcagtcaaggaggccgtcgcgaccccgggcgaaaatgcgacggtgccggtcaagatacagactgcaaagaatccgattgatgacgcgagcgcacagcaaacacagtttgacgccaatgccaagcttggcctcaaactgaccgtggacaacggcgtgaacaagagcgtcaccatcccggccgataccattgcctcattcctcaagcccacggtgaataaggcgggtggcaccatgagtctggtagtcgaccgcgatgccatcaccaagtacgtcaccagtgacagcgtaaccaaggaactgactgttcccaaggtgacacgcgaggtctacatcacgccgaaagacgaaggcggcgtggaaattggtgccgataagacactcggtgtggatggtattgaagtgactggtgccggggacgcccccgaacgtctggctaccgccatcgagcagaaccagtccactgattccactgtggctgtgaaagacagcccatatgatgtcaagcaggtcgaggtgcctcataacttcgatacggcaaatggcgataagtgggttcatgttgatctgacgaaccagactgccactgcatatcagggcaccacggtggtcaagaagttcaacatcgcttctggcaagcccaccgccgatggttccatgctgtccgataccggcacgttctacgtgtatctcaagtacgaatcgcagaccatggttggcgaaggctacaaccagccaggcacgccgtgggtttcctactataacggcggcgaggctctgcacggtgttcctgcatacatgtggggcgagcaccccatctatgtgcagcagggtatcccaggctcgcacggctgcatcaacatgcaggtggccgacgccaagtggatgtacgactttgccaccatcggcactcgtgtggtcgttgatggcaccacaccgacttccggtcaggcgttgcgcccggctggtgcggatgccaccggatggcagggcggcaacgccagctgattcgatccatgttcaatcgataacggaaaatccccgacccttgtgggccggggattttttgtaggtaccaatcgatagcgagtccgccgataagcgtggtggcaccgtcaatacggtgccaccagtaccgtcagtacggtcagatacgatccaatgcctgcttgagatcggcgataaggtcgtcggcgttctcgataccgaccgaaatacgcaccagattggcgggcacctgcagggtggtgccggccacggaggcgtgggtcatggcggcgggcacctcgatgaggctttccacaccgccgagcgattcggccagtgtgaagatctgcgtgtggtccacgaagtgcttggccgcctcggcaccggccgcgagctgcacggagacgatgccgccgaagccgccgtgcatctggcgggcggcgatttcatgacccgggtgggcctcgaggcccgggtaccagacgcgctcaatcacatcagagggctgggattcgagccattcggccaccttcagggcgttggcactgtggcgcttgacgcgcagatccagggtcttcaggccgcggatgtccagccaggagtcgaacggggagggcactgcgccggcggcgttctgcaggaaggcgaccttctcacgggtctcctcgtcgttgaccaccacggcaccgccgaccacgtcggagtggccgccgatgtacttggtggtggagtagaccaccacatcggcgccatcggccagcgggtgctgaagggcgggcgaggcgaaggtgttgtcgaccgcgaccttggtgccgtacttgtgggcaacttcggcggtggccgcgatgtcggtgatgttgagcagcgggttggacggggtctcgacccacacatactggtagtgcttggaggccaatgcggtttccacggctttcagatcggtgatgtccaccacgtcgaggcccacaccccacggcacgaacaccttggagagcaggcggtaggtgccaccgtacacatcgttgccgagcaggatgttgtcgccgggcttgatggtggagcgcagcagcacgtcgatggcggccaagcccgaggagaagctcagcgcgtacttgccgccttccacggcggcgagctgctcgtcgaagctggtgcgagtggggttgatggagcgagagtagtcgtggcctcccctgaggcccaacacgccatcctgcttgaaagtggaggtggcgaagatcggcgtgacgaccgcaccggtggtcgggtcgggctcctggccggcgtggatggcgcgagtggcgatgtcggtgttggcgaacttggcgttgtattcagcggacatgatattgggttcctttcgggattgttccgtattcgaaggtaaaacaggtgcggttagttagtgcggatgttggtattgattcttctgatagctagttatggagtccatccgcagctccctcatcagagggagttccgttaaggtactgctcggcgagggagggcttgctggtgcgttccacgatgtcgccgtagccgttggcacgcatccagtcgtcattgaagatcttctccagataactgcggccggaatcaggggcgagcaccaccacaatctggttctcgtccaaatcattggcaagcgcgtacttgatggcgctggccacggccatgccggacgaaccgccgaccagcaacgcctcctcgccggccagacggcgggtcatttcaaaggcttcggcgtcggatacgcgcacgatgtcgtcggtgatgttccggtcgaaagccttggggtagaagtcctcccccacgccctcgatgtcgtactggtggacttcgtcgcgtgaggaagcggagtagatggagccttccgggtcggagccgatgaccttgaccgcgccgttggaggcatccttgaggtacttgccggtgccggagatggtgccgccggtgccaatgccggccacgaagtgcgtgaccttgtggtccgtagcctcccagatctcggggccggtggtgtagtagtggctcagcgggccgttcgggttgtcgtactggttcgggcggaagccgccgggaatcgtgttggccagtcgttcggcgacctggtagtaggagcgcgggtcgtccgggccggcgtcggtcggtgtgacgatgacttcggcaccgtaggcgcgcagcaccgcgcgcttggattcggagaccttgtccggcagggtgaaaatcgtgcggtagccgcgctgctgggcgaccagggccaggccgacgccggtgttgcccgaggtgggctcgacgatcacgccgccgggcttcagctggccggactgttcggcggcgtcgatgatgcgctcggcgatgcggtccttggaggagccgccggggttgaagtattcgactttgacggcgatggtggctttgacgccggccgcctgcgggatgtggttgagcttgacgagcggggtgttgccgatgagttctgcgaggctgttgtggatggtcatgtgaagtccttcgttgctggggttgtggggttttgctgcgttgcgttcgtgaaccgacgttcccagacgaatggactgtggctttggtttgaaaatcgagtattcccgctcactgtacggtgaatccgaaaagtgaaccggtttttcatgttaaccacggctcgcgcattacacgattacgcttgtgccatcggatacatgaaaagtatgcggcagattcgccgcgattcgaatgctccatctcaagttatgcgtcactgaccgctcgcccaggggcgtcggttagcgacaacaacatgagataatctgcatgcctcacaccatagcacaacccgcgacaagcgcgtgtcgccggcggccggctcccctcagagaggggagccaaaaaggtctataacgaggctgcctcgatgagctgacgggtgtaatcggattgggggttgccgagcacttcggcggtgggacccgtctcttcgacgcgcccgtcgtgaagcacgaggatgcggttggcgatgtgctgcaccacgccgagatcgtgggagaccatgatgatggcggtgctcggccgggcctcacggatagcggcgaaggcgtcgaggatctggatgcgcgcggccacgtcgatggcgctcattggttcgtcggcgaggattaccttgggctcgttgatgatggcgcgggcgatgaccacgcgctgcgcctggccaccagacaggtcgattgggtaccggttcaggaagtccgccggttcaagacccgccatggtcagagccgcgaccacccgctcgtcgatatcggtgttgttcagatcacgtcgctgcagactcagcggttcagccaccgatttggcgacttgccaacgcgggtcgagtgatgagaacgggtcctggaacaccagtcccgattcgcggcgcagggtcgcgaatcccggcgattttcggccgccgacaatggattggctctcgtattccacgctgccggaatccgcggattccaagcccagcataatgcgggtcagcgtggatttgccggatccggagccgccgatcacggccagacattcgccggcgtggacgtcggcggagacgtcgaagaggacttggtggcgtgcggtgcgcggtccgaaggatttggtgatggagtgggcggaaaggagtggcacactgctattactcatgcgaatcctccttgggggtgtggagggtgagggtttgggcggcggcgaccaagcgttgggcttgcggcgtggtcggtgcagcaagcaggtcggcggtgggtccagattcgacgatgcggccggcgtccagcacgtagcagcgggtggtggcacgcgcgagtacggagaaatcatgggtgatgaacagcatggatgcgccggcgtcgtccaccaacgaggtcagcaggtccacgatctgacgttgcgtgatggagtcgagcgcggtggtgggttcgtccgcgatgatgaatcgcggtgaggtgatcagcgccgtggcgatgcccacgcgctgctgttggccgccggacagttcgtgcgggtatgtgccggccacgtcacggtccagtccgaccttgtccagcatggtattcactcgctcagcacgttcggccttggtcagatcgtagtgcagtctcaacggcaacgcaatctgctgcgccacggtcatcaccgggttcagcgcatgggccggattctggaataccgtacccacataccggccgcgcagatcggcaagcgtatgctcgtcggcgtacgcagcggaatcgtggcccgaggtggcaaccctgcgttcaccggcaacatggtgcctatctgccgcgccgcgttcttcgtcagatcctgagtcatcttcctgcccatgccgcgactcggcggtttctccggacaggatggcggtttctcccatcgtgatggtgccggacagcacggcctcgcgcggcaacaggccgagcaatgacttggcgatcatcgatttgccggagccggaggaaccgatcaggccgacccgttcgccgtccgcgatggacagatcgacatccgtgacaatcggtttgccgccgatagcaatattcagcccgtgaatttcaacgctcatcatccgtctccttcagcgctgccactgcggactgcgccgcagtgtcaccggctcccctagccaccggcacaaccgcaccgggcacagtcatctgccgcaacgcgggattagccaccgggtcggtggcgtcgcgcaacgcgtcgccgaacaggttcagcgcgaccaccaccagggtgacgatcagaccgggccacaccaccgtcaacggaaacacgttgatgagtttgaccgaggtggccagcgaatggccccagctcggcacccccgcgccgacgcccacgcccagataggtcaggcccgcctcggccagcaccgaggtgcccgccgacatcgacgattgcaccatcagcaccggcgtgatgttcggcacgatgtgtctgaccagtacgccgaacccgctggcaccgttcgcccgggccgactgcacgtatcccgagcgggcggcgagcagggcggccgggcgggcgacgcgcgccagatgcagcccgtagccgatggagcatgcgccgatcaccacggccgcggatgcgccgaacggcacagcgagcagcagggcgatgagcacggtggggatggagatcagcgcgtcgaccacggcgaccgacgccgaagcgagcgccgaagaacgggcgaccatcagcccgaccagtaggatgccgatggcagccgagcagacaacggtgagcagggcgatggcaaggttcgtacgcgatccggccatcagccagctcagcacatccgcgccggtgccgtcggtgcccagccaatgcgcggacgacggcttatcccacacgtggtagccgtcggtggccagcaacgactgcggggtccagaacaatgacaccagggcgacgaccatccacgatcccagcacgatcagcgagtagcggccggtgccccgggaccagatggtgcccagaaccacgcccgaacgacgccatcgaccattgcgatcaaccatcattcctcctttccggcggccagacgcgggtcaagcagcgcgtgcagcagatccaccgccaggccgatcagcaggaagaacgcggcgagcaggaacaactcgctttgcacggccaccagatcgcggttgccgacatcgcccaccaacagggcgcccagaccgggcagggcgaacaggttctccaccaccatcacgccggtgatcatcgaggcgaacgccagtcccaccaccgagacgagctgcggagccgccaatcgcaatcccacgcgcaccaacgcctgggtgcgggtcatgccgcaggacatggccatatcgatcggccctccctcatcggcgatgccttccagaatggagcgcgtgtaacgcatgatgcccgcaccggacacgaatccggtggcaagcgccggcaggatcagggacgagaccgcccgcccgggagcgccccacccagcggcggggaacccctgcgagggcagcagaccgacaaggcccacgccccgtgcgaacaggaggatgagcagcaggccgctccacagggccggcacggcgccgcccacgatggacagcacgcgcaggaaaccgcgcacggccggcgaccgggagatcacggcggcggcgcccatggacaaaccgagggtgagtgcgatggccagactcatcacgatcagcgggaacgtgatcgtcgcacgttggccgacctgggaggtcaccgcccgcccggtcagcgccgacacgccgaggtcgccgtgcagcagccctccggcccagtcgagatactgcacgacatacggccggtcaaggccgaattcggcgcgcagggccgccacacgcgccggcgatgcgttcatgccggccatcacgaccgccacgtcgcccggcaggatgcgcagcatcgcgaacaccagcaccgaaatgccgaacagcgccgccgcgaacagcagcaagcgttgcatcaagaaccgcataacgcctcccttatcgattccctcgccaccgcccgtggcgtcaccggccggatgggccgtccacggtcgggcgtgccacggaatcactcccgcgccgcgcccgaccgatgggttccgggactacttggtgtaggtgatccgccagaggggcagcacggtctggatgaagtcctgcggtacaccattcacgcccttggcgtaggcgatggtgaccttcaaactgaacagccagtcggccggcgcgtcctcggagacgatcttcgcggccttggccagatacttcgaggcctcgtcgtcggaggtggcctccagcgccttggcgtacagggcctgcacgtccttgttgtcgtagtggaagtagtagctcggcgtggtccatccgtagaagtcgtggctttcggcatggtccacgagcgaaagatcatagttgccgttggcgtgcacgtcctgcagccaagtggagaactccacgtagttgatcttcaggtcgatgccgatgggcttgagctggctcttgagctggtcgccgagctcggtgccatacacgttggcgtaggtgagggtcaggtccagcggcttcgactcggagtatccggcctgttccatgagcttcttggccttggccacgtcatgcgggtacaggccgctcagatcctcgtaaccgggatccatctcggggatcggaccgccgaggggggcgtccacgccgccgcgcgaggcgatgatctgcttatggtcgatggcgtatcggatggcctggcggacgcgcttgtcggagagcttgtcgttggccatgttgaaggcgagcacgaacttgtcggaaccgccaccaactttgaccacatagttcggatccttgcggaacggctcggcaagggtcgcaggaatgatggacgaaagcacctgcacgtcgccgctcttgagggcgttgatgctggcgttctcgtccggcaggaaccggacgatcacgttctcggtcctcgccttgtgctcggtgccccaatacttggggttcgccttgagcacgatcttgtcgttcgggtcgaaggagaccacggtgtacggacccgagcccaacgcgccgttcttctgatcccaggtggcgtccttgtcatagaccaggccgggacggctggtgaggtaccacagcatgttcgagttgggcgcggagagggtgagcctgaccgtgttggcgtccacggcctcggccttgtccaggctcttgacctgctcgtagtcgtagtacttctgggccttgagctcgttgatggaccacgccacgtcctcggcgtcgagcttgtcgccgttggagaagttcatcttctcgttgaggtggaacgtgtaggtcaggccatccttggagatctcccagctcttggccagaccggggtggaccttgttgtccgagccgcgcgagacgagaccctcgtacacgttgccgatgaggatctgctcaagggccgaacccgactggtggcggatgtcaagattgaccggggcgagtttgaggccgacggccacggtgtcggatcggctggccgagccggaggcgttcgcgtccttgcccttgcctttcccgccgaagacggtgacgcccacgatgagcgccgcggccacgacgaccgcgatcagcgtccacagccaccatttcgggccgccgttcttcttgttgtttgatgatttcgcgcgcgcgttgaggctcgcgtcggtgctggcggcttgattcgcgccgtcgatgttcctgtcttcggttgcgccgaactcgccgtgcacaccattgttctgggacatggatactccctgatgcattcgggcatgcttacgcccgaatatggtttcgttgttatcttgcgtggttgaccgcccattcgggtcgatcaccacgttctactatatccccggacacgccggaggcaatggctatactggattgcggcgccgacggagggtccgcggcgaccacaacacgcggcgcatcgtcgggcaacgacgcgggaagcgctggcgtgggcacacgtgcggccttggcataaggccgggaggcagctatggcacatattcttctgggcgtcaccggcagcatcgccgcgttcaaggcctgtcatctggcatccgattggaccaaggccggccacgaggtgcgggttatcgaaaccacagcggccgaaggtttcgtcactcccctgacattcaccgcgctgacccatcagcccacccgtaccacgatgttccccgcttatccggccgcgcacggcgacgtgacggccaatccgaccgtgccaacgaccatcaatcatgtggccgatgcggcctgggccaatctgctggtggtggccccggcgagcgccgacgtcatcgcccgcatcgcctgtggattggcgaacgatacgctgacgtccaccattctggcctatgaggggccgaagatcctatgcccggcgatgaacgtgcatatgtacaacaatccggccacgcagcgcaatctgaaaacctgcgccgaattgggctggcagattgtggagccggaggaaggcaatctggcttgcggcgacgtgggacgaggccgtatggaagagccggcgcgcatcgaggaagtggccgctcggctgctggcggatgcgcaggatgaccaggctccctcatcttccccgctcaaggggctgcgcgtgctggtcactgccgggccaacgcaggagccgctagacccggtccgctatctgacgaaccattccaccggcaagatggggtatgcgattgcctcggccgcagccgaatttggtgccgacgtaacgttggtctccggtccagtcgccttgaccgcgcccgatgcggtggatgtggtgcgcgtcatgaccgcgcaggatatgttcgatgcggtggccgacgccttcccggcggcggatatcacgattatggccgccgccgtgggcgatttccgcgtgaccgagattgcgccggagaaaatcaagaaggccggccgcagcagcatcaccgtggagctggtttccaacccggatattctggcgtgggccggcgaacgcaagcgcgacgacggctcgcagatcctgtgcggattcgcgatggagaccgagcatctgattcgtaatgcggagaagaagctgacgtccaagcattgcgacatgctggtggccaacaatctgcgcgacgccggtgccgggttcggcaccgacaccaacgttgtcaccgtgctcacgtccggagcggaggatgccggcaccccgaagatcgagcattgggacaagatggacaaaaccgtgcttgcgcaacgactgttgctgcggctcgcagcgttgcgttccggcggcgcgagcaatgtcgatgacgagaacaaggaggcctgacccatgctgatggcggtcgatatcggcaatacgaatatcgtgatcggttttctggagggcgaccgcatcgtcggctcctaccgcatcaccaccaaggcgacgcacacctcagacgaatacggtctgatgatcacgcagttcctggctttgagcgattacacggccgacgatgtggacgatgtgatcgtctgctcggtggtgccgaaggtgatgtattccttccgcgcctcgctgatcaaattcctcggattggaaccgatggtggtgggccctggcgtcaagaccggcatgaacattcgtctcgacgaccccaaaaccttgggctctgactgcatcgccgactgcgccggcgcctaccacacctatggcggcccggtgctggtggccgacttcggcaccgccaccacgttcaactatgtggacggttccggcacgattcgctccggcttcatcaccacgggcatccgcaccggggccgaggcgttgtgggggcagaccgcccagctgccggaagtggagatcacgcaaccgcagtcgattctggccaccaatacgcgcactgctatgcaggccggactgtattacacgttcctcggtggcattgagcgcacgattcagcagttccgcaaggaaatcgatgagccgttccaagtggtagccacgggagggctcagccgcattttcaaaaacgacaccgacatgatcgacgtctacgattcagacctgatcttcaaaggcatggcatacatctactcgcgcaatgtgaagtaacgcggtgtgcaggcatcggccgcgcatagcgcagtcaattccgtccctccccgaaaagcctactcaaaaccctacttaatcgtaaagccctgattgaggccgtattctcggaggtctttctgccattgggccaggccgccggagagactgactttcttgccaggcttctccaatggttcgagcgggttgccttcctcgtccttcatgcccatctcaatggcttcctgtcgctgctgataggcgtggaaactgccggaccactcgtatgcctggcccaccgtcgatttgaagtcactgcgcgcatacacttcgaatggcagatactggtatccgaccgacacatcctcggcggcctccgacagtacccggttgaacttctgcccgccgaaatacgggatttcaatgccacggtcattggtaatcgtggttttatccagaaaatcagcggaattcagggtggcgtaatcggccgggaaggcaccgccgtctacacgcgcgctaatgccttgggcgtcatgcgccacaaagtccacgaaacgataggccgcatccggcttacgggtcagttgcaacacggtcagcgcagagccgccattttcggcgttggcaggctgcccaccataggtgggcatgggagccacgcgccacagaccggccgcgcccggcacattggacagcagcaacgacggcatccaagccccagagaacacggaggcgatggtgccggtgcccactctgcttttccaccgatccgaccatgtggcggaggtggtgtcaacaagcccctcatcgatcattttctgccagaattcggtgaaccgttgggtgccggcatcctcatccaaatcgatggtcacggttttgccgtcggccgacgtgtggaacggctgaccaccggcgagccagaccatcgcgtcatagaaactgccgtcgcccgagtcggcggcgatatacgcgccgatctccttgagcttttcggcggcctcgtaatagtcatcccaagtcttgatcttggtggcgtccacgccggcttggcggaacacgtcttcgttgtagaagaagcccatcgggcccgaatccatgggcagtccataggtacggccggcgagctgcacggacgaccatgtgccgagggtaaagaagttggaataatccgagccgattttgtcggtcagatcaagcaattggccggagaccgcgtactgcaacagtgcatagtattcgatttgagccacgtccggcgtgccgtaaccgtcttgaatggcggtattaagattgccgtagccggagatattggtccatttcacgcggatgtccggattggctttttcgaaacggcggatgacctcccccatgctcggttcccagctccatacgctgatctccgtacggttgtcgtccgtggcctgcccgcacgaggccagggatacggaaaggatggcagtcactgctatggttgccattcttttgattcgctgtccgatcactcgcatggtgacgagtgtactaggcggggcttaaaacggtaaaagccccatgacgggattcgtcacggggctttgtgtatcaggtgagattagctaggcagtctcagcgagggttcaaggcttacttcacggtgaagccctgatccttgccgtaatcctgcagtgccttctgccaagcggcgataccgtcagtcagcttctggtcgccggtgtaggacttgccaaggtagtcgccgaagatggtgcgggccttgacctcgtagggcaggaactggtagtcggaggacacgttctcagcagcctgagccagaacctcgttgtacttctgaccaccgaagtagtcaacgtcctcgccatcggcgttcttcacagtggtggtgttcttgaaggagtcggactccatggaggccttgtcagccgggaatgcaccgccggccacacgggtggccacgccgtcgccgtggttggcgtactcgatgaactggtaagcagcgtcagccttcttggtggaggcgagcacagccagcgaagaaccaccgttctcggagttggtggtggagccgtcagcggtcggcatctgggtcacacgccacttgccagcgccgtcagcagcggagttggccaggttggcaggcatccaagcgccagtgaacagggaggcgatggtgccgtcgaccatgcccttgaaccagtcctcagaccagccagcggtcttggtgtcgagcaggccctcgtccagcagcttctgccagaagtcggtgaaggtcttgacgcccttgtcctcggtcaggttgacggtgacttcggaaccatcggaagaggtctggaacggctttgcaccggccagccaggtcatggagtcgaagaagccggcgtcaccggtgtcggaggtgatgtagtagctgtcgcccagagcgtgaatcttcttggcggcgtcgtagtactgatcccaggtcttgatctgctcggcgtcaacaccggccttgtcgaagacctccttgttgtagaagaaggccattgggccggaatccatcggcaggccgtagaccttgccggcgaactgcacggaagcccacgggcccggggtgtagaagtcggagtagccggaggtcttgtcggtgatgtccagcaggttgcccttgatggcgtactgcgggatggcgtagtactcaacctgagcgacgtccggagcaccggagccagcctcgatggcgttatcaagctgggtgtattccttggtgttggtgccgacgttcttgagatcgaccttgatgccggtcttcttggtgaagtccttggcaacctgggtcagcgtgggctcccaagcccacacggtgatttcggtaacgtccttatcttgagccggcttgccactggcggtgtcggaaccgcaggcggcaacggaacccagcatggcaaccgcaccggtaagtgcaatggccttcttagcaacggtgaacttcatcgttctgttctccttccttggatcgcctttcggcggtctgcagtgattgtcaccacaacagcatggcaactctcctcgtcgtcatgctatcgtgaaccatcactctatggttcagtagtcacaaaacggctttgtttcgccactttgtagctatggttgcgataacatcttttattatacacattcttcggcaacacgccatcttggtatcgcaatccgcgcgccactgctcccatggcataagaaaatcgggcgctccgaagagtgcccgatcctgttatcgcaacctcccgctacagaaaccacaggaggaagtctgctgtgattgccgttacttcacctggtagccctgctgcttggcgtaatcctgcaggtccttctgccaggaagccacggcatcggagagcgtggtcttgccggtgtaggcatcgccggcgtagtcgccgaacttgccgcgagcgtagacctcgaagggcaggaacttgtagccggtggacacattggctgcggccttggccagctcctcgttgaacttctgaccgccgaagtactcgtgggccttgccgtcggagtcggtcagggaggtcatgttgaggaagtcgttggacttgagggtgtcgttgtcggccgggaaggcaccgccgtcaacacgggtcttaatgccctcggcgtcgtggcaggcgtattccatgaacttgtaggcggcggcgaccttggccttgtcgtcggacttcacgatggccagcgaggaaccaccgttctcggagttggtctcggagccgtctgcggtcggcatctgggcgatgcgccacttgccgtcaccgttcggagcgccggaaagcaggttgtacggcatccaagcgccggtcagcagggatgcgatggagccgtcatccagacccttgttccaatcgtcggtccagccgacggtcttggtgtcgatgaggtcttcgtcgatcatcttctgccagaagtcggtgaaggtcttgacgttcttgtcaccggtcaggttgatggtcacggtctcgccgtccttggaggtctcgaacggggtcgcgccggccagccaggtcatggagtcgaagaagccggcgtcaccggaatcggaggtgatgtaggagtccacggcgcgaatcttcttggcagcctcgtagaagtcgtcccacgtgcgcacctgggtcggatcgacgccggccttgtcgaagacgtccttgttgtagaaccaggccatcgggccggaatccatcggcagggcgtagacgccgtcattgatgctcaccgaggaccacgtgcccggggtgtagaagtccttgaaatcggaggcgccgagatcggagaggttctcgaggtggccgcgaatcacgtattcgggcagtgcgtagtattcgatctgggcgatgtccggagcaccggagccggcctcgatggcgttggacagtgcgttgtactcgtccttgttggtgccggcattggtcaccttcaccttaatgttcgggttcttggcctcgaatcccttgaccgtacgaggcagtgtggaatcccaggaccacacggtcagctcgatcttcttatcagaggagccggtgcttccgctatccccggcagaggtggaaccgcaggcagctacagaggagagcatggccacagcaccaatcagggcaattgtcttcttgccgaacttcatcgttctttccttccttgttatgggaaacgacgggacttggcgttttgttccaagtcttgtatcgttttaagaaacggtaccacatgttttatgtttacgcaaacacgacatgtcgcaccatggtgactaaccgcaaaccgaaggagatgcatcccgctcatgatcactcacaacagccagtattccgccgaaaccacccatcccgacaagcaggaaagcagcccggcgccgaccgccgccggcaccacggccagtaacgtctccacaactggcaacgccacgccggacgccagcatcgccctcaacgccgacgccactccggtagccgacgttcccccgcgtctgttcggctcattcgtagaacatctgggccgctgcgtctacggcggcatctacgagcccagccatcccaccgccgacgaaaacggcttccgccaagacgtgcttgacctggtcaaggagctgggcgtcacctgcgtgcgctaccccggcggcaatttcgtatccaactacaactgggaagacggcatcggtccacgcgagaatcgccccgtgcgccgcgacctggcctggcattgcaccgaaaccaacgagatgggcatcgacgacttctaccgctggagccagaaagccggcaccgaaatcatgcttgccgtcaacatgggcacccgggggctgaaagccgcgctcgacgagctcgagtatgtcaacggcgcgcccggcaccgcttgggcggatcagcgcgtggccaacggcatcgaggagccgatggatatcaagatgtggtgcatcggcaacgaaatggacggcccgtggcaggtgggccacatgagcccggaagaatatgccggcgcggtggataaggtggcccacgccatgaagctcgccgagtccggtctcgaactcgtggcctgcggttcctcgggtgcctatatgccgaccttcggcacgtgggagaagaccgtgctcaccaaggcttacgagaatctcgacttcgtctcctgccatgcctactacttcgaccgcggccataaaacccggaccgccgcctccatgcaggacttcctggcctcttccgaagacatgaccaagttcatcgccaccgtctcggacgcggccgatcaggcgcgagaagccaacaacggcaccaaagacatcgccctgtccttcgacgaatggggcgtatggtattcggacaagtggaacgagcaggaagaccagtggaaggcggaggccgcgcagggtttgcaccacgagccatggcctaagtctccgcatttgctggaagacatctacaccgcggccgacgcggtggtcgaaggttccctgatgatcaccctgctcaagcactgcgatcgcgtgcgttccgcctcgcgcgcccagctggtcaacgtcatcgcccccatcatggccgaggaacacggcccggcatggcggcagaccacgttctacccgttcgccgaagccgcccttcacgcgcgcggccaggcctacgctccggccatcagctcccccaccatccataccgaggcatatggcgacgtgccggccatcgacgcggtagtcacgtgggatgaacaggcccgcaccggtctgctgcttgccgtcaaccgcgacgccaacaccccgcacacgctcaccatcgacctttccgggctgcccggcctgcccggtctcggcacgctcgcgctcagcaaggcgcaactgttgcatgaggacgatccgtaccgcaccaacaccgccgaagcgcccgaagccgtcacgccgcaaccgctcgacattgcaatgaacgccaccggcacctgcacggcaacgcttcccgccatctcctggatcagcgtggaattccacggctaaaagacggagagtcacgcccgtaccaagtacagtcaagtccaatacgaccagggcccgtcaatcaccatacgattgacgggccttgtcattcacttcggatatttcgaaccacggattcatcaggcgcgcgccaacgccggtgaggactcgcgcagggagaggctatagggggcctcgatggtttgggcgggggcacggctgccggattcgacctgttggatgatggattcgacggccagtcgggcgatggcttccctgccggggttaacggtggaaagagacggcaccatgtaggccgattcctccacgtcatcgaagccgataacgcgaacatcatccggcacggcaacgccgcgttcgcgcagttcacgcagcacgccccacgccagcaagtcattcaaagcgaacacggcatcgaattgcaggccactctccagcatagtgtccaccgcgaccaaaccgtcggcgctcccccagccttgggtttcgataagcagactgtcatcacaggggatgccgcgcgcggccagcgcctcacgatatccgtgggtgcggatggagcccgacgagaaatcgtgctcggggtggggcacggcaccgactacggcgatgcggcggcaaccggcatcaagcaggtgataagtcgcggcggcggccccttcgcgattgcgaatcactacgtgcggcgcgttgacgccgaacaaacgttcacccaacagtacgagcgggtaatcgccatccaaagccgcgatatcgtcaaccgtcatcatcagagggcttaagatgagcccgtccgcgctgtgcgtgcccatcgatgcgatgctttccagctcgcgggcacgattgttagtggtggattccacgatgacgccgtagccatgttgccgggcctcggccagaatatcctcggcgagttcggagaagtacacctgccgcagatcgggaataaccagcttgagcaaccgggtacgcccggaacgcaggtttctggccgacgagttgactttgtatccgagcctgtcgatggcttccgcaatacgcgcggccatcgcctcgctcatatatggctgtttgttcagaaaattagacaccgaggctaccgaaacaccggcctcatgggccacgtccgccatcgtcactctgtttttgcctcgcacggtgaccaccctacccgactttgctggagatacgaaaacgactcccctgctacgatgagcagcaagggagccgttgggtaattaggcgctatgcgcggttttacagcttgacgacgagtacgccgttgggctggatggcggccgtgtgctcggactcgttgacctgggccagcgaggcgaccagcggttcgccttccacgtccacgaccgcaacatcgtgggtgcggttgaacaggaacacgaagtggttctcgccagtttcgtccgcacgctcgacgcgcagcacttcaccgcgatcgtcctcagccgaagtctcgatgccgagttcctccagcagcacgggcaggctcttggccaaaccctcacggccgagacgggcaccgacgtatgcggccttgccgtcgccgaagtcgttgacggtgatggcgggagcgccgtcgaaaccggtccacttatccgccttgaaggaggcgaccacgtgagcggtatcggccacggaggtgatcacgtcggcgaaatcgtgcgccacggttccgttgtccaagtcaaggtggtccatggcaccggggaaatcgttgcccatcggggcgaattcctcaacgcgcacacccaccacgtcacggatggaaccggggtagccacccagccagacgtgatccttgtcgtccaccagaccggtgtagtaggtcacgaacagcttgccgccgttcgccacatactcgcgcacgcggcgcgtggtctcttcggacaggatggtcaggctcggcagcacgacggcttcgtactcgtcccaagggccgcgaaccggcaccacgtctgcggtcagaccgttgtccgccagcgcgcggaaccacgcgagcggctcggtccaatggcgtacctcctgagtaggcgtggcggtgtgttccgtagcccactgggactcgtaatcgaagacgacggcgaccttggacttgaccagcttggtgctcagcaggccctcgtcagcaagcttgttgaggtcagcacccagctcgcacacatcgcggaagatctgggagtcggggcccgcgtgaggaaccatcgaagagtgccacttctcggcaccggccttggactggcgccactggaagtagcagatggcgtcggagcccatggccaagtgggccagggagtcgcgcaccaattcgccgggctcgacgcgatagttgatcgggcgccaattgacggcggagctggagtgctccatgaggaaccacggattcttgcgggcgatgccgtcacatagggaggccgagtaagccagctcgtcgaagtgagcttcgccaggcgtgaagtagtgatcgttggacacgaagtccacgtcgtaaccccacttgtcgtaatcgatgccggcaccgccggcggagaccatgaagttggtggtctgcggcttgggggcgatctcgagcagggcgtcgcgctcggccttgtaaaagtcgagcagggcgtcggagctgaagcgcttccagtcaagcagcttgcccgggttcatgaagttgccgtcgccgatgaagcgcggcgggatgatctcggaaaaattgttcatgcgctgcgcccagaatgcggtgccccaagcgtcgttgacggcgtcgatggtgccgtacttcttctcgcaccacttctggaaggcgcgctcagcgtcttcggaatagtcgaagcggttgtgacagccgtactcgttgctcacatgccaagagaccacataggggttgtccttgtagtgctcggccatcttgcggcacaagctgagcgcgtagtcaaggaagaccgggctggtggcgcgccagtgctggcgggcaccgggctggcagacgtcgccgcggtagtcgacccagaggatctccgggtgggcctgggtcatccacatcggcggggatgcggtgccggaggcgagatcgacggcgatgccggccttaccaagcttgtcgatgacgcggtcgagccaatcgaagtcgtacacgccttcttcgggctcaagcttggcccaggagaagatggctacggagacgaggttgacgccggcctgctgcatgagggctacatcttcgtcccacacttcctcaggccattggtcggggttgtaatcgccgccgtaccagatgcgtggcttgttgcccgcaagcggctgcggccacttgaactctttacgttccatgatgattcagctcctttattgaattttatcgataatctgcgtccgcgggaataaacagcccacagggctgtttgcctaacggctcagctcgtcagaggggggcttggcactattacctccctctgatggggaaggttgtctcggcggagccgggacggagggagagaccccgccgcgaggcggtgaagacaccgcgtcggcggagccgactccatcactccttgacggcgcctgcggcgagtccggactgccagtacttctgcaggcacaggaacgcgatcaccagggggatgatcgtgatcagggagcccgtgatcaccaggttctggatcgcctggccgcccgcggtcgaggcctggtccttccactggttcaggccgatggtcagcgggtaccagtccgcgtccttgagcatgatcaacggcaggaagtagttgttccacgtcgccacgatcgtgaacaacgccgtcgtcacgatgcccggagccaacaggggcaaggaaatctgccagaacgtgcggaactcggacgcgccgtccacgcgcgccgcctccagcagctcctggggcacggcctgctcgctgaagatccacatcaggtacaaaccgaacgggctgatcagcgacgggatgatcatggcccacggggtgttcgtcaggcccaatttggcgaacaggaggaactggggaaccgccaaagcgatgcccggcacgctgatcgcgccgatgatgaccacgaacaccgctttgcgccccgggaagcggaacttggccagagcgtagccgcccatgatcgccagcagggtcgcgccgccggcgccgaccaccacgtacaggatcgtgttgaacagccagcgcgcgaagataccgtcctgataggagaacaccgtcgcgatgttgtcgaacagggcgaacgtcttgccgaagcccaggccgaacgtactggtgaagtcggcctgcgtcttcgtcgcgttgatcaaaaggtagacgaacgggaacaggcagtacacggcgaagaccgcgcacaggacggtcaacaacgtggaacgcctcgggttgttcacgttcgcgaaccccgccttcgcgctgcgcctgcgttcggcggcctcgtcggcggcgatcctcttctggcgggccttctccgccttcctggcggccttctcccgggccttgagctcgccatcggtcaggcgaccggcggccgaagtcgttgctgcactcatcacatacgctccttcacgatcatcatcgattcctcaacacgaacagcagtagtcgtcgtcacttcatctgctccttgaggctgttgagctggacgatgtaggcgatggccatggtgatcacggccatcacgatcgccaacgcggccgcgtagttcgactggttgccggagaagctcaggttgtacgcgtacatgttcggcgtgtaatacgtcgtgatcgcattaccaggaaccatgttctgcaaaatgctcggctcgttgaacagctggaacgagccgatgatgctgaagatcaccgtgatcgccaggctgccgcgcaattcgggaagcttgatgctcttcacgatctgccactccgacgcgccgtcgatgctggccgcctcgtacagggaatgcgggatggtcgacagcgagctgtagaagatgagcatgttgtagcccgtgaactcccacgtcacgatgttcccgatactggccaacaacacgctgggggcgagcacgtcgatgtccgtgcccaggaaatcgttcaacgaacccaccaggccgtacttcgcgccatacacgaaaccccagatcaacgtcgacaccaccgccggcaccgcgtagggcaggaacgtcgagatacggaagaacctcgtgccatgcagcttcatcgaatccaacgccagggccatcaaagccgacaggcacagcatgatcggcacctgcacgcacgtgaacagggccacacgaccaacactgctccagaactggccatcacccaacaggcgcgcgtagttctcgaagccgacgaacttggtgccgccgatcatctgcttcttgaagaacgaaatataaacggcgtacacgatcggcacgatgaacacgaacacgaacaccaccgcaaaaggccacataaatttccatccacgccaatcggccttgtgcttattcacacgagccttgcccgaatgcacgggcgcagctgcgatatcggctgaagccattcccaacccctctccttcgaaggttgaccaaaatgtttgcgttatcatcataacaccatttgtaacattgtccaatcgtgttgagtaccgtgttgaattaagggtttctcagtcactctgctacaatggtcacgaagacaacgatgttatcgttaccgtaagcggccctaagataagcgttgcaaacgaaacaccgacattaatgagtcaagcgagggtgaaatgtcgaggccaacacaggtgtccatgcaagacatagcgaaagccgccggcgtttcgccacagacagtgtcccgcgtggcgaatggcagcgatgcggtgaaacccgaaacacgccagcgtgtcgaagctgcaatgaaacgccttgggtatcgtccgaattatgcggcccgagccctaaagcacggccgcttccaggatatcggcgtggtgatgttcaacaccaccgcgttcggcaacgcccgcatccttgattctattgtggccaacgcggccgatgacgattattcagtcaccatccagaccatgcgccacggtgcggaacgcacgctttccgccgccatcgatcgcatgcagcgtcagccggtggatggtgtcatcgtagtgctggaggaacgcatctccgatttcgtcggatacaagcctccgcgagaacttccagtcgtgctcatctgcgaatccgccgccgaccactgccccaccgttgacgccgaccagtatggctgctcgaccgctatcgtcgattacctgatgagcaaggggcacaagaccgtctaccacattgccggaccgtccacctcgcgcgccgccgaaagccgcgcccgcggttggcgagaagcgttggaacaaatgggagcacgcgtaccgagcatgtacatcggcgattggtgcgcggattcaggctaccaggccggcgtggcgttggcccacgaccccgactgcacggccatctacgccgccaacgatcaaatggcatacggcgcaatgctcgggttgcagtcagcgggcaagcgcgtgcccgaggatgtcagcatcgtgggcgtcgatgattcgctggcagatatggttccgcgcttgaacctgacgaccatgaagctgcgctttgacgacattggcgccaccgccttctccatggtccgccgtcaatgcgaaggcgagaagataccggtcggcgtcaaaaccgtaatcccgccggaactgatcgaacgcggttccgtgcgcgacatcagctgacgagcggcatgtgctggcatccactggtacctgtcagtgattcacctgccagtgatccataggcaattccgcaccgaccaatcgactcggttgtgcaatattctgcacatttccaactatgtgcagaatattgcacactttactatactgtgatatattttgcacatgattgtcatggatatcgccgaatacgcgcggcttatcaaggatgaaaggcaacgccagggcatcagtcagaccgacatggcccaacggctgggcgtgtcacgtcgctggctgatcgaatttgaacacgcccgagtccccaatcccggattctccaccattctcagcgctctgactgagcttggcttgtcgctggatgtccgcaaaaccccgcagcccgccgaactctatgaatggtgacaccatgagcgaaaacactctcaatgcatttctcggcgaaacacccatcggccagtttcgaagaacaaacgatggcagcattattttccaatatcacgattcctatcgttggtcgcaatcacccacaccaatatcgctttccatgcccattaccgcagccgaatattcaggcgacatcccgcgtaatttccttgaggccctggtcccggaatcccctcaggcccgagatgaagccatgcgattgcatcatgcccgatcgacaagcgcatttgatctgctgcaagccatcggattcgatgccaccggcgcattacggctgtccgccgacccgcacttgcccatagatgacgattcgcttattccaatcagcgattcgcagatcgcgaatcgactacgcgcagccgcccccacaggcatccagtccgcaagcgtagacgagcataggtcggtcgcgggacagcagggcaagatcgca

SEQ ID NO: 3253 - DNA, 75526 bp, Unknown
  R53_2m  MAG No. k141_8178
gagcgttcgcaccgtggacggcaatccgtccacgatacggacaacctgatgaacataatgccacacatccgccaacagcaatcctgcgccgagcgaaccgaccatatcacgcctcctgcttcttcaatatcaggtgtcagtttaaacccaagagatgtgcgaatgtgacgtactcgtaactttcgcgcccctcggatggagcatgccgggcgcggacggggagtcgacgctgggcattcgactccgaatgactgaagagtgattatttgcctgtgtctagacaaagtcaatattacaccggcgagtcttttccgaggcctactggcgcaaggctttcccgggcgtttcgccggcttcgcgcgctattggtcgcatatggcggatgtgtggcattatgttcatcaggttgtccgtatcgtggacggattgccgtccacggtgcgaacgctcagccctgaataaccccgtatccgtcatgaacaaacggcttgaagtcatcctcacgtggcccgcccggctcatgccgaatcgaacggtcggtacccagcttcttctcggccctcaaccgcggcacctcggtcaggtcgtacggcgtggtctgatacacccagttgagccagttgcgccacagcaggttggcgtgcgcgcgccaggcgaacagcggctccagctccgaatcatcatgcgggaagtagttccgggggaacggcacgttggtcagccccttggccatgtcgcgctcgtattcctcggcaagcgtgtacttgccatactcccagtggccaagcgcgaacacttcggagaagtcgcgcgtggcgatcaggccgggtccggactggggaccccaggtcaggatctgcagatcatggttggcgcgcacatcatcctcgttcacgccggcaagacgggagtggggctgcagcgcgatctcgtcgaagccgttggtcaggaagcagtattcatcctgcagatattgggggaacactccgaagatcttctcggggtaatcgaccttgcgaatgccgtagcgctcatacagcgcgcccatcgcgccccagcacaggtacatggtggagaacacatgggtggaggcccagtcgagaatcgtcttgaactcgtcccagtagtccacatcttcgaacggcatatgttctacaggcgcgccggtgaccacaaaaccgtcgtaatagttgtctttgaacgcatcgaggttttcgtagaacttgacgagatgatcggcggaaacgtgcgtggcctcatgcgtggaggtcttcatgaagtcgatttcgacctgcagcggtgacttggaaatcagacgcagcagctgcgtttcagtctcgattttcttaggcatcaagttcaggaccaccagtttgagcgggcggacgcgctgacgctccgcctcgggcttctccagagcgaagatgcgctccgaatcgaggatatctctggccggcaggccactggggatcttgataggcatgttcctattatgtcaatattcgggataacggttcagggcattcctataacggccatttatggcgcgttatcaccccgactccggctccgccccaaacccctcgctgcgtgagccgattcacgttttaaaaccgtgggaaaatgacacgacacgccgatgttgactttctggaatctgcacctattgtagatagagctgtctgagagacaagccgacgcggggtggagcagctcggtagctcgctgggctcataacccagaggtccatggttcaaatccatgccccgctacaagggtgaggccgtcacgattattcgtgacggcttttcgtttatccgccgtcgtgccctacggagccgcatatccgatcggggcgatgatgtcctgtgaaaaaacaacatccaagcccgctctgggcagaatcaatcaatctatggctcgaccccctcaaggcggcgggctactcccccaacacgatcggcacgcgccgatgccagatgtccgcattgtcgagggcgcttaagggcgatctagggacgtggagggcgacgacctcgccctgctgatccgatccgccaacggctatctgttccccggccggtggagcggccacgcctcggtcgagaccacgcaacggtacatcgccatgcccgacgaccagctgcgcgccgccgtggaagccacgcgcctcgccgcctaggaggatcacgatgttccgtttccccgacttgattgtggcactaaattgattgtggtactaaattatggtaccataataagcatgatcgaatgcgagccgtcagccttcaagcactggctcacacagccacagatcgactacatattccggcatccggtggccgtgttcgaggtgcagtcgagacacgccggcgacagggtcatggcgatcctcggacacccggacgagttcagggaacgccccgtggagctgctggtatcccagcgcacccgcaaggtgttccacgcgatggactgccgccgcgaatggctctacaagttcgacgactaaaaaacaccaaggaggacatcatgagcaacgaaacagactgggacgagctctcggacgaatacaccgagcacacccccgccatcatcggcgagaccatccgcccgcaaagggcgatcacgatggatgacatcgacgacatcttcgccggccgccccctcgccgaccagccccgccggaaggccgacgtgctctacaaggcatacctcacgcccgacatggacgcacaggtgcgggcacaggccgaacgagagcacatcggcaagagcgctctgatccgcaaggcactggccgcatacctgaccgccaatcaggcacagcccgcgatggcctgacccatatacggcgaaaagcccccgaacctgccgcgtgatacggttcaggttcgggggcttcttgttattcggccttggatgccttggccttgagggcgctggcgccgatgacgacgccgatggtcagggcgacggcgctgatggtcgtggcggccggatcggcccacgtccagccccatacggggccgagggtctgcacggacggtcacggtacgggacggtggggcgttgctgccggtggcgacgctgccgccgccgttgtaggtgacgacctgaccggggcgatatggatgaaaggcgatcaggcagctacggtgcccagggaagtcggcgatcataaacgtctcgtcgttttcatcgcggaccttcagttgtctaatccacgggagacgacaggcgtgaagtttctcaacgaagcggaagccgggcacaagtcgtatgtcacaatcgacttcgtgcccagctcccgtccttctgctcagaagcggagtgcggttcaccatccagccgacatcatcggcatcatgccgcagcgggtcaacgtatcggccagcgcatcgtccagtgcttggatcggtcatagcaacgacgccaccgaacgacgatggacagtatggcgcctatcgccagagctgacacggccagaaccgaggcaagcgacacatcgccacccgtgacgggcagtgacgggcgagggttgggcgtggttgcctccgccggcgccggtggcgtctcgggtttctccggttcgcacggtttctccgactcgcatgggggcaacacccgcacacgctcccaggcatcgtcataccggctggacgccggggaaacacggtcatccccctcgaaccgccaaacgaacacgtaccacccatgccgttcggcggtcagatgcatgggagcgccatgcgcgtccaacgccccggcgccgattttgaacgtgccgttcatcgcgggaatctcccaggtggccagcaaccggtggttgtcgtcttccgtggggacctctcccccggatggcttgtacgcctcatcgttggaggggttgtcgggatcgccggaccaccatacgctcaccgtcgcatacggctgatccgccgcgaaaccataggtttcatcacccatgaactggccgtggtccgccgggaaccccgatacggtgatggtgtcgctgagttcggcgccgatatccgccgaatgttcggtaaccgtcgacatgacttcgaccttcccgcgccccacgttgctttccgaagcctccatgaacgggctcacccagtcgccggtaaggtattcctgcgcccgtttgctttgctcgctccgccggaacacccacacccaggtgccaaagccgccggtcttcggagtcagataggcggcgtcaccgtccggcttggccatggcctgcacacgaacccgttgccccacaccggtgaaggacgccttgccataagcactcggctcataacccgaggacgccagccgggcgagaaaagcgtccgcgctctcccgtgcgttcggcgcgatgaccttgcccagatcgtccttgccgagcccgtcgaaatagtatccacgcgcctgcagcttcagaccgggcacccaatgactgccctcgtcccccacgccgctggtcacatcatcgaacaccggcgaagccgcatcaagcaccttatcggacacctgcgtggacaccgacggaacgaaatccttgcgcacctggaacgtcgacgacgaaccgccggcggaagccatcgaatcgaaggccagcatgtcctgagtgctgtccatgacgtgcatccgcccatactcgtatgtggtgttcgccgtcacctcgccggcaccggtcgcctcccacgcgatcgaggatccggcgctcgtcgacacccccgagaacgtgttgccgccttggatgaaccgcgccggcccctgcaaggtgacagtgaacggcactcccgcgatcgcgtcaccgacgcggttcaccactttcaccaagatggaaccgctgcgcaaagcctcggcatcggtgcgttccaccgtcgtgcccgcaggcgtcttgccggccgattgatcccatatccgggccgccttcgccacgatctcgggataccggccttgaatgaccgccatctgtctcgcccactcgtcccgatcgcgcccgaagtgatcctgcacgatgatgccgatcgccgcatgggtggcggcatccgtgtcgcggtaccggtcaaggatccatgccatacgccgggcgttctcatcggaggcaagcaccgtggtggggcctatcacatagtcgctcagtttccccgcttcgatgcagtagtacttgttgcccgaagcgtccagccccgcgacaccgacgtaatattccatatcgttgtatggaaacatcacgtgatatctttcgtcggcgggcgtcaacgtcgcggcatacgccgtattcgccgagccgaacaccactcccaccattattatcagaccggtcagcatcgctacgatggccatgccccgttgccgccatgtcgttatcatcattcgtcctttcctggtacgttccccgcatactgcactgtgtgcgggtaggccacgatcatggcagattttcattcgctacagccggtctttcgacctatgtggtccgagcttgccgtttgccggcgagttgtggataactcttccgccgagttatccacctcatgcggttgaccgaacgtttacctgaaagttatccacaatgcgcaacatatgttcataagcccctagaatagggccttatggcagcagtacaacatcgcgcgaccacgcgcactagtaataccgataacaacaccacgaagacgaagtcaaagacgacttctgcccgaaagagccccgcaaccaagcgcaagagagtcagcgccgaaacggcacgcgccgcagcagcgctgaaaggcctggctgtcgaagcccccgcaccgtccatcgaagcaaacgagcccggccagttcggccgcatcaatgtcatggacatcactcccaccgaggagcgtggcatcttccccgcccgtgtggaactcggcgaaccgtttgagatgaccgcccaagtgttcatcgaaggccgtaccaaggtgggtgccaccgccatcgtgcgcaacccgcgcggcaaggaaaccatgcgccgggccatgacctgcgtaaatcccggcctcgatcgttggaccgtgatggtcaagtgcggcgaacacagcgatctgaagccttgggaggatggctacgcggccgtcaagcgtcagctcggcgaatggaccgtgaccatcgaaggttgggaagacacgtacgtctcctggctgcatgacgcccgtatcaaggtgcgtgtgatggacgacgtggacaacgcgctcaattccggtgccgagctgctggcccgttgggccgcaaccccggacgccggcctgaccgcacgcgatcgcaagaccttggagaaggccactgagaccatggccgatcagacgctgagcgccgaggatcgcctcgccgccggcgacaaccctaccatcgccgccctgcacgagactcacccgctgcgcgatggcatctcccccagccagccccagcgtttcaaggtggaacgcccgaagtccagcttcgcggcttggtaccagttcttcccacgttccgaaggcgccaccatcgatccgaacaccggcaagatcattcagggtacgctgaagacctcgatggccggcctcgaacgcgccgctgccgaaggcttcgacatcgtctatctgccgccggtcttcccgattggcgtgaccaaccgcaagggccgcaacaacacgctggtcgccggccccgatgacccgggctcgccgttcggcatcggctccgagctgggcggccacgacaccgtggatccgctgctcggcaccatggacgatttcaaggccctgtgccagcgtgcacatgaactgggtctggaaatcgcgcttgatttcgcactgcagtgctcgcccgatcacccgtgggtcaaggcccacccgaactggttccgtcacaagccagacggctccatcgccttcgccgagaacccgccgaagaagtatcaggacatctacccgatcgacttcaacgccgacatgcccggcatcgaaaaagaagtcgaacgcatcatgaatctgtggatcgaggcgggcgtcaccatcttccgcatcgataacccgcacaccaagccggtgcgtttctggcaggacgtgattgccgccgtgaccaagaagcacccggagatcctgtttctggctgaggcattcacccgcccgggcatgatgcgtgccctgagctacgtgggcttcacccagtcccactgctacttcccgtggcgcaacaccaaggacgaactggaagagtatctgccgatcaccaatggcgacgacggctactaccagcacaacaccttctggcccaccacgccggatattctcaccgcttacgtgcgagacaacggcgtagccggccattgcgtgcgtgcggtgctggcagccatgggctcgccgtcctggggtatctacaacggttacgaactcatcgagaacaagcagcgccccggcttcgaagagcagatcgacaacgagaagtacgaggtcaaggttcgcgattggagcaaggccaagcagtacggcgtggccgagatgctcaccgcgctcaacaagattcgtcgcgcccacccggccgcgttgagctatcacaacctcaccgtgctgcctacgtccgacccgaatattctggctttcgcacgccacacgccggccgaactgaccggtaccggccaagcggacacactgattgtggtcgtgaacctcgatggacacaacgcacaccagtcgatgattcacctggaactcggcgagctgggtctgcccaccgaccgcccgctcaacgtgcacgacgagctgaccggccgcgaattccagtggggttgggacaactacgtgtctctggcgccttgggcggatgtggcccacatcctgtccgtgcagtgatgcggtagtgcaacggtaatgcaacagtgatgccgttgacgtgcatgggtttatcgtgtgcgtaaaccgctagaaatcctccccttgaggggaggatttcgtctgtttagacatagtgtcggcataatctcagcacggtttcttgagttccgcacctgttttgcaggcgcaaacagggtattgtggtgagacgataacgtaactgtcgattttcaaggagaaatgacatggcagaaaccttcaacgtcgttgtggaaattccgcgcggctccaagaacaagtacgaagtcgatcacgagaccggtcgcgtcttcctggaccgtaccctgttcaccgcaatgggttacccggatgactacggctacatcgacggcaccctgggcgaggacggcgatccgctggacgctctcgtgatgattccgaactccgtgttcccgggctgcgtggtcgagtgccgcgccgtgggcctgtaccacatggtcgacgaggccggcggcgacgacaaggtgctgtgcgtgcccgccgacgttcgtttcgatgacatcaaggacatcgacgacgtcaacgagtaccacaaggccgaaatcaagcacttcttcgagcagtacaaggctctggagccgggcaaggaagtcctgccgggcgactactggactggtgctgacgccgccgagaaggaaatcatcgcggcacgcgaacgcctcgccaacgaaggcaagtgattcgattccgaatcgtcggcgggagacctctccggaggcctcccgcctttttgattcgacgtgcatcgcgtgatatagtgctggtgtatttttcagctaggcgtaggcggcgtgtaggaacgctggtcgaggcccatcgcacggtaatccggcgatgaaccttctgtcgcaccatgattccgataatcattcaaatcctgcttatttctgtttccgtagctatggatgcattcgccgtatccattggcaaaggtctgaccgtatcccgcgtacgagtgcaagacgccgcgaaaagcgccctctggctcggcggattccagatgctgttccccattctcggctatttcgcggcatctacattcagcaaatacgtaacccaattcgatcattggatcatcttcgccctgttggtgttcatcggcggcaacatggttcacgaagccttcgaagaagatgaggaaaactccaaggagaccgcccagttcgattggaagcatatgcttcccctggccgtggcctgcagcatcgatgcgttcgccgtgggcgtgagcctgaccttcatgttcaccaaagcccatatggcattcgccatcctcagcatcggtgtggtcaccggactgttctccgctgcgggcctgtacattggccgcgcgttcggctcccgctggcaggagccggcgcagatcgccggcggcgtggtgctgattctacttggcgtcaaagtgctgttggagcatttgggcgttatcgcgttctgatttagtgtcataagccccttcaccagaaagggctattttgtttgatttcaccgttccaatgcccgacgtaggattgggatggaaattcgattatctgagaggcgtatcatgaccgagatcacccaggagggttggaagaacaaagccctgagcatgttgttggcccaactgacgtcctatgtactgctcatcgcagccacggtcattccctcccctggcaccgtccccatcatccctttgattatcgccgctctgacgttggccgcatttgtcgtgttctggccgttccgcggcagcatgctggatcgtatcgtcactttggtgtttggcgcgatttctctgattttcgtcatcgtacctttcccgaccggcaaggttccgccggatcagaccgctgcggatggctcggtacttccttggtattcatgggcactggccatgggcctgctgctggtggtgctggtggtcttctccttcgggcgccagatggctcgtgagaagcgcgaacatcttatccgcgcactctctcacgccgtgacttccggtgtggcggctctcgccgtggccggctggtgcttcctgcctgatttgggcgcgatgctcgccaagggcaccgttgcgggaaccgttgccctgatcatcctcatcgttttgggactggccttggccgtggcctccacgttgtgggtgcgtgacgccgatccggacccggatatccgctatccgtggatcggtaccggcctgatgccggtaatgctgatgggcgtgaccatcgccgcaaccgcactggtgctcggccgtgtcatcggttgatggacgtctgccgttccatattccgcaaacttgtaacccatgtgtccactacaagcgcgtagaataatgaaaaaccgcgcgaaagcggcataacgccgctgacgactcgtacagccacaccaagcaattgcgtaacacattgcaggataaagggggattagcgtgacggatcttacgttgatgactttcgccagcgaccccgccaccgttttgccatcactcgccctgctttctcatcgcgtccgcgtgctgccgatggatgcagccagcttggtgaagatgccggagaacaccattctgtttctggatgcacgcgatgatctggcgaccgccaaaaccttgtgccgtctcatccacgcttccggcctgtccacgccaatcgtgctggtgctgaccgaaggcggcttcaccgtggtcaactcccagtggggcattgcggatgtggtggtcgccaccgcttccccggctgaagtcgagggccgattgcgattggtctccgagcgcggcaacgctcccgcagccgcagcagccggttctcccgccgaatccaccaccacggtggaagatggccagattcgctccggcgacctcattgtggacaccaacggctataccgcctccctgcatggacgccccatcgatctggcatacaaggagttcgaactcctcaagtacttggtccagcaccccggccgcgtgttcacgcgcgcccagttgctgcaggaagtatggggctacgactactacggtggcacccgtacggtcgacgtgcatatccgtcgtctgcgcgccaagcttggcggcgaatacgaacacctcatcggcaccgtgcgcaacgtgggctaccgattcgacccgccggagacggataaggaaactgccgccgcacagcaggccgccaaagcatcctctgccgccatcggcaccgatgacgatacccccgatctcaacaccgccgcctgacagaccagcagcgctacaaaccatcaatcatcgacattacgccgcttaggtccatacgatgagagaaaccaaatccgcgcgtctcacgcgcatgcatgacgaatacgacattctgcgccaggtgattccggcacccgcttgcgcactgcatttctcgaatccgctcgaattgctgatcgccaccgtgctcagcgcccagaccaccgacaagcgtgtcaacacggtcaccccggaactgttcgccacctaccccaccgcccgtgacttggcggccgcaaacccggcccaagtcgaagacatcattcatccgctggggttctaccgttcgaaaacccagcatctcatcggactggccacggcactggacgaacggttcggcggcgtggtgccgcgcacgatggatgaactgaccagcttgccgggggtcggccgcaaaaccgcgaacgtcgtgctcggcaacgcgttcgatatccccggattcccggtcgatacgcatgtgatgcgcgtaaccggacgactgcgttggcggtcggattggcggtccgcacaccctgatcccgtgaaaatcgagaaggaaatcaccgcctgttttccgcccgaagagtggacgaatctcagccaccgactgattctgttcggccgggccacctgccacgcacgtacccccgactgcgccaactgcccgctgtccgacacctgccctagctatgcgccgcccgccggcaagagcacgtccaagcgctaactcatacctcatcatggtgaattgcggattctaggctgaatccaccgctagactgaaaaccatgcagcacagcaagcggaacaatacatggtccaagtgggggatttttctcggagtcgccgtggcactcggcgcactcgtggttgcgggatggacgttcatgcaaaaccggttccagccgggatcatccctcgatgccgatgtgaccattggcatcgacgatatgccgcaatccttggatattcggtccgattcctctgcggcagccgagcgcctgctcgtcgacaatgtgtatgagacattagtgaccgtcgatcaagacaacaagattcagccgggactggcgacaagctggaagacttccgatgacggactgaccgtcaccctgacactgcaatcgggcgtcaccttctcgaacggtcatacgttggacgcctcggacgccgtgtggtcgttgcaacagaacgtgaccaacaaggtggcggacgtcgacgaattgggcgatctgacgtcggtcgccaatccgaacgccaccacggtggtcattacgcttgccaagcccaatccgacgctgctgcgagcgctgtccggcaaactcggcattgtctacgattccgagtcgtccagtgccgattatcaacgcaaggccataggttccggaccattcaccgtggccgatttccagcctggccattccctgaagctggcgcgcagcgatacctaccatggcaccaaagcggccagcaatatcgttgaatttatgcaatactccgacgccgatgcgctcagcaaggccctgaccgacggcagtctcgatatggcggcaccggtttcggcttcgacggccaccggtttgaacggcaaggatggcctgaccgtcaaggagggggccactacggataaggtgctgctggcctacaacaacggcatcgattcgctgctctccgacgaacaggcgcgtaaagccttccgctatcaaatcgacgcagccggcatcgcctccgcccaacccgacgcagccggagcattgggcggccccatcagcccgctggaacccggatacgaagatttgaccggactgtatccgcatgacgaaaaccaagctgggcagatgttctcctacttcggtgcgcaatatctgactacggtgaatctggtggttcccgaagaataccggtcgttggccgaaaccatcaagcagcagatcgagcggcagccgcgccccacggtgaaccttgaagtgctctccgatgaggattatgccaaacgaatcaaggacggcaaatgggaactgaccgtgatgagcatggacggcacggatgatgccggcatattcgccgaccccgattccatgttccattacgaccataccgaagcgcaacaggcctatgcggatgctcgcgccgccactaatgacgccgattatgaggcacgaatgaaggcgtacgcccggctgatcagcgaggatgcggccagtgattggctgtatacccgcaaatgcttcactgtggcgtccaccaaggtctccggctacccgacctcgatgatcaatcgtcgcatgccgctggccgggttgacggtgaagtaggcaaccttcagtcacggacgggctacgcccgatagtccttggctcactatcgttcgatcgttcgtatctcgcctgcgaacagcctactgggctgtttactgtacagttcggcttgtcatgcaacgtgcataaactttggctttatgactgaaggcaaatccatcatcaacgccaacctcaccccgctgcccgacaaggtcggtgtggacggacttgaggacaagtggcgcgccgtctgggatgaagacggcacctacaaattccgcaatacccgcgaccgcaaggccgtctactccatcgacaccccgccgcccaccgtctccggttcgctgcacgtgggtcacgtgttctcctacacgcataccgatgtgattgcgcgttacaagcgcatgcgcggctacgacgtgttctacccgatgggctgggacgacaacggcctgcccaccgagcgccgcgtgcagaactactacggcgtgcgcgtggacgtgtccctcccctacgacccggacttcaagccgccgttcgagggcaccgatggcaagaagatcgacgccaaggatcaggtgccgatttcccgcaagaacttcatcgagctgtgcgagcgtctgactgctcaggatgagaagctgttcgaggccctgtggcgcaagctgggcctgtccatcgactggtcgcagacctaccacaccatcggccagcacccgcggcgcgtggctcagaaggccttcctgcgcaacctcgctcgtggcgaggcctaccagcaggacgcccccggcctgtgggacgtgaccttccagaccgcagtggctcaggccgagcttgagtcccgcgaatacccgggcttctaccacaaggtggctttccgctttgaggacggcaccccaatctacatcgagaccacccgccccgagctgctggccgcttgcacctcgctgatcgccaacccgaatgacgaacgttacaagcagtacttcggccaggaagtctactccccgctgttcaaggtcaaggtgccgattctggctcacccggccgccgaaatggacaagggtgccggcatcgccatgtgctgtacgttcggtgatgtgaccgacgttgagtggtggcgcgatctgaagctgcccacccgcccgatcattcagcgcaacggccgtatcgtgatggacaccccggattggatcaccgacccggccggccgtgaggtctttgccgaaaccgctggcaagaccacgttctccgcccgcaagatcatcgtcgacaagctgcgcgagtccggcgacctggacggtgagccgacgccgaccaagcgtatgacgaacttctacgagaagggcgacaagccgctcgagatcgtcacctcccgccagtggtacctgaagaacggcggtaccgacgagaaactgaacgccgagctcatcgagcgcggcaaggaactgaacttccaccccgacttcatgcgcgtgcgctacgagaactgggtgcacggcctgaacggcgactggctgatttcccgccagcgcttcttcggtgtaccgttcccgctgtggtacccggtgaacgcttccggcgagccggattacgatcgcccgatcaccccgagcgaggatcgtctgccgatcgacccgaccatcgatgtgccggaaggctacgacgagtcccagcgtgatgtgcccggcggcttcaccgccgaaaaggacatcatggatacctgggccacctcttcggtgaccccgcagatcgtgacccactgggccgagccggacgaggcctccaaggccctgttcgcttccaccttcccgatggaccttcgcccgcagggtcaggacatcatccgcacctggctgttctcgactgtggaccgcgcgcacttggagaacaagtgtctgccgtgggcccatgccacgctgtccggctggattctggaccccgaccacaagaagatgtcgaagtccaagggcaacgtcgtggtgccgaacgagccgatcgagaagttcggcgcggacgccgtgcgttactgggccgccgccgctcgcctgggcctcgatgccacgtacgacatcggccagatgaagattggccgtcgactggccatcaagctgctgaacgccaccaagttcgcgctggccatcggccgtgaggacgagaaccatcacgtgggcgctgccgccgagacctcgtggaacccggccgatgtgaccgaaccgctggatcgcgccgctatggccaagctggctttggtggtgcgtcaggccaccgaggcgctggaatcctacgagcattccaaggcgctggaagtcatcgaatcctacttctggcagttctgcgacgactacatcgagctggtcaagaaccgcgcctatggcactccggacgagcacggcaatgtgccgtccgagaaggctgtgaagtccgcccgcaccgctctgggtctgggcttggacgccttcgcacgtctgctggccccgtacctgccgtacgccaccgaggaagtgtggagctggatgcacgccggttccggttccgtgcatcgcgccgcctggccggtcgtggacccgtatgtcgaggccgccaccggtgcttcccccgagctgctgacttgggccggcaaggccgtggagcagctgcgtaagatcaagtccgaggccaaggtctccatgaagaccccaatcctgtctgtggcactgtccgctgcttcggaaggtgtgaacgcgattcacgccgccttgggcgatatcgcgcaggccggtcgcgtggtcggcaagttcgacttggtggccaagcacgccgaggaatccgccgccgaagacgcgcccgaaaccgaggtcgccgtcgaagccagcgagctcggtgagccgccagccaagaagccaaagcactgagcgttgcgcacaacaacagtaggtctcacggcaatgccgctcgttccgagcctacgggaagcccaccgggcttcccgcttaacggctcggccagccaagaagccaaagcactgagcgttgcgcacaacaacaaaagaggggaacctcctattgaggttcccctcttttgttttttgacgttcggatgacacgactgtgggacggcacgcaaatatcccgcattgtaagctggcggcccacaatagcgtgggccaccacgcgtgtcaaacgttttatatacgcggcgtcccacagaccgaatcaacaaatccttggaatttagccattcttcaaactatagttagctctgacttacaagagggtgtgggacgccgcatcgaaaaagccagtttttgatgcggcgtcccacaccgataacgcactttacgcgtattgggcacctgtcgcatgcggattttcccgcatacaccatcacaccgtcggaatcacgatgaggtatcgggtttcggcggttttttgttgcgtattgaggctatcgagctgcgcgacggcctgcgccaagagcgtgccagcatcgctgatctccacggtctcattgatcagcgcgctcatgtcatgcttgagcagcgtgccgccagtgccaaagccgaacagtactggagcggtgtcaagattgttgccggaatcgccagtatcgctcgacttggctgagtcgttcgttcccgaaccatcgctcttggacgaatcgaacttacctccaccaccgatggccgaagtaagaccacccgcatagttcatcacatcgccagcagacatggacatggtgtcatcgaccagtgaggccttggaatgctgcgactgctgctgttgcgcggctttggcctgcttacgggcggcatcggccttacgcttggcttgggcggcccgggtcttgccgtagaacgattgcgattgcgaatcgaccaggccagtcagtgcctgagcctcggtcaccggaccggaagagacatcaccggacgagccatcgccatcgctgccggaagccgaggacgcgactccttcgaactgatcggagaatcgcaatacaatctggcgcaaggccgtggctttgcccgtatgctcggaggcggtggcaagcgtgctcatcgcggcatcgaccttggattgagcgtcggcgagttcatcgctaccgttggtttcggcgatggcttggctctcgtaagcggtggcgcccgaagacgtgccgccggtcagggcgctcaaattggccgtgtagacgtccgtgtatttcatcgaatacggaatcattgcggcggagagctggctctggccatcggcgtattgcttggagcctcgagtggcttcctccgaagcctcggcggtcagatcatccaccagtccggtggtgccttgctgctggatgcggcgaatcacctcatccaatgcatcgaccgcaccggcatgctgatgtgcggcactgacgttgttcaccgcgttggccaagtcgagtacggcttgcgccaaaggcgtatccccggacagttcgccggccgtgcccatcaacgccggcaactgggtggaggtaccaatcgatccagacaggtgcgtggtatatgagcccacatacgcggccatatagtcttcaaacgtccgcttatgggcggtttcgcgttcggccactacggacttgtccagcgcacgctcattatcgcgcagggtttgaagctgctcgatgagctgttgatgctccccggaaccggcgtcggtcagtgaatcgaccagtatggcggcagaggcgacgagttgggcgacatccgtatcggcagcaggctgtgcggcggcattcgcggcatcgggattagcaccaactaccggactgctggaattggaaggcaatacggcgagcgccacggaactcatggagaagtctttggcgttcatatagcagctgaattccaagccggttgcggcttttccagctgcggcgactacggtattggaaccttgcgtggttaccgtaatggagttgtcagcggaaacatcatcggctacctgcgtaggcacggtaaaggcgacaaccgggatcgtacggttggcctccttggtttgcggcttaatatcgatatacacgccgatcagtccagatgcgccggcaacctcgtttgcctcgacgtttggaccgtcaagcgagtaggtgacgctgactttccatggcagggtggcggcggaagcggggatacgagaaaccttggacgtgccggaattactattggcggaatcggtatcagtggaaccgctattgccggaatcggcactggcgccattgccggcgccgcccttccctaccacataccaacggaccggctccccttcggcatcggcgacggcgtacatatcacttgccgtagcgagcaccggaccgtaatcaaccggagtcggacgagacatccaagcaccgccgagaatcgaagccacgcacaatgcgcaactgaccagtgcggcaccacatctcatctacgtatcccattcatacagtcggccactatgggcattccattcccgtattaatgtagtcgctgccggcaacttgccctatagacgaatatccgaaaggtgcccattcgctgcgggcgaatcaggcgaatacgtcgagtacgcccgggtcgccaccggcatcggcgatgcgctggtggcgcttcttggcttcggtaaccacgaattcacggtacatctcggcaatttccggatcaagcccggcatcgatggcgatgcggtggaggcgttcgatctgatagtcctcacgcttggtgtcttcgggcgcgaatccggcgttggctttgagcacgccgacctgcgaggtggccttgaaccgctcggccagtaatgcgatggccgccgaatcgatgttatcgatggtttggcgcagcgctttgatgcgcgccaccgcttgtgcggtttccgggtgggccgccgcctgggcggagtcgatggtggtcctttgccagccgctgctcgtttcgctcatagattcgaggatactcccgattgcggctttgcacgatgcgcaaagtcagatatctcagatgtcatagtcgccgtaggggatatggctggcatccgcatcgccgaacatggccgcaccattgcccactcccaaaacaatcgaacccattgatacatctttcatctcatatatcgtcagcgtgcatgtgaacgttgacggcaatactacaactgcaatgtgatagttgatgtatttgcatcatatacggcaagggctgcgccccgtatcaatcggggtgcagcccttacactattgttcagcggtctggtcagttgccgttgaccgcgttgccggtgttggcctgctgcacgatggcggcgaggaagtcgcggttggtggcggtcttcttgaggcgcggcaccaacgtctggtaggcctgctcgggctccatgccgcccagcagtcgacgcagacggtagataatcggcagttcctgcgggttggtgatgagctcctcgcggcgggtgccggaagcgttgatgtcgatggccgggaacagtcgcttgtccgccagctcgcgggacaggcgcagttccatgttgccggtgcccttgaactcctcgaaaatcacctcgtccatcttggagccggtttccaccagcgcagaggagatgatggtcagggagccgccgttttcgatgttgcgggccgcgccgaagaacttcttcggcgggtagagggcctgcgcgtccacaccaccggacaggatgcggccggaggcgggggcggcgatgttgtaagcgcgagccagtcgggtcatggaatcgagcagtacgaccacgtcctggccgagctccacaagacgcttggcgcgttcgatggccagttcggcaaccgtggtgtgatcggaggccggacggtcgaaggtggaggagatgacctcgccctggaccgtgcgctccatatcggtgacctcttcggggcgctcgtccacgagcaccaccataaggtggacctcggggttgttggcggcgatggagttggcgatgttctgcagggtgatggtcttaccggccttcggcggggagacaatcagaccacgctggcccttgccgatcggggaaacgatgtccatgatacggccggtgagcttgttcggggcggtttcctgcttcaaacgctcctgcgggtacagcggcgtgagcttggagaactgcggacggttgagcgcttcttcaacgctttggccgttgatggaatcgatggcctgcagtggcacgaacttctggcgttggttgcgacgatcgccttcgcgcggggcgcgaatcgaaccatggacggcatcgcccttgcgcaggccgtacttcttgacctggcccatggaaacgtacacgtcgttcgggccgggcaggtagccggaagtgcgcacaaaagcgtaggagtcgagcacgtcgacgatgccggccaccggcaccagatcctcctgcggctcttcgcggcggctatcacggtcattgcgatcgctacgattatcgcgatcatcatagcgacgatcatcatcggcgttgtcgcgatcacggccacgcatgcggcggttacggcgatcgttgcgatcattacggttatcgcgatcgttgcgatcgctacggtcgcggcggttacgacgcacaaactcgtgatcgtcgttctgctcgccgtcttcggacgtttcctcgtgcttctgcgtgggcagcgtggccaggatatcgtcgaggtcacgcacggtttcttcgctgttttccgcagtgcgacgacggcggcgaggctgctcgtcctcatcatcacggactcggcgaatcagcggaacttccacgtcctcatggcgctcgcggcgacgctcggtaggcgctgcatctcccaaatcgagcgtggccagcagatcgccggcctcatcggccttcttgcgcggcttgcggcgagcaaaatcggactggtcgtcatcgcgacgatggcgggccgcacgcggttcggatgcggcatcatcggcggccttacgacgggtgcgtcgcggttcggtcccgtccttcttggcatcgtcggccacgggaagcggcaaatcgagctgcggttccgtggcggccggagccggcgactgggtggccacgtcagcattgtctgtggtattggcctcagcggcatcggactgcggagccttgacgaccttggcggttttggcggccttgggggcgcgcacggtcacaccggccggcggctctccaccattgcgcgccgcctgcagggtggcgagcagctcgggcttgcgcatggtcgacgtaccgcgcaggcccatctgtttagcgagctctttgagctcaggcagcttcatatcctcaagattctggctatttgccactggttgccctttccataccgaacagacccatgcctatccaggcgttaagagtgattattgcggttgcaccgctcatgaatgttcgctgcgtctctgagttttcacgaacttcgtttactgtacaacgccaactcgaccaacgcaaaacggcccgccgaaaaccaaaaaagctccctctgtgacgagggagctcaacaaggtttattcacttttcttcgtggtaggacttttcggtgttgacggaccacacgttcttcttggacgtcttgccggtcttgatgttgccgacggcctccatggcggtggccatggagtggtccatgttgttgtagcggtgctggccgttgcggcccacgcagtagaggttgccgaagccgtcgaggtactcgatgagctcgtccatgtgctcgtaggtgtcgaagtaggcggggtacgccttcttgacgcgctcacgatgggagtcgatgacctcgtccgggccgttgatcacacgcatgcgggtgagctcggagatcgcgaacttggtgacgtcctcctcgctcatgttccagaacgagtcgccctcctcgcagaagtactcgaggccgacccacacggtgtcgtccacgttcttgaccaggtacggactccagttgttgaagatctgcagacggccgaccttgtagcccgggtcctgcacgtagatccagcagtccggcacgatcggcggattgccgagggtggggatgttggtggtgttcttgagcttcaggtgcttgaccagcaggcccacggtcacgaagtcgcggtacggcaggccgttggccacctcggtcatatcggccggggcgggcttggaatcagcggcctcgggatcgtcgccggccgcgtcgatggcgttgaccaggtccttgaccggcatcgaggagatgaactggtcgccggaaagctcggtgcggttgccctcggaatcctcgtacaccacggaagacacggcgccatcggtctggcggacctcgaccaccctggcgtcggtcagcaccttgacgccggcggcctcgcaattggactcgacggtctcccacagctggccgggaccgtacttcggataccagaactcctcgatcagcgaggtctcgacctccgcgttggagcgcttcctggggctaagcttctggaaggcgttcttgagcacgcccatgatggacaggcccttgacgcgctgggcgccccagtcggcggagatctgggaggggtggcggccccacagcttctccgtgtagccctcgaagaacatcgaatacagcttgcggccgaaacgattgatgtagaagttctccaggttgtcttccggcagcttgtggaacatggacttcaggtagctgaagccggccaccatggtgagcttgaagcccatggccttcaacgtgttggggctcagcgaaatcgggtaatcgaagaagtggcggttccagaagatacgggacacgcggtggcgcttgagcatcaccttgtcctccgtctccggatcggggccgcccggctccatgtcgtggtcgcggccgagcttcttgtcatcataggagggtgcgccctgcaacggcagaacggtcttccaccaatccatgatgcgttcgtctttggagaagaaacggtggccgccgatatccatgcggttgccgttgtgcttcacggtgcgcgagataccgccgaattcgcgggtcccctccagcacggtcacgtcatagttttccgcgccgccgtccttgatgagttcccatgcggcggtaagtccagccggaccgccgccgataatcactacggattgcttgtcggtcattatgctccttataaacgcaaaatcagagacagtttactagaagccccggaatcgcacaccgaaagatgagcgaatgcttacagaattctcccgatatacgaccgatgcgccgtcttccatcagcagaaaggcgacgcatccaatcgtgaggtaggggtattcggcaacgctgcgtcacgcacagcgcggcgaatcggtttggtcttgggctaattcgtcagcgacgaaccttccatagattcagcgagattcctgcaagtgcaaacagcatcatcttctatcaaccgcaagcaaacaagacacacgatggcaaggttacgaatctgaacttttgctatgcgttgtatgaacaatgcgcgacgccccgccgtaagatgacggaatgccgcgcattgtcaatacaggctgtatcagacgattgcctgtcagtgaatatcgtcgggaatgtcgatatcggttttctggacttcctcgacgttcacgtccttgaaggtcacgatgcgcacggacttgacgaaacggctggaacggtagacatcccatacccatgcgtcagtcagctgcacatcgaaatacacgtcctggccagcggaacgcacgttgaaatcgaccttattcgccaagtagaagcgacgctcagtctccaccacataggtgaacagcttgatgacgtcacggtattccctatacagcgcgagttcggcgtcggtttcgtaattgtcgagatcctcggcactcatgcttgtttactcactcactttccgtatctcgtttgcggccgcggcccagcgtacgccaccatgcttcctttgagggcttgcgttctgcctgatcgtacggccagttgctttcctcttcgagactgtggcgcgcgttcttctgcgtatcgtcgtggtgcccggcctgtggctcgactggctgtgcggccgccggcgtctgggcctgggactgcacgtcactcgtcgtgacggcggctgcgtcaccacgctgtgccggctcgggttccggcttgttctgctggatggcgatggaatgctcgcgcgcggacagcgcctccttgacacccggattgtcctcaatcaagtgcatgccaaaagcgtcaagcgaacgaatcggatcgtactcgtcgaccaacgtgtccatgacgataaggtcctgatatttgttgttttcgacatcccacaacgcgtcgcgcgaggtgccggacggcacgaatccgagcgactggtagaccgaaatcgaacggctgttcttttccggcacgctcacccagatgcggtgcatgcccaggccggccggttcgggcgcaaagccgtaagtcatcacacgcggcatggcgtcacgggagtagccgcggccacggtattcacggcccaagatgatctggatgcgggcggacttggaccagccgtcgatgtcgataaggaaaatcatgccgatgacgttatcggtgctggccgcatcgagctgaccgtcatcgtcatggtcggcgtcagtcaatacagcccatgcgatggtgcggcgggattccgggtcgcccacgccggattcggcgggcgcctgaccggcttcccaggcttgggagcggcggacccacgtgtgtacaatggcgcgttcggtgaccgcatccttgccggtgatcttggatgcgccatagaaggcatctagttcatccaaacgaggcaggtcctcggcggtggcggggcgcaggtgcaccatttcgccacgaattggcggaatgacgatgctctgtggcagatcgcgcttcagttgcacttcggtagccatgctcagcgtctcgttggttgcggtcatcggtatacatcccccggttcggcttgtttcggctcacggtccagtgccgagcatatcttactcgactgggtgaacgctggaaatgctctgagtcgactttcttacagaatcaataaaggctcccgctggcgggagctgtctaacgaatttgatctggaggatttccctacaaataagtgctcccactggcgggagctgtccgcgaagcggactgagggtggtcatccgaccatggcgactaccctcagtcttactccgttcgacagctcccgccagcgggagcccgtgactctaatcagcccttgatcttgcccatgacgaccttggtgacggccttggcgtcggcctgaccgcgcgtggccttcatcacggcgccgatgatcacgcccatcggcttcatgttgccgctcttgagcttctcgacgacatccgggttcgcctcgaacgccgcgtcgacggccgcctcgatggcaccgttgtcttcgacgatcttgtagtcgtgcttcttgacgacttcatccggagtgccttcgcccttcagcacgccttcgacggtctgcttggcgagcttgtcgttgagcttgccggaggcgatgagcttctcgacctcggccacatcggccggggtgatcggcagctcttcgagggacacgcccttggcgttggcttcgcgggaaagctcgcccagccaccacttgcgcgcaccggccgccttggcaccggccttgacggtttcctcaatcaggtcgagggcgtcggcgttgaggatgtcgcgcatctgcaggtcgctcagtccccattcggacttgaggcggttgcggcgctcgcgcggcatttccggcatctgggccttcatctcctcgatgtgctccttggtgatgtggagcatgacgaggtcggggtccgggaagtagcggtagtcgtcggcatcggacttcagacggcctccggcggtggtctgcgtagcctcatcccagtggcgggtctcctgcagaatctccttgccgtcgtccagacgagcggcctgacggcgaatctcgtactggatggtcttctcgatgccgcggaacgagttcacgttcttggtctcggaacgggtgccgtacggggcatccgggcttggacgcagcgagacgttcacgtcggcgcgcatgttgccctgctccatacgagcgtgggagatgttcaacgcacgcacgatgtcgcggatggcgcgcacataggcaccggcgatttcgggagcgcggtcgcccgcaccctcgatcggcttggtgacgatctcgatcagcggtacaccggcgcggttgtagtcgaccagtgagtggtcggcgccttcgatacggccgtcggcaccacccacgtgggtgttcttgccggcgtcatcctcgatgtgggcgcgctcgatcggcacacggaagacggtgccgtcttccagttcgacgtccaggtagccgttgccgttggtgggcttgtcgtactgcgagatctgatagtcacgcggcatgtccgggtagaagtagttcttgcgggcgaactggctccactcggcgatttcgcagtgcagggcgagacccagtttgatggcgtaatcgacggcggtcttgttgatcaccggcagggagcctggcaggccgaggctcaccggggtcagctcggtgttcggctcgccgccgaactcgatgtgggccgggcagaacagcttggtgttcgtggacagctccacgtgggtttccagaccgaagaccacatcgtacttcttggtggcatcggcgtatttcatcagtttttcagccatgatgtgtttctttccttccgatgctcacttgcccagaccgtcaagccacggggtcttgaggtcgttccagatcgggccgttccagccgtcctccagcgctgcttccagggccgccgccggcttgtacatgacttcgtcacgctgctgcggggcgatgaactggaagccgacgggcagaccgtcatcggacaggccggccgggatggacatggcgggcatgccggcaaggttggccggaatcgtggcgatgtcgttgacgtacatggccagcggatcgtccatcttctcgccgaacttgaaggcggtggacgggctggtgggcgagatcagcacatcgacctgttcgaaggccttcttgaagtcctcgatgataagcgtgcggaccttttgggccgagccgtaccaggcgtcatagtagccggcggacagggcgtaggtgccgaggatgatacggcgcttgacctcgtcgccgaagccggcttcacgggtgtaggccatcatgttggcggcggtctggggcacgccggccggcggcatgacgcgcagaccgtagcgcatgccatcgtaacgggccaggttggagctgacctcggacggcatgatgatgtagtaggcgcccagcgagtatccgatgtgcgggcaggagacctcaacgacttcggcgcccatgtccttgagcttgtcgacggcctcgccgaaacgggcctcgacgccgggctggaagccctcgccgccgagttccttgatgaggccgaccttcatgcccttcagatcgcgcttggcgccttcgcgggcggcggcgaccgtcggacgcgggccttcggggatggaggtggagtcgcgcttgtcgtggccaccgatgatctcctgcagcagggcggagtcgagcacggtgcgggagaccgggccgatctggtcgagcgaggaggccatggcgatggcaccgaaacgggagacgccgccgtaggtgggtttgacgcccacggtgccggtcagggcgccgggctggcgaatcgagccaccggtgtcggtgccgagggcgagcggggcctcgaacgcggcgaccgcggaggcggagccaccaccggaaccgccgggcacgcgctcggtgtcccacgggttgtgggtggtctggtaggcggagtgctcggtggaggagccttgggcgaattcgtcgaggttggtcttgccgagaatcggcatgccggcggccttgagcttttcgatgacggtggcgtcgtacggcggcacccagccctcgaggatcttggaggcggcggtggtttcgatgcccttggtgacgatcatgtccttgatggcgatcggcacaccagccagctcaggcagggcggccttgtcttcggcggacttggcgtcgaaggcgtcggcctgctcgagagccacatcgccggaaaccttcaggaaggccttgatggacggctcggcggcttcgatcaccttgaggtgggcttcgacgagctcgcgagaggtgacgtcgcccttcttgatggcagcggcctgctcggcagcagacagtttgacaagagttgcggtttcgttgctcatcgattactcctcgcttcccaggattcgcggtgccacgaacatgccggcctcggtcttcgggccaccggcgagcgcctcttcctgcgtgagcggggtttcggcgacgtccgggcgcaggtaggcttccagcggaaccgggttggcggtcggcggcacatcgtcggaggcgacttcctggaccttgttgatggagtctgcgatgacgttcagttcgccctgcagacgggtgatttcctcatcggtgagcgcgattcgggccagatcgcccaaatgcacgatttcttcgcgtgaaaatgttggcatggccataactatatgagccgtatgtgacacgcagttgtcgggaatcctcattttcccgcctactggagcccttcagcgaatcagaagctcaagccggtcgagcatttgccccgctgctggcttcttcggcggggcaaaaccgttgccggaccgcaagttcaccttactgagacgactcgcagcagagcaaaaccgcgagctgaccgatgaaacgccccgctcagccatcccagcaaaacaaaaccgcggtccaaccaataaaacgccccgctgagacgccccgcagcgaggcaacgccacggcccaaccgcaaatgtgccccactgaagtatctgcatggccatcctaataagctcacaatgagtccaaacacacctacatcgaacatatgaacgacaatcgccctgcgcacctcgccagttatccacattttgcatacccacccaaaagaatccacataatcagtccaatacggtcagatgcctgataatcaggcaaaaacacacatctaggcaccgaagctagaaccacataaccccagacagatagacaccgtgttcaccattggcataccgtcgaatcatgaaacatcacaaagcagtggacatactcatcacgaaggctgaagcaacgcaacagtgcgcttatggaacaaccaaggcacaccgctcggcgctggctcggcgcgtgcaggcgcgcgaactcaaacgtgtattccccaacatgtacgccgcttcggaatactgggattcgctgcaacccgacgaacgtatcagacatattgcacgaactcttcataacagacatccggattgggtgttcgccggggtcacggcagcggccatccacgattttgaacaccaatggcatcttcatgctggcaccatcactctcgccacaacatcacgaggccccaacgccagcagtgcaaaggtcaaacgcatcttcacgtcaagcagcacgccagaatatgccaatggactcccggtgaccagcaaagccagaacggtggtggattgcgggctgtccgtcgacttccgatttgcactgcccattatcgattcggcgctgcgcaacggcgtcgccatcacggacattctgaatgtgtgcagcactatgcgacgtgattgcacgccgatattccgcctactgcattatgccaatccggcgagtgagaatggtggcgagtcacttggacgaggcaccatcatcgcaggcggcctattagccccagaactgcaacaaaacatcaccgacccgcaaaccggtgctctgtatcgcgtggatttcctctggcggctacctgagaatcggcttatcgtgggcgaattcgatggctatgaaaaatatgtgaacccggatatgaatgaccgcaagggtgttcgtggtgcagttcaggcggagaaagaacgggagacggcactgtaccgggccaaagtcgacaccattgtccgattcacctatgaggaggtgatgcaacaacatcctttactcaataagctgcgggcagccggcatacctcatgctggaacagtgatgggagctggttaagcgcagtgaaccacggtggtcaaatccatggggtcagagtcaccagaaccatggtcactgcagaaccgccaaagccatagccatgacaaactgccaggaccatggccgaaccggcagaactgccaaagcagtaacccgcgttatttgatatctgatatccgcttttccggtgatgatgagaccgccgatccatgcggcggcagcccaggcgatgagaatcaggccggactgccaccattcgggaatccagtagtccggtttaacggcttcggccagtgtggactgcgcggagctgctgatgcctgcggcgagcaggatgccgacgatgccggcggcaaatgcgaattaatgccgcggcgatggatttggtggcgtagatcatgcctctaatgtggcccatattgggcagatgcggcggaattgtcggcgcatggctacacgcctgatacggcgtgttgggcaatccatgcgtgcatggccacggccgccgcagcgcctgcattaatggagcgcacggaaccgaattgagagatgtagaccacatcgtcggccaatgcgagagacttgtcgctcaatccggggccttctgcaccgaagagcagcaggcaccgcttggggaaggtataggcttccatcggcactgcgccgggaataatgtcgagggcgatgacgcgggcggcttgaagctccttgatgcgcgcatcacaagcatcgatttcggccagcagctcatgaaggtgcttgttgtttccatccacagccacatcatgcgcatggatggcggcggcaccggccttggctcgttcataggcgatttcaccggcgatacgatgatgccagctttccaccagttcggcgatggaggggtggtgttcgacgtgctggtacagttcggtcatcaacgctcccttgcgattccacttatgcggaccgacaatgtgtacgcgcttggcctggaaggcgttggcggtgcggaccatggaaccgatgttgaaatcgtgggtccagttttccaccgcaacttcgaagtcgtgacgccctcgagcgtcaagatcggccttaatggcagcgacggtccagtagcggtaacggtccaatacgttgcggcggtcgccgtcgttcaacagcaccgagtcgaaacgaccgtcataattcggagaagtcggatcgtcgggacgaggctcgccgggatgggtctcagaccacggcccaaggccgatttcacggaattccggttcacctgaagccttggcagccaaagaaatctggttgggtgcgtgcaatctttctcctcgataacgctattcaccggttcctcttagtcagcttcgctgctcagcccggctgactttatgcgagggaagtcaaaggtggatttaccgcagttcggattcgtcgaagacctggatgaaggggagcgtttgctcgtcgccggtggaggggttgaccacattgatgtctttggcaccgccaccgaccagcgaggcgatggccacgaccttggcacccagctgctccactatgccaaagtcgaggctcagctcattgccgttgcgcagggtgaccagcgagctggtctgcacgtacgacttttcggacagccaagcatccaacagcaccacacggcggccttcgatggaggggcccttgatggacgggtagacgaagtccatcacgaatccgtctaggtcctcgccacgagaggaggcggcctgaatcatggcggacaccatgggcacagatgctgcggtcaaggcaccaacagcatcgaagtcatcaaccgaatagcccgcatcttccaaagcgtcaatcagcacatggcccatgacggtggcggcatggtggtcgaaagtcactgcggcaagttcggagaacggacggcccaccacatgctccctcagcaaggtggctagctgctcacgcggctccagcatggcaaagtcattatggctcttcgcgacggcgaggtccggggtaccagtggggcggaatccagattcagtcatgactccagactatcgcctgaggcagtcagatgagtatcaccctcatcggccggcaccacttcaggggcggacagttcgctcacattgcctttatctgattcgatgatcggtacttcctcgatgatcttggtcggttcgattttttgcagcttgcgagcggtgggcaacacacggcgttccaagctggacgcgaacttgttgtaggcgctgaccgtcttagtaatctgggtgcccaatttgatggcataatcacccaacgtggagaaccgttcgtacagttctcgggacagatcgaacagctgcttggcgtcatcggtgagcgactgctgctgccaggcataggcgacggatttcagcacggcccacagcgtgaccggcgaggtgagcgccactttgcgagagaacgcatcatccatcagtgtgggatcggcttcgagcgcggcctgcaatagtgcctcattggggatgaaggccaccacaaaatcgggtgccacatcaaaggcattccaataggccttttcgccgagagcacgtacatgctcgcgcaacgccttggcatgggaccgcagcaaatcatcgcggcgggcaatatcctcggggctggcggtgtccgggatttcgcaggcacgctggtaatcggcataaggcactttggcatcaatcggaatggtcttgcctcccggcagatgcacgatcatatccgggcgcaacgtacgcccatcggcatccgtgaccaccacctgggtatcgaaatcgacatgttccagcaatccggcggattcgacaatgttcttgagctgggcctcgccccacgcgccacgcaccttgttgttgcgcaatgcggcggacagggagctggtctccttgtccaaacgggcctgctggtcgttgagccctttgagttgggctcccaatgcgcccatttccctcttgcggccctcttcgatctgcgtgaccttgttctgcaaggtatcaagatttttggccactggcgcaagcgcctcgagcaccttgctctgttctttcaaacgtgcttcctgttcagcacgcttggcctcggcgtcccgagcatccgcttgacgcttccgttccgcctccgcagccgcacgctcacgttcctgctgaatgcgaatctgctcagcctgctgcgcctgggcaagttgtgacttggcgaaagccaattgctggttcacgccttcaatctgagcctgtgcggcagcattgcgagcactgagctcagcattctcgaatcgcgcattctccagcgaggtcttggcctcctccagctcctcgcttttgacgcctcgagccatctcctgacccttatggcgccccagcacgaagccggcgaagaggccaagccctgcaccaaccactagcacgacgatgacgataatcacggttcctatttgctcaaacatggtacccagtatgtcatcgatggtgaatgacggtaaatttttaccgaactcgacgatttcaagccgttaaacggacgctcagcagcccacattggacatttggactcatcgcagtcgagcatcaaccgttattgcgctgtgtcacacccgagcgccggatgtccttccatgatttgccagcgcgcgtcatcatgcggcagaactcgtcacgatttgacgagacgcgcaatggccgcggaagcctccgcaagttttccatcggccacctcgccgccctggaccgacgcctgccgcacgcaatggttgagatgatcgtccagcagcaataacgccacggatttcagcgccgaattcgacgccgaaatctgcgtcagaatatcgatgcagtatttgtcatcctccaccatctgcgtgatggcgcgcacctgcccttcgatacggcgtaatcgtgcgatgaccttggccttgtcttcgtcataaccatgcatcgcaaaccccctgatacttatccgtcagctgaacacaccccattatataccctctaggggtatagggtatacactgttgttcagtacatcaggagtgggaaggaacagttatggagttcagcatcttctcgaccgtcgcggcgctgatagtggcggccgcattgacatggctggtcctgcgattcttcttcggaacgcagaaggcaacggccggggccatggacgcttccggcgaacgccaatccgcaacaatcactgtcaagggcgggtactcccccgccgtggtgagcatgcgtgcgggtacgccgatcacactagccttcgaccggcaggagaccggcgaatgcacctcgcatgtggtgtttgctgatctgggacttgacgccatgctgccgggcaacgccaccaccgacgtggaactgccggcgttgccgccgggcgagtatccgtttgcgtgcggcatgaatatggtgcatgggatgttgaaggttgagggagaggacggctcggatgagaacacgccccttcctcatcctgatgcttcgtatacggcacctaccgccgtggatgcggcggagggggagcgccgggaggcggctgaacgcgccaatgagatcaaggcgctgacgaagctggtgattgtggccgcggtactgacgttgccggcattcgccgtcaccatgctgcatatggccaatcccacgctggtgccgcattggatggcgaacccgtggttgcaggccatcctgatcacgccggtgatgttctactgcgggcgtccgatccacacggtcggcttccccgcgttggcgcatcgctcccccgacatgaactcgctggtctcactgggcacttcggccgcctacctgtattcgctggtgacctgcatcgccccgtgggtgttcccggaaggctcgcgcgaaccgtatttcgaatcggttggcgtggtcatcaccttggtgctggtcggccgcctgctggaaaccaaggcccgcgaaggcaccggcaaggcggtgcagtcgctcatcaaactgcgcccgcgcaccgcgcacaaactcaacgccacttccgcagacaatgcagaccatagcgaatggcgcaatccggcgaacttcaccgacaccgacatcgacgccatcgccaccggcgacctgctggtcgtcaagaacggcgagcgcgtgcccacagacggcatcatcgtggccggcgaggcacgcatcgacgaatcgatgatcaccggcgaatccaagccggtctccaaaaccgcaggcgacccggtgaccggggccaccgtgctgttcaagggcgactgcgtgatgcgcgccacccaagtcggcgcggacacggtactctcgcagatcgcggcgatggtggcccgcgcccaggcgaccaaggcgccggtgcagcagctggccgataagatcgcccggtatttcgtgccggcggtgatgatcatcgccatctggacgttcgccatctgggtgtcactgggcccggtgccgcaactggcgcatgcgctggtcaccgcggtcagcgtgctgatcatcgcctgcccgtgcgcgctgggactggccacgccgctgtcggtgacggtctcactgggcttgggcgccaccaacggcgtgctggtcaccagcgccaaggcgctggaacaggcgcgtcgcatcggcaccgtggtgttcgacaagaccggcaccatcacgcgcggcgtggtggacgcggccgccgactgggacaagccgagctacgagcaggacacagtcaaggaaggctcgcgcgaggccatcgcggcgttgcgcgcacgcggcatccgcacggtgatgctatcgggcgacaaggccgaggtagccgggcgcatcgcccgcgaagtcggcatcgatacggtgatctgcgaggtcaagccggacggcaaggcctactggatcgccaaactgcagcgcgaacgcgacgaggccgccgccaagtccgcggatggcgcctcccgcacggccgcgcaatcccgcactctgattgcgatggtgggcgacggcatcaacgacgcccccgcgctggcccaggcggatctcggcatcgccatcggcaccggcacggacgtggcgatgcagtcggcggacgtgaccttgatgagcggcgatttgcgcggcgtcatcaagaccatcaacctgtccaacgccacgatgcgcaacattcgggagaatctgggctgggcgttcggttacaacgtcatcggcattccggtggccgccggcgtgctctacccgttcaccggctggctgttgagcccgatgatcgcgggtctggcgatggcgttgagctcagtgtgcctggtgctgaacgcgaacaggctgcatgggtcgaacatcaacgcgggcgttgtcgatggcaccgctggctcgggcagcagcacggcggatatcgaatcaaccggatcggccgaatcagccaacgccgccaacatcaccggctccgccacatccaacgcgcctcacgagccaaccgtcatcatcgacgatcgcaccacgctgaatcacaccaatcacgcatctgaccaatccaataatccaaccaacaaggagaacactatggatatgggaatgcacatgcaccacaccgcccccgcggacggcgaaaccgccatcgacccggtgtgcggcatgaccgtggcggtgaacgccgacgcgatcacgcgcgagtatgagggcaagtcctattacttctgcggcgaacactgtgccacgaacttcatgaaggccccgcaggtgttcctggagcagtagtctctgcgtttacctgattcaacgacaatggcctccgcccaaaacgagcggaggccatttgcatatatgaatcaatcaacgaatcagctggcgaagaagaacacgaacagccaagcgccgatgatggcgccgacgatcggggccacgaccgggatccaggcctcgccccagcgggaggagcccttgtgcgggatcggcagaatggcgtgcagcagacgcggcatgaggtcgcgagccgggttcaggccagggccggtcgggccacccatggaggtcacgaggccccacacaatgaagccgacgacgatggaggcggcggcgtaatcctgcttgccccaagccagggacaggcagcacagtgcgccgaagacgagcaccagggtgccgaacatctcgttgaggaagtagttgaccttctggttgtccgcgtcggtggtgcagaaggtgccgagaatggcgtcggcgtcctcggtctccttgtagtgcgggtagtaggtcaggtagacgatgaactggccgagcagggcgccgagcagctgggcgacgatgtacggcagcacgtcgctccacgggaacaggccgttgacggcctgggcgatggtcatggccgggttgatgtgcgcgccggagacgctaccgaacataagcaccgggaacatgacgccgaagccgtagcccatggcgatgttcaaccagccggcgtggtgacccttggtgttcttgagctcgacgttggccacggagccgttgccgaagatcatcagaatggcggtgccgaagaactcggcggccagcttggtaaagagagagtattccactgcttcttcttttctcttcgccgcgcaacaggcatggctgactgttcacggcattctgtgtgattggaaatccgttcgcggagccggcgacgcgatttacgctgggcgcgaaagcaaacgtggcgattgtacactttgccccacgacgaaatgccggcaagatgcgatgtcgaatgtccagccgaatgcaatgcccaaaaaagccatcggaatcagccgaagcgaccttgactctcagtggttgcgaatgacgttgcgcaggggtaggacactggtgggcgagacggacagttcgtcgattcctaggcacaggaacgtatcggtcaggctcaggtctgcgccaagctcgccgcagatgccgcaccagatgccatgacgatgggcagcctcgatagtcatctggatcatgcgcagcacagctggtgaatgcgggtcggcaaagcgttcgagactcggggtctgacggtcacaggccagcgtgtactgggtcaggtcgttggtgccgatggagaagaaatcgacttcggcggccagctcgtcggccatgatgaccgacgcaggcgtctcgatcatgacgccgatctggatactctcgttgaagtcgatgcgctcgccgcgcagctcgcttttggcttcttcaagaatccgcttggcgtcgcgcacctcctgcaccgaggtgatcatgggcagcataatggcgatattgccgtatgctgaggcgcgcaacaatgcgcgtaactggactttgaaaatctccgggcgggtcaggcagatgcggattgcccggtaaccaagcgcggggttatcctcgtggtccagattgaagtagtcgacctgtttgtccgcaccgatgtcgagtgtgcggatgatgaccggacggtcgcccatctcctgtgcgacttgtctgtatgcatcgaactgaaattcctcggtcggccagtcctcgcgttccagatacaggaactcactgcggaacaagccgatgccctcagcatcgttggccagcacggcggctacgtcagagggacggctgatgttggcgtacaggcggacccgctgaccggacttggtttcggtgggcttgcctttgagcttccgtagtaggctcaggtgttcctcagcttcggccttcctgcgctggcactcggtcagcgtggcctcgtccgggtcgacgaacaccgcaccgctggcgccgtcgattacggcaacgtgaccgtcatcagtcgggtcgaaggcgtcgccgataccggtgatggcgggcaggcccatcgtgcgcgccagaatcgcggtgtgcgagttcgctgagcccttggcggtcacgaggcccaaaaccttagcgcggtcgagctgcgcggtctcgctgggagcaagatcttgggcgaagatgatgtggctttcgccgttctgcgcaatcccgttctgcacagtaccgttctgcacagcatcgccttgtatactgccatcctgcgccgtgctatcgcgtttgccttgcagcacgttcatcacgcggcgagaaacatcctcgacatcagcggctcgagcctgcatggtcgagctatccatcgcagcgaacatggcggcgaactgttcggcgacgctcttcaccgcaaattcggcgttcaccttgtcttgcgcaatcaaaccttcgacgcatcccgcatagtccgggtcctggagcataagccgatgggcgtcgaacagctcggccttgttttcgccgaactcagcggcgacgttgtcacgcagttgcttgagctgagcgacggccatgtcacgggccgcgcggaatcgatccatctcagcctgcggatcgtcgattacgcggcgttctacagcatgatcggcggcggcgagcacgcggaccgtgccgatagcaatgccagcggatacgccgacgccctgtatcgttctcattacaggtgctccttgaggaatcgctcgaactctgcggcagcgacagcttcatcgttgccctgcacccgaaccgtaacctcgtcaccttgttgaacatcaagtcccataacaccaaagatacgcttggcatccacggatctgccgccgtaggcaacggtgatgttcgactcatattcccgcgctttggcaaccaaccggccagctgggcgggcgtgcatgccttcggggtcggatacggtgaacgcgaatatctgagacatgacgccgctccttacacgtccggccgtcacgcgcgaagacggcctttccgcaccagctacggactgatgctggaaaaaacaaaaaaccggaatctttcgattccggttgtctgtgcccccgcagggattcgaaccctggacacgctgattaagagtcagctgctctaaccaactgagctacaggggcttggttagatgttgaagtgttccttgcaacaggtgataaatatactcagatttgaagcgaatgcaactctcggcgtgtcgcgtctatttccggcgtttttgctaatacaaaaatcccccatgcggcgcgaaccgcacgggggatgatgcttaagctcagactcttggtctgtgtgattccagcactaggccggaatgactcactcggccacgaccttcacgaagaaggaagcggtgatctccgggtggagggccaccttggcggggaaatcgccggtggtcttgatggtctcgacctcgatggccttcgggttcaccgcggccttgtcggacagagcgatggcgatggcctcgttggagataccaccgaacagcttgccggactcggacaccttggcggcgatctcgacggtggtgccctcgatggcggccttggcggcgacggcgtcctcgcgggtggcgacggccttggccagacgagcgcgcttcatagcggtgatctgagcctcagcacccttggtccacgcgaaagcgaggccctgcgggaacaggtagttgcgggcgtagccggccttcacgtcgacaacgtcaccggagtggcccaggttggacacggtcttggtgagaataaccttggtttcagccattgttcaaagcctccctaactcagcgacccgaggtggcgtacggcagcagggccatctcgcgggcgttcttgatcgccttggagagctcacgctgctcctgcacggtcacgccggtgatacgacgggaacggatcttgccgcgatcggaaatgaacttacgcagcagcgcaacgtccttgtaatcgatctcggtgaccttggcggccttcagcgggttcggcttcttcttgaacggcttgaccggcggttgcggcctcttacgtgacatgatgttctccttataaatcttgatattgattgctgctggcagcggggaggtaagtactgatcagaactccgggtcggaatcgtcgccgccgccgaaatcggaggaagcgccgaacgtggagaagctaccggcatcagatgcaccggcattgctccacgggtcggccgcaggagaggacgggttggcgggagcggcaggctgctgggagtatccagcgccaccaccctgatagccaccgttgtaaccgccctggccaccagcataaccaccttggccaccctggttgccatagccctgattgggttgctgaccaccctggaaaccaccggaacgaccttggaagccgccctgaccggacgactggcgggtcacctgtgcggtggcgtagcgcagggagggcccgatttcatcgagctgcatctccacgacggttcgctgggaaccatcctgtgcctgataggaacgctgctggaggcggccggtggcaatcacgcgcatgcccttcttcagggactgggcgcagtggtcggccaggtcacgccaagcggagcacctcatgaacagcgcctgaccatcctcgaactggttggtctgacgattccaggttcgcggggtggaagcaatcgtgaagctcgccacggtcgcgccgctgccaatagtgcgcagctcgggatccgcagtgaggttgcccacgatggtgatgacggtttcgcctgccataacggtccttcttacttaccttgaataccagctgttcagctgactaaacgcttgattcagcccttacgaaggatcttcgtacggatcacggattcgttgaggttcagaacacggtcgagctcatcgctggtagcgggctcggcggtgtacttcaccacgacgtagttgccttcggtcttaccggcaatctcataggcgagcttgcgacggccccagtaatcgggctcatcgaaagagccgccttccttggtgacgagttccagatactgctcggtcagcttcttcagaccgcgctcatccagctcaggatcggcgatgaacatcagttcgtacttgtgcgcagacatcacccacctccttcggactattcggccacggacgttccgtggcaggagtgtgtatgcgtgttaatcatagggcgatgcagatgcacttcaccctgtgagcaacttacctatcttatggtcagggcgggacagtgccgcatgttcatcaacgattgcagcactcttacaacacagccccacttcacggcacgcgctgcggtggggtgctagtacactggttaaggctaaaaacactgcaacacaaaaggatgcgaaagcatgtcggcgattcttgaaggcactccggataaacgactcgtattggtcacgggccgcgcctaccccgagctagctgagaaggtggccgaatgtttgggaaccgaaatcctcgaaaccacgtcctatgactttgccaatggcgagatgtacgtgcgtttcaccgaaccggtgcgtggtgcggacgtgttcgtgctgcagtgtcattcgggcgatatcaacaagtggatcatggaacagctcatcatgatcgacgctttgaagcgcgcctccgccaagtcgattaccgtggtggcgcccttcctcggctactcgcgccaggataagaagcaccgcggtcgtgagcccatcaccgcccgtctgattttcgatctgttccacgccgccggtgcagaccgcattatgacggtcgatctgcacgccgctcaggagcagggtttcttcgatggtccggtcgatcatctaaccgccatgccggtgctgctcgattacgtgcgttccacccttgatctgggcaacaccaccatcgtgtccccggatgccggccgtatcaaggtgtccgaacagtgggccgccaagctaggcaatctgccgctggcattcatccacaaacagcgtgatattactcgtccgaaccatgccgaggcacatggcattatcggcgatgtcgacggccgcgactgcgtggtcatcgacgacatggtcgataccgccggtactatctgcgaagccgtgcgcaccctgaacgaatccggcgccaagtcggtgacgctggtcgccacccatggcctgctctccggcccggccgtggagcgcctgtctcactgcggcgcgcatgaaatcgtgtttatggacaccgtgccgattcccgaagagaagcgcctgccgaatatgaccgtactgtcttgcgcaccgctgctggccgcgggtattcgctccgtgttcgaggaaggttccgtggcgattctgctcgacggcctgcccgaggacatgcgtccacgcaatatctatgcgtgattgatacgccgaaaatccttacgaaaaaacgccgcttggctattgatcaagcggcgttttttcgtatagctccaatcagatgaaggcgcgctcgccgaagatggcggtgccgacgcgcacgatggtggagccttcttcgatggcgtaggccatgtcgtgggtcatgcccatggacagttcggtgcagtcggccgtgccttcggcaccggaggcaataatctggtcgcgcgtgcggcgcagatgcgcgaagcccgcacgaatcgtgcgctcatcatccacatgggcgccaatggtcatcaatccctgcaagcgcagtccgcccatcgcaccgatgcgctgggccaagtcgatggcgtggctgggtgcacagccggacttcgattcctcgccggattcgttcacctccagcaacacgccgaccgtgatgccgcgcatggtggcacgacgggcgatcttctcggccaactcaatagaatccaccgattcgatggcgtccactaccggcagcactttactgattttgttagcctgcaattggccgatgagatggaaaggaatatgcgttgcagctgcggcattggccgtgtcagcctcagcggcatcaatcacgcctagcgaataaccacgctcccccagtcgttttgccagaccgtcagccttgacagtaatctcctgtggacgattctcaccaatcacgcgaataccagcaccgatagccgccagaatctcgccgacatcgcgcgtcttggtggcagccagcaattggaccgaaccggcagcacgcccggctgcggactccgctgaggcaatccggtcaagcacgcgatgcacaccatcagtaatctcttgtgcgcgcgcctgatcgataacttcgttggcgagatccttatggtccatgtatgccgtcattgctgcccctgttcgtagattccccaccatcgtagtctcatacgcgcacataatgcttgttattgaacaaaagtgaagcccccgctgttcatgcgcgggggcttggtgatgctaggccgagcgagtgggactagcaggtaccggacttgcggcgcttgaggatgattacacccgcaacagcaagtaccacggcgaggatgccaacaccaagcacggctgcaccggtgtcaggtatcttcttgtgcttgccggagtctgcatcacccttgttctggttggaatcgttgccttggtagggcttgtccgtgccggaaccgggcttatcgccaccctggccaggcttcgtggtgctcttctcaaccagacccgcgatggcatcgctgattgcctcagtcgcagcctgtacgtcagactgggcggcctgaccatcactcgtcagcgcattcgccgtagcgactgccgaatcaagcacggccagcgattcatcagtccactttgtgcgatccacggcagcagcggcatcgagctgagcgctcagcgcggcacgatcttgcaccgtagctacaagcaccagcttcttcgctgcctgcttcagctgggttgcggcatccaccaccgcagcttcggtggcatcctcagccttatacacctgctgcgccgaatccaataccgccgcgtactccgcccatgaagtctcggtgtacttggaggcatcgtcagccttaggcgagtcagcgagcgcctgcttgagctcggtcttgtcgatcggtgtgggctcaggcggctcaggcgtactgtcgtcaatggcatgaacctgccattcggcaacagccggagaagccgagccggacgtgataaccatacgcaacttggtagtcttgaccggagtgttccacgtgccatcagaccaccccttggcatcgccggtggcccagccagcagacggtgaattggcggtcacagtgtaggtggcgtcgggaatatccacgaagttgccggcaccgttgttcgccaaggcgtcccagtactgcaattcccacgatgccggaatacccaatccgccatcatccgaggtgaattgcacgcggctagagtcgatagtcacttcacggtcccactcgtagtcgaggcgcatctcaccggtgttgggccaagtgccccagacatcctcgttggcaatggtgatatcgggaatgatcttgccgtcgttcaacgcggcggcacccttgacccagccggatgccttgccgtccacatcggtggcggtggcatcgccctcaatgtagccggtcagcggcacggaagtgtcggatggaatgtcggttttcgccgaagcggacacgttgccggccttatcggtggcgcggtagtacacggtggcgcgcgacgcgctcggtgcagcaatcggcttgctgtacgtggcccattgaccgtctgtgccaatgcggtattcaattgatgcgacaccggaaccggtgccgtcatcagcggtcaaggtcaacgtgcgctcctccttatcggcggcggcggtcacggttggcgcggcggagtccaccttgccgccggccttggccacgtcggaaacgttgccggcctgatcggtggcgcgagcccacacttcgacatcgccctgctgggaaagcgtggcaatggccgcgtttgcattcgcggcgatggtggtccagctcttgccttgatcagcggaaatctccagcttggcgataggtgcggtgtcgtccgtggcctgcacggtggcgaacggagcggtggtgagccactcgctattgcctgcgttagcagtaacggcaacggttacagtcggcttcgtggtatcagcggcaggctggtagccgtcctgcacggtgacacttaccgacacattgccctgctcgcttgcctcaccgggcacgccggcgaccatgccgtaggccgtaaacgaaccgaccttggcatacgaggaagcatcaactggacgccaaattactggggaggcaacggttgggttcccgtacttcacatccactgtggccggcagagtaggcgcagtaccggtggcggtggtcacgctcttcggcgcagtgattgccggcgattcgctggagtcggagccgacttcccattcagcaacggccacggaggcatagccgccatccacagcttgaccggtcatgtcgagctttaaggcagtagtggtcaccgcatcgaaggtgacggcgttggggttggccttgcctgtggtcgttgtataggcactcgggttggtgacatccttccatgtgccgtccgcgtccaagtactgaatcttccacgaggcgggcgcgcgcagagcgttggaatccacgtcgaaccaaaccttagacgagttgacgcgcacagtgccatcccattggtagaccagagaatcgccggactgcgattgcgggatagaacggtagttggtccagtgattcggcgggaccacagcggtttgcaacacacggccgtcgttcaccgaacccttccaagcaggcgtttcagtgaacgtggcgctcacctttgcgtacggagccacgttggtggagggctgcgttttctcggccttggttggatgggcggtggaaaccatctggccgtcggcggtccaatcgacttcatcaatgcacacggcacggcggaaatcggtgccgccttccttgtcgccggtgtgataggtcacataccatttgtcgccgaactggagcaccgaggggtgcatcgtggtggccgagccagaaggcacgattacgccttggtacttccatgggccgagcgggctgtcggaagtggagtactggatgcaagcttgatagttcgattccacgcaggtggccgtgcccgaaccgggcttaccgccgtcgtacacgttgtaataggtatcgcccttacggaacacccacgccgcctcgaagaatcccttcgggccgttcgcgttgctgtccgcgtccttcatggtgtggaggttcggcgtggtgccatcagccttggtttccacctcggtgtatgaggtgcggccggttgtggcgtccttcttcatcttgatggcgagctgagtgccgaacgtaccaaagtgcaaatatccggtgccatcctcgtccacaaagaatgccggatcgatggtttcaatctgggtttgcgatgtggtgagcagcggcttgccgatggcatccttccacgggccgagcggactcttcgacttggccacgccgatggcgaacgggtcctgtccagccgcctcagaagccttgtccttcaccggcacgtagtagtagaaccaatcatcggaagtgtcgctcggggtgccgttatcgtcggctacgacttggccggcgtacgcgccatcgccggtggcccagctgaacaggtctgccttggcgatggtcttgtaatgtgtccatttgccttgattcaggccgtcttcatcggtgacgtatacgccccagtccttcatgttgaaggagccgtagtcgggcgaagcctcatcgtgaccggtgaagacgaagagtttgccgtcatagctctgcgcggatgcatctgcagagtagtagttctgcgaaagatcgttcggggtgtcaataccctcgttctgcccgatggggttgcgcatgtagctgggcagtgcgctattgtcgatttgggtgacggtgacatcaggattgttatacggcagttcgttatacgcgtgaccggcaacgctgggcgcgttgtcagcggtggctgaatcggcggccattgcggtcggcgcaagggcaaggcctgacagcaatgtcgctgcggcgacgagtccaccggccaccgcgcgaaccgattgcgcggatacatggaaactcatagtgctcctcattgagtgagtgaaaagagtaatgatgggtagaaggaaaaggctagagccccctctgtgagggggctcactcggcagaatgactccgttgcgggtcaggccgagtggcgagccgaaccgtggtcgccggactggcgacgcttcaggatggtcacgcctgcggcggtgagcagcacggcagccgcagcaactacggaaaccgcggcaccagtcggaggcacacgatcacccttgttgtccttatcatccttatcagtgtcggtcacaccaggctgctgggagccgggcttctgctcaaccttggtggcccaaaatgccttgtcaagggcatcctgtgcggcatcgacatcggcctgcttggcatccttgtcgtcgtacaccttctgagcggcggcaatctggctctgcagagcctgccatgcctcctcggtgtacttcgacttgtcagccttcttggcctgctcgatggaagcctcgagggactccttcttcaccgtttcggcggcgggcttctcttccaaggccttgacggccttgttcagcgaagcggacgcttcctggacggcggcctgagtgacctcaccgacctcaccgaccttgagcacaccttccgcagcctcgatggccttgttcaaggcctcgacactcttatccgtgtacttgccggaagcggcctcggctttggccgcatcgatggccgcctgcaacgtggacttctccacgtcggtggcgagcgcaacgagtgccttctggccgtcctcgagcttggtcacctgctcggcgacctgttctgcggtggcgttggcatcgtcgtacacagcctgggcagcgtcaatgatttgctggaactcagcccatgaagcggcggtgtagcggcttgcatcgaggccgttggctgtgtcaagagccgactcgagcgcggtcttgtcgaccggggtaggttcaggctcggtgccgtcaataccatgcacgccccactcggccacggcggccccgaaggtgctgctgccggtgtgcggagtgagcacgagtcgcagcgacttggtggcgaccggcttgaaggtcacagtgctccaacctttggcatcggtatccgcacgagaagccggcgagttacgcacaatggtgtaatcctcggtgggctcgacatccttccaagaaccatcctcggcgaggtactgaatcttccaagcgtccgggacttccagaccacccttcgaatcgtcagtctcagcgaagttggcccagaactgggcgcggctctggtcaacggtcacggactgaccgaagtcgtactgggcgtacatgccgtcctttgccttgccccaagaaccccagaccttgtcgttgacgttctgatcatccgtggtcggccaagtatcatcgacgactacgccgtcgttgagcttgccttcggccggtgaccaggtcgcctcggaatcaggcgaaatggtggtcttggtcgccttgccttcaatccaaccgaccaacggctcaggctcaggctcaggagtggaggaaccgttcgggtcggcaaccacgtggacagtgagcttggcagctgcggaagacgaaccgtcgtcgacggtaccagccacctcgtagtcaccaaccttggtcaggtcgatggccttgatgtcggcatccttccacgtgaccttgcggtcgtcgttgtatccgttcgggaacttcaccggaaccgtggcgggcaggtcgatggacttggcgttctggtagacggtctgctcaaccggctgcgcattacccacggtctgcaatgcggtatcggaacgagctgcgatgtgtgcaaccgtaccgctcagcgcaccagcgacgatgcccttgacatcgaatacggcatcggcggccagctgagcgtcggtcaccttatcccacgtgacggcgaggtcacggcgagaaccgtcggtgtatacggcgctcacggtggagggcagcttcagatcatcggccttggaaccggtctgcaccagtcggttgacttcgtccacgctcaccggctcgatggcgtacgcctcgaactcggaagcacccacgatggcgcccttcgggaagaccacgcgcagcttgtcggtttcgacggtgtcggcgaacttcacttcgttgccttcgttctgattgaccgtgtaggactggccgtcagccagcttcacatcctgccagttaccgtcagcgtcagcgtactggagcttccaagatgaggccatcggcacgccaccgccatcggtccagaagaagaccttggccttcttcagtggcaccttgccggcccacttcagttgcagccacggctccacaccagtgttgtcgccccagttgttccaggtctcgttcggcgtgttggtgtataccacctgaccgtcgatgaccttcttggcgttgtccttcggctggtagccgttggtgtagctggcagaggcgctcgactgcggggctacgttcacggtaccgtcagaggggatgccgtgaacggtgatttccttggagccttccttctcgccatcggaagcggtgagcttcagaacgtagtcgccttccttgttgaaggtgacggtggtgctggcagcagtatcgtccacgaacttcgcggtaccgccctcggggccggaaaccagctcccacttggtggtgacgtcgccttctgcgggcagaccgtcatccttcaccgtaccgacgagcttggcaccggatgaggtgctggaagacacgtaagcatccacctgcggagcctggttctcggaagtgccgtcagccttgataccggtgttgtaggcttcgatctccttgacaccgacggccatgccggcctgcggcgtgaaggtgacgcggatagtcgtggtctccaccggagtgaactggatacggttgtagttcgcgcccgcgtagttcggggtgcgcacctgatccgcaatcggggcccatgtgccgtcatccttctggtactccaacttgtagttggcgggctcggcatagccggagatggtctggctggacgagctctggtagaagtacaagcggaggtcgtcgatcttctgcttgccgtccttgaacttgatattgagcgtgtcggtcttgttctcagaacccttggtaccccagaacgattccatcacggtcttgccgtccaccgcgttcttggccgggtagttggtgtccttctcggcgtaggtggtaccggtcacgtccgcgtccttggccacattcgtggtggacttggaagcggagtcgacgttggcaccggacttggcgaacaggtcggtcacacgctggtcggcggtgaaggcaacctggttggcggccttgatatcagaaccagcggcattggtgatggttacgccggccttgtcggcatcctcaacggtgcccgtggacggatcgtaaatgaggtgtgcgagcttgtcggaagtgaaggcgagcttgccccccacgtacaggctgtagccagcaggtccaccatagtggctgccgtccttatcccacacgatggaaacatcttgaccgtggtagctcaggttgttcaccgtgaagtagttccagccggggatctcaatcgggttcagctcaatcttgttatcctcgcgcggcaccataccggctacgtcctcgaccatcgtccagttcgtggtgccgagctgggtgtggtggatccaggagcggtaggtgatcttgccgccgttctgtgcggcgtcaaggttcttgtcgaggttgttgatcacgccgtcaccgtttacatcgccgacgttgttgttatcctcgttccagaactcgttttgatcaaggtagttgttatcgccgccctgatagtgcgcgaacgccacccagtacagcagcttcttgaactgctcattggtgatgtaaccgttcttggctgcatcgtaattgcggatgccggctgaatagacctgcagcagcggctgtgcgttgataatggagaagttgttggaaccggggaagttcagcgccgccttgtccgcctggttggcggtgaagaacgggaagatcgggaactcgttggaatcctcgaacaggcgcagagccttgttgtaatcttcgttgccggtaggcatcaggccttcggagtacgggtagtagttattgatctccttgtacttggcgaaagcaccgtcgttcagccacttgtgcttgagcaggttgtcggacttgtcccacagttcagtggtgacttctttctggatcttgtcggcgatggcctgcatcttctcggcgttggcggtatcgccagcggccttgtaggcctgagcagccgcattggcgttggcccacatattggcggaaccatcggcgcgatccatgcgctggccggagcgacccggctcagagaaggaaacggcgtcggcatcgttaccggtcatcgaccaccaggaccagtcaatcaagctgttgtcattgttgttctggttgtcgttgttgtccggctcgctcttggaagtgagtagaccttgcacgtcctcggcaccctggtcggccagctcctcggccacggtggacggaccgccgtgcaccttgtaggagtcccagccggcgcgcgtgatgtactgcgtgtagctatggttccagttggccgggtcgcccggattgtcgtggtagtagtaatagcccgccttgctcttcttggcggtatcgccggcggaaagccaggtgccgtaggagtactcggggttgcggaaccacttggtgtccatcatgaacatgccggaggtgagcacgatttggttgttgtagccgagcacaccctcgatggaggtcgggtactggaaggtgttgccaggcatgttggcgtcgagcatgttgaaacggctcagccaccagcggtagaccacggtcttatcgatattgtcttccggagtgtccacgtagggagcgttatcgacccaccacttgttgtaggtggtcacggaatccttgtaggaggcggcagcatccttaaggtcgccggtgcaacgggcctcatattccttggtggagtcaggcagttcgttggcgatcaggccgagctgaatcttgacggtctgcggttcgttggccttgaggctcaacgtgctggtgagtttgccaccgctgacgatccagttggaaccgtcctggttgttggcggagaagcgcggatagatggtcgtcaggttgttcttgacgttcacgcggccagtaagttcggtggcaccatcagcaccctcggcggcgaacggcgaggccgtggtcagtgtgacatcgcggtcctgcgtgctttccacggtgaggttcgcaaccatcacgttgttgtaggtgatgtacttgacttccttgatcttgaggctcttgccaccggtctggaacagggaggtgaagtagctcggcgtctgcttgcgctgggaggcgtcttcgttaagggtctggtttgatccatcagcgtttacggtaacggtgaagccgctcctgctggtctggtcccagtaggcggtatcacccacaaaaccgagctgattaggcgtgtgcgtgtacatgtaggcggcgcgaccacgggtgaacaggtagttgttgccgtcggagccttcatacgagtaagcacccttgtcgttcgtgcctttaccagttggctgtgcaccagtacgggtgagaatcttatcgatccagaagtcatggtcggtgtcgatgccggccaggttcttcacgtcgttatcgaatgtctcctgcagatagctggcggcagggttatatgtggtgttgttcgccgccgtcttcatcggatcatcagatcccttgaacgacggatatgccacatccgcattcttgatgacgggcgcatcggctgcctgcgcggtgactgcaccgccggtggccagtgtggcgaccgctgcaaccgcgccgattgacgcaagccaccgctttcgtgttgattgatgcattcctgcttggacctctccgccccggtctttcgcgtcttcgctcaggctacgtcgcatctatgagaccaggacttcttctgtggatgctgggccgcagagcccgttctccgtcagtttcctttattggctattgggttcaccggaatgagtatcttcagtgaatctggtgtgatatccgccatggatatcacggttggagcaattcaccgaagctgattccacatcataaccgagcgaatacggtttcgcaactttccctcagcgatatcaaccatcttatacaacaaaaacccggcaatttctcagttttcgcatttactttcgcattagagcattgctgcgtttcgccgtgtcgcagtacctacggcgcgccgattcagcctcgctgaatcaggaaccaacaggctcccgctggcgggagctggctcgcaaagcgagactgagggtggcttacacggtaccgcttatgaccaccctcagtcgactccgccgacagctctcacagcgggagcatataattaaaaatctcctgcacgggtattaccccacacaggagacctcattccccggatgtgttttcggctccaatcgatactgacatccggcctatgccgtcatcgacttattgcagacgatggcggcataagtattattttgccggccagttgcgcgcaggccggcatatcgccgatatttatcgacgctggaagacacgcatctcgcctatctcgcggttggcccacgagtagtacggcaccaagcgcagcgtcgcgggctcacccgcacgcggttcgtcggcatccacgtacagcggcgcgtcatcctcgtcggcgtgctcgcgcactgccggcaaatcaacggtatcgactccacccagcaagtcggcctggaaagccacagcggcatccgcaccggtgacgccatcggccagacgatagttccacaaatcaccgggattatcgacctgttcggcgcagtagaccagcggtccgcgcatcacggccacctgaccggcatcggagcgcacgcgggagttggcgcgcacgaacttcacggacatgtcgagctcgagcgcaatctccaacgtatcgccggcgttgaccacaaggtatacgaagccgtcttccagcgaacccactgcgggcttgccgttcacggtcagcgtgtaggagccccgcgaccagccggggatgcgcagtccgaaacggaccgagctgtcagtggcgctggcgggcaggctcaccgtgtattccacatggccatcccacgggaagttcgaacgctgctcgaccgtcaggccggaagcgaattcggctgtgttggcgatgaactggtggctcagcacggtcttgccgccgtcgcgctcggtgtagatgtagcggtccacggaggcgatgagtcgggcgatgttggccgggcagcaggcgcagccgaaccagtcgacgcggtgggagagcacgtggtgacggtccgggttatccagtccgtcaggcgtggtctccagtgcattgacgtagtagtactgcttgccgtcgagcgagatgccggcaatggaaccgttgaacagttccttctccagcacgtcggcgtattcgcccttgggctcgaggtcgagcatctgctgggcgaacatgctcatagccacggaagcacaggtctcaccgtacatcgtgtcgttcggcagatcatagtcgtaggtgaacgactcgcccacgtgggtggaaccaatcgcgccggtgacatacatacgacgggtgacgatgttcttccagaaacgcttggcggtgtcgatcagtccccgatcgccgagcagtcggcccacatgggccacaccagtgcacaggtagccgacgcgcacggcgtggccatccgcggtctgctggtcgcgcacaggttcggcggcctggaagtaggtgggcttgtagaagccgaggtcggggaagatgttgtcgccgttcagggccttcagctgcttggtgtagaactgagggtcttggccgcgcacgtcgatgaggtattgggagagcgtcaggtaacgcttttcgccggtttcctcgtacagtttggcgagggcgagttcgatttccgggtggccgtcggcgccatgaatcttgccttcttcgggcccgaagttggcatccaggcagtcggccatcttcttggcgacttcaagggcctgctcgttgccggtcacctgatggtaggcgacggcggcttcgatgtagtgacccatcacatacatctcgtggctttgctgaatcaggctgaagcgcgggcggtcggcccatacgccggacttgatctggtacggagtgtccaagtagccgtccggctgctgagcgcgggcgatgagatcgaccgtgcgatcgcacagcgccttgagttcgggatccggatggtaggccagcgcataagcggcttcctcaagccacttgtagacgtcggaatcctggaacaccatgccgtggaattcgtcgtccaattcgccggcggcaaccttcagattggcgaccgcgtggcttttgctgtcagccagctggttaccggccgggtcgtcgggcactgtggtgtcgatttcgtcgttcatcacgccccactggtaggggatgacggattcgacaatctggtcgcgacgccgcttccagaacggggaagtgattgtaacgttcatgatcagcccttcacggctccagccataaagcccttgacgtagtacttctggagtgcgaggaacaggatggcgcagggaatcagcaggatcacgacgccggcctcagtggcaccgtagtcgataacacccatggtctgctgacgcatgttcaccatcgccagcggcagggtggacttggacgaagagctcaagtacagcggaatcatgaagttgttccatgcttcaaggaaggcgagcaggccgaccgtaaccatcgaaggcttgaccacaggcaccagaatcttgaacaaggcctggaggctgttgcagccgtcgaccatggcggcctcttccatgtccttcgggatcgcgtcaaatgcgttacgcatgatgaacgtgctcataggcagctggaacagggtgatgactaggccgacgcccagcaggctgtcgttcagaccgatgtccttgtaccagaccatcagcgggatcagcagcgaggcgtacggcaccatcaggatggacaaggtgaccatgaagccgaggttacggcccgggtagtcgaagcgggagaacgagtagccggccagtgtgcagacgaccacggagaacacgaccgcgaccagggtcacgattatcgagttgaacaggtacttgggcagaccttcctgataaccgaacagggtcaggtagttggccacgccccagcccttggactgggccgaaccggcctgcgggctgaacgagcagatgatgacccagaccagcgggctgatgaagatgatggcgagcagagcctcaaggattcgagcgatgacgcgcttccacaatggggtagtcataatgtgttacctcccctttctcacttggtgttgtcgcgcatgccgcgcatctggatggagttgatgatgaccagggccaccagcacgatcagcgagagcgccgcggccatacccagatccttcttggaatcgaaggcgaagttgtagatgagctgcaccacggtcatggtggagttgttcggaccacccttggtcagaatgaagaactgatcgaaggcgaggatcgagccggtcacgcagtagaccaggcacatcacgatggtcggcttcatcagcggcagggtgatcgagcggaagatacgccaggaaccggcaccatccatgcgggccgcctcgtacagatcaccggggatggcctgcagaccgatcatcatcagcagcatgtagtagcccgagaatcgccagacaatcacgataatcgtggcccacagggccgactggccggtggccagcaccgaaccgccctcctgcatcaggcccaacgagctcagaatcttggtgacagggcccacctgcggggaatacagtgcgtagaacagcagggacgcggacgccaggcccgtcgcggacggcagcaggaagcaggtacgcagcacgttgttccacttcgagctctcctgcacgatcatggccatgcccaggcccaggaccagcaggaagaccgtgacgatcacggtgtactccaacgtgaaccagatcgagggccagaacaatttgttctcgaacaccttgacgaagttgtccgggaagttcacgccgcggttgccgcccagcaggctccaacgcgagcaggccatcaccaccagcagcacgatcggcacgaagaacaggacgacgatcatcaaccagtccggcagcgagtacaacaggccgcgacgcgtctcggccgccttcgccttggacttatgcacgggcaccgccccggcgctcttggaaacactcgacatgtttctctctcctttggggaataactgtgaaatggtaatcacggaatccgaatgcaatccgatgccagggcttcgaggaaggaggactccgaagccccgccaacacaccgcattcaagaggtatgtaatgatgaaggaagaaaaggaatgaagaagaagatagaagttcaattatgtggttgagccggcccctgccctcacaaggaagggaccggctcaatctgttcagttgttattcagttattgctgtgatttgatgagcgatggtgaggagcatcaccaccgaatcactgggcagacaggacgtcggtgacggccttgttgtcggccttgaggtcaccggaaccccacacggcgttctgcacgagcagctgccacggggagccagcggcgttgaaggcttcattgaaggccggggacttcggggtctggccgttgccgtcgatgatcacggagttgatggtctggatgcgcgggtcagcgtcgttgtaagcggtcttcagggtctggatgttggaggcggtgtcgccccggtcagcgaaaacttccttctgagtgtcagactgcatcagccagtagaggaagttccaggcctgagcaacgtgcttggagtccttggagatacccatggcatcgccaccgaggaacgtggaggtcttgccttccttggtgcccgggatcggagcgacgccgacctcgaagcctccgtccttctcagcatcgaacagagcagtggtggaggtgttcgggtaaggcatgacaccgatcttgccgttcgcgaacggagcggtccaagtggcaccggtctcttccttggagcctgcgcccaaaccgttggtggtgttggccagttccttgtaagcgtccagaacgcccttcatggagtcgttgtccagagtggcctcggagccatccttgttcataacggattcaccgtcagcccacacggacgggaagaggtcgaagaccagagcaccaccggactgaccggcgaggtaggaaccggcaacgccatccttgttgagggcggcgaccttcttggcctgctcggtgaactcagcgatggacttcgggccctgctccgggtccaggccagcttccttgtacagggccttgttccagaccatcacggaaacatcggtgatgaacggcagggtgtactcggtgccgtccacggtgccggcctcaatgtggccctgctgcaggtcggccttgttgtccagaccgtcgatctgcttggtgatgtcagtgaagatgccctcggaagcccagtacggaatacggaccacgtcgccggcgaggatgtcaggcagagagtcggtctgcgaagcaccgccgaccttgccttccatatcgtcgttcgggatgatctcgagcttgacctggttcttgtggctcttgttgtaagcctcgaccacgttcttggcctgacgctccagcggggaacgggtccacagggtgatctcggtgccatcgtcggtgcccttggccgggatgccttcggcggtggcggtaccgccattgccggagccaccacaggcggccagcggaacaatcaacgcggcggcagcgatgccagcaagagtacgggtcagtttattgaaagacaccatgttcgcttctttctctatttatccgctcaactatgagaggcggtggcggacggtccgcctccttggtcttcgccctgctcgctcctttgctcggaacaggtaacactgcgaaagccttttctcaatataaacgaacatcgccatttttgcaaaaacgctttcgcactttcgcatattttcgcatatcgaacaggtttgatatacattttgcgcgattgtttgactcaaacaaacacttatttttagcgctttcttacggcgtgtcgccaaaagccaacatattcgaacgtgaacacaacgctttctttcattctcttttcaatcgcacaaaaatgatcactgcgccacgccaaaaaatagacttgcgaaagttttcgcgtcatgtctacaatagaaaacaatacaaaggggtatcggtacaatcactactttcgcacgaaagagtgcagcaatatactgctgagaaagaaacgaggaatcgaggcattatggcccagacattgaccggacgcgcggcacggctcgaagacgttgccgctttggcgggagtctctttggccactgcgtccaaggcactgcacaacaagccccgcattagcgaagaaaccaagcagcgcgttctggacgccgcccgccagctcaactactcccccaacaaactcgcccaatccctggcccgcggcaccaccggcactatcggcctggtcacctccgatctgcagggccgtttctccacaccgattcttatcggcgcagagaacgagttgcgagcacaatcgacctcagtattgttggccaacgctcgtggcgacgccgcgctggaacgtcagcatgtcaagaaactgctgtccctcaaggtcgacggcctgctcatcgtgcagtgcgaaaccaacccccggcccacgcttggccatgactggggcgtgccactggtctacgtctacggcccctccaccgatatcgaagattgttcggtcacctgtgacaatgtggacgccgggcgcatggccatcaaccatctcatctcttgtggtcgccggcacattgccattatcggtggcgacgaaacctataccgccgccaccgaccgcaccaagggtgcggtcgaggcactggccgagctgggcatcgaaccggccgggccaatccggtacggcaagtgggacgaaggttggggccgcgccgccacccgtctgctgctcgatcagggcgtcacgttcgacgccgtggtctgtcaaaacgaccagctggccagaggctgcattgatgcgctcaagcagcagggcctgcgcattccggatgatgtcgctgttatcggccatgacaactggtctgtgctgacctccagctcgaggcccgcactgacgtcgatcgacaatgaaaccgagaccatcggccgccgcgcggcacgatacttggtcgatgccatcgaaggcaacccccatcacggtgtcaactacgtaccctgccgccttatccagcgcgaatccaccctcccgctggactgatatcaatcgataccctaccgcttcttggttttgcggccctttaagtagatgtcgatgacgatccatacgccaagggcgaaggccacgacgtagcccatgaagccgatgaccggaatgccgaagataatcggcttcatgccggcgtagtagacaatcgacgagccaacgaacaaaccgaccacaatcagggccatcgtcagacgattcgccatatccgaaagcagctggaacggctcttcggagccgaccagttccatgttgacgcgcaactgaccacgggtcagcatacgggccacggtcttgagttcggtcatggtgccgagcgtggcatgcaaagcctgatgcccctcaacgcccagcgacttgatctcgtctttggtggcgttcttcagcgatttcgacgtggcgatatggtcggaaatgatttcgatcatattcacatcaggaatgaactcgtccagcaagccttcgagcgtaaccaacgcgcggccgacggtggtcaccgtactgggcacctcgatgttgtggcggccggccatctgcgtcagtgcggtcaggaaagcggcaatgtccagttcggccagatccacggtgccgaattccttgacgatcacgtccagatcggccaatagcgcgggatagtcctccggatcggcctcggtgccggcaaatcgcagcagcccctcggccagagcgggcgaatcctgtttggcgacggcgaaaatcatttctttgaggactgcacgggtgcgctggtcgagccgaccggtcataccgaggtcgataagtacgatctggccgccccggatgaggatattgccgggatgtgggtcggcgtggaagaagccgtcgtcgagaatctgcgtggcgtaattgtcgacgagcttggtgccgatctccttcaagtcataaccggcgtcgatgagctggcccgggtgggagacggagatgccgtcgatgtactccatgaccaccacatgctcggtgcacagttcggcgtacaccgtcgggcagtccatgtatttgaatcgggcggcgaaacgcttgaattcggcgagattgcgggcctcgatcagaaagtcagtctccgattcgaaggtgtcccacagctcctcgaccacgcccttcaggtccacgatctgtgaggtgcgaatcaccttagtggcggccttggctatggagcgcatgatggagacgtcctgggccatgatttcgcgcacacccgggcgctgcactttaatggccacatcttcgccggttttcagcgtggcgcgatgcacttgcgccagtgaagcagagcccaacggcttgggatcgatatgcgcgaacacctcgtcggcgggacgcccgtattcggcggcaagcacatccaacaccgtggaatacggcatcgggtcggcgtcggcgcgcagtttggcgagttcgtcgcagaagctttgcggcagaatctcggagcgcatcgacagaatctggcccactttgacgaacgtggggccgagcgcctcgaacatgaggcgcatcttgaccggagtcaggccgtgcagcacgtcgaattgctcgacgattctggtgatctgccccagtcgtttgatcttgccacggcgcgtcagatggtagcgcgtggcgaaatcgttcctgcgtccgaacagtgccagtgtttcgtcggatacgctcggagtcgccttggtaacggtctgcttgagcgtgtccgacgtgtcgacggaccggttcgccgccgcctcacgttcggctttcgcaggcgtcagaatagggtcgaccctgctggaaagcggggtcgactctgattccggcgtagtgcgtgtgagcttggtcactcggccttgccctcgtcggcgagcttgtcggcggcactggtgtcggctgcggcagcagctctgtcgccggcttcggcggcggccttcttggcgtcatccaccgtctcgctcaccttgcgcttgagctcggtgttcagcgccttgccctgctcgaccgtaatctcacccttcttgacgagttcgtcgacgagctcgctgctcttctcatatccggtagcgagggctccgatgcccgccagcaggaccttgcgcaggccatcacccaaaagatcaaaatcagccatgatacccctccttcgaggtccgacatggcctggtgccatgtctcgtaccaccaagcctagcgcaaacaacagggcaatgtactagaccctcagactgatttcgactgatttttcgctgattggtacttaccgaggactcaccgagaattcaccgaggacgttcggcggcagccttgcgcgcgttggtggctacttgatcgatccgggcgagctccttggcttgttcgggggtctgatcggacgtatcgaacgtaccgtaacgacgagtcacggcggtttcgataaggaaatcgctgatggcggggtttttaggcagcaacgagccgtgcatgtaggtgccgatcacgttgtgcacgcgcgcgccctcggtatggtcttcgccattgttgcctcggccgtcctgatcgacggtgccgagtggctgaacgccttcgcgcaggaaggtctggccggagtggttctcgtagccaatcacatcgccgaactggtcggaatgctcaacaagattgccgatcatacgcacgttctggcccacggtataagcaccgataacgccgatgccatccagacgggtgccgtccacggtttcaaagtactcgccgaacagctggtacaggccgcagatcatcagcatcggcgtaccgtctgcggcaagcgagcgcagcaggtcggcgcgatggtagaagtcgtcgatgattttcttctggccggtgtcttggccgccgcctcccagaataaggtccacctggtcgggccaatcgtcgccttgattgtactggtggacgaccggttcgtaaccgtacagttccagccggcggcggatagtcagcacgttgccggaatcgccgtagatgttcatgtctttgggatacagggacaccacatcgattgttctggccatgtcacgttctccttgtcgatgtcttcccgctaaggggaagtcttattcctcaccatgtcctcctgcaggcgggaggtggcgcgcgggcgctagagggtggttacttgcccacgccagcgtcccgtacttcggtgatgcggcccagtacggcgcgggttttgagcatggcggtgtaggtgcagtagatgtgcttgcgtgtgccgggattggcgttgacgaatgcggtgaccgcctgttcgaggtcggtgttcgtatcggcgactggcacttggtcataccccaagcgcaatgccatgtcccaggcgcgcacaccggagaccatggcgacaccggacgcgcgtaaagaggtgaagtccacgtcccatagccagctcatgtcgcggccgtcggcatattcgtcgttgatggcgatcatggtgtccgcgttggccgggtcgaagctggcgagcgagaggcggaagcccatcgggttcttgaccagcagcagttcgaccggggaaccgttgacgtcgatgacctcgccacggccgaaagccggcgtgacgcgggaaacggcggcgatgagctcgtcggcggacacggcgcaggcgttggctgcggcagtggctttggatgcggcggcattgtcttgcatcaccgcacgtaccacggcgagcgcggcggccgcgttgtacaggttgtagacgccttcaagtttgacgtcggtggcgtagtcctggctgtccatctggaaggtggccttgtggtcgcccacggcggtaagtgtcacgtcggcggggagttctgccgtgcctgcggaagctcccctctccgaggggagctgtccgcgaagcggactgaggggagtactgactgaagggagcggcccggccataccttccaccgacacggtcgtggccatgtcgtcatcggacgggaaatagtggcgcaaatcgtcggcgaggccgaagtatcgcactgtggtgccagccggggccttcgcggcgagcgcggcgatacgcgggtcctcgcggttcagtaccacagtgccggtagtcgccgcagccacatggctgagcagtttggccgtggtgtcgatttcaccgaatcggtcaagctgatcgcgcatcacgttcagcagcaacgcataacggggcttgacctgcttgacgaagtggacggcgtacgcctcatcgagctcgagtacggcgatgtccgcgtccaatttgccgccgaaagtgacttcggtgagcagtgcggagaccacgccgcgcacgaagttcgagccggtcggattggtgaacaccttcaatcccagatcggagagcatcgaggcgaccatgcgggtggtggtggtcttgccgttcgtgccggacaccaataccacgccaagcggcaactgcccgagcgtacgggtcaggaagccggggtcaatcttttctacgactttgccgggcaaagccgaaccgccatgtttggtgacgcgggatgcaaaccgcacgaagcggcctgcggccacggtggcgaacgcataccacggtttgcgggtctgcaccacagacgattggtcttgcgaaacatcgcgtgaaacgttgcttgccatcatcacaccccctgattgctgttgtagtcctgcggcatgtccttgaatttggacgtggcaccgaggaaggcgaggtggaaggtttcggtcgggccgttacggtgcttggccatgatgatatcggcctcgccggggcggtcttccttgtcgtagaagtcagggcggtggaccaggaacaccacgtcggcgtcctgttcgattgagccggattcacgcaaatcggagagctgcggcttcttgtcgttacgcatttccgggccacggttcagctgggaaagggccacgaccggcacttcgagttccttggccaagagcttcagggcacgggagaattcggacacctcttgctgacgggattccacggccttgcccgaggtcatcagctgcaggtagtcgatgaccacgagtttcagatcgttggtctgcttcagacgacggcatttcgcacggatctccatgaggctcatgttcgggctgtcgtcaatgaacagtggcgcattctgcatcttggtccagaactggttcagggtgttccagcgttcgggggtgatgtcgtcggcgcggcgcagggcggccatcggaatattggtttcggcggagataatacgctgagcgagctccaccttgctcatctccaagctgaagaccacggaagtcatgttgtggtgcaacgcggcggcgcgggcgaagtcgatgccgagcgtggacttacccatggccggacgtcctgcgacgacgaccatctgtccgggctgcaggccctgggtcacgtcgtcgatgtcgcggaatccggtcggcacgcccttgttgacgagaccctgctgcagtttgtccagctggtcgagcgcgtcgtggaccaccgggccgatggcggcatagtcctgacgcaccttgcccatcgacatctcgtagatctcggactgggcgaggttaaccacatcctcagcctgcgatccctcggcggaataaccgagctgggcgattttggtgccggcggcgatcacattgcgcaaaatggcccgctgatggacgatctccgcgtagtacatggcattggcggcggtcggtacggatgcgacgaggctgtgcagatagtccgcgccgccgaccttgtcgaggttgccatccgccaacagctggttggccacgagcaccacgtccaccggctggctggcggaaaacagatcaatgattgcgttgtagatcgtctggtgcttgggctggtagaaatcggtgacgtcaatggtctgcgaaacttcgccgatggcatccttactcatcagcatgccgccgagcacggccatttccgcgtcgtcatcgtgcgggggcacgcggtcgaaaatcgggtcgccagctgccgccgcctgcgcgccgccccggcccgcgcggtcgccacgatcgccacgatccgagccactgccgaacccattctgatacgagtgttcacttccttctgccatagccctcaagtataggaggtggcgtggcgagcggaagatatcgcacgactacgttcattaggtcgattcctcactcattaggtcactgtgcttggtaacaccacaaaccatgcgcttggaatggcggcattctgaggcgctcgatcaatatctctcaaagtccaccgacctaatgaatgcacaatcgacctaatgaacgcatgaaagtgcaagtcgtgccgaatcatcgcgcaccaatttcatcgttggttcaccttgcggtcagcgcggcgacacgctgaagcgtcaaatgtggatagaaaaaatagttatccacattttggggataagtctggggataatccactcatttatccacatattggggataacttggtggacaagctgaggataactttgtacggctgcactaggtgcttgcgcaacgtagctaagcatgatatgcgtgtgagcgtgcatagcaactccaccagcattcatcgccaaatcattgcgttggcgctaccgacttttgggcagctcatcgcagaaccgacttttatccttattgacaccgccatcgtcggtcacattggcgatgccgctttggccggactgtccatcggatcgaccatcatcctcacggcagtcggactatgcatattcctggcctactcgaccactgcgcaggtggcgcatctgctgggagcgggtcgtcgtcgcgagggactgcaggcaggcattgacggcctgtggctggccttgagcatcggcaccgtactgggattgggattgttcgcggctgccgagccattatgccgggcactgggcggtcagggcgaagtattggaacaagccgtgacctatacgcgcgcaatcgtgctgggtgcgccaggcatgctgatggtatatgcggcgaacggcattttccgaggattgcagaagattcgtatcacgctgatcgctgcggtgggcggcgcggtggtgaacacggcgcttgatgtgttgttcgttattgtgctgaattggggcattgccggctccggagtggcgacgctgatagctcagtggttcatggggctgttcctggtaatccccgccattctgtggtcccgggcggacggtgcgagtctgcggcctcgtttggccggtattgcggcagccgggggcgacggactgccattgttcattcgtacactggcgattcgcgcggcgatggtgaccacggtcgcctgtgccgcgcgcatgggtactgccgtgttggccgggtttcaggccgtgaactcctcttggaattttgcgatgaacatgctggattccgtgggcatcgccggccagacgctggtggccacaacgctgggcgctggcagcgtgcagcaggcgcggcggttgacgcgggcgaccgggcgtgtggggctggtcaccggcgcggtaatcggcacggcttttgctgtagtcggcctgttcgccgggcacttcttctcccctacgccaaatattcagacgttgattgccgttggcatggtgacgatgggcatcttcttcccactgcaaggctggatgatggcaatcgacggcattcttatcggcgcgcgcgactaccgctatctggcaggcacctgcacgctgaccgccgtggtgtatgtgacgctcatactcatactggccaatatggtgacgccggcgctgacgagcgacctgatgcgtaccgccgtgctctgggccgcgttcaacgtggtgctcatgggcgggcgcggcctgtccaacgggctgcgcgtgcgctcggacgcatggatgaagtaggtatcggccgcgcgaagtgctgggcgattccgtttacatcgcggcgcgagcggcggaatacatgccgcgcacgatttgttcgcgccacttggaccagccgtattgcttggtgatggtctcaccggcggtggcaccgagcgaggagccgtcggcccgggtcaggtcgaacagcatatccaacagcatcttgtcgtggtgcaagcggtcggccaactcctccgccacggccggatcataggggtccttacccgtggcaaattcggatagggtcaaatgctcacgcaccagcacggtggcccagtcgacgatgtccggcgcgtagcccatacgcttgagaatcaccggcacatggcgggcaccctcggcggcgtgatcggccacgaacgcgcgcttgccgatgtcatgggtaataccggccaacagcaacgccttgaaatgatcgtcatcataccgtcccccggacggtgtctcacgacccagacgcgacgtgacctccaccatatgccgatcgatggtgtaccggtgggcggccgaggcggacggacggttgcggacgccgagccattccggcatccatcgaccgggaatatccacgaaatcgatgctctcccacacttccataagattcgatccgcacgcaagcagacgaataaacagctcgcgcgattcgtcatcccactggttgtcgtgaatcgggcagtgcttcagattagccaaggtagacgggttgatgggcaaaccgaattcgccggccgccacggccatacgcaacgccagcttggcatccttggcaggctcggcaccgggtgccaacaccaattcgccttcgtgcttggccacgccgggagccaccacgtcgaattgcggggcttcacgcttgccgccagagcgctgagagaacatctggaagaacgcgaatcgcggcttttcgtgggtcagcgaatgtccagcgcgggatgcggtggaatcaagcgagaaggagatgcgccggccgatacgggcaagcagcgtctgcaaatcgtcgatcgagtaggcggcacgctcgttttcgggccaagtcggatcggcaaggccaagcatggcagccactttggcctgatagggcgtcagcatcaggttggtatccttgccggccaccagatggatgcagtcgcgtacgtcgagcagacgttccacggcttcgtcgtagatgccgtgcgggcggtcggccagccatgagacggcgagcgcggagacgagcaccgaatcgcgcaaacccccacgggcctccttgatatcgggctgattgacgtattggagccggccgaattcgtcgagtcgggctttggcagagtcgagcagttcgggcaggcgcttgcgggcggccttgcgccagcgttcgaggatggatgtggcggtggtggtaatcagagcagtgtcgccggcgatgggcttcacgtccagccagcccatggcggcgggaaggtcatggtcggtgacttcctcgcattgggcgcgcgtgcggatggagtggtcgaggtccagaccgctgtcccatagcgggtaccagagtttgttggccaactcgttgagctgctggtcgttcaacgtgcgaggctcgtagatgatgaccaagtcgaggtcggagctggggcccagttgaccacgtgccagcgagcctaccgcggcgaagccgatgccggagtcgggcacggggaaagagacatccttgcaggccgcattccacagctccgtgaggcattgcatggccagttccgtgcgggctttacgcttggtcgcaccattccggtagacaccatcgtcatccggctggctcatatccatgaatcgttgtttcaagccatctactgctgaagtcattgcttcatctttcattgccaaaaaggtccccgcacggcgtcaattcgcggcgtgcggggacctttcccatgcagtccatcccctgctaggcatggacgtctgtgttatcagatcgcggcggaaccggtctcaccggtacgcacgcgggccacggagtccagcggagcgacccacaccttgccgtcaccgatggtgccggtgccggcggacttgatgatcacaccgaccagcgtctcggcatccgcgtcatcggacagcacttcaacgcgaatcttcggaatcaggtccacggtgtactcagcgccacggtagacctcggtgtggccgcgctgacggccgtagccgttggcctcggacacggtcagaccgtgcactccggcggccgcgagggcctccttgacgtcgtcgagcttatggggctggataatagcggtgatgagcttcatctcacctcacctccttgagaacagagctggcagtaccagcaaaatcgtaagcacgttcgccctggtcggcaagatcgatgccgccgacttcctgagcttcggtgacgcgccaaccgatggtcttctccagggcgaaggcgatgatcgcggggatcaccgcggagtagaggatggcgacgagagcgatgaccagctgaacgacgagctgcttccagtcgccaccagccagcagaccagtgccttcaccgaagaagccgatgaggacagtgccggtgaaaccaccaacgccatgcacgccgacgacgtcgagggagtcatcgtaaccgaacttgaacttgagaccgcaggccaggcaggtcagaacaccagcgatggcgcccatcacgatggcccacagcggggaaaccacatcggcggccggggtgatggcaaccaggccggcgaccatacccgaggcggcacccatagcggtgtagtggccggagcgaatcttctcggtgaagccccaggagagcatggcagcggcagtggcggcggaagtggagacccaagcgtagccagcggtgccgttggcagcgaaggcggaaccagcgttgaagccgaaccagccgaaccacagcaggaaggcgccgagcatcacgaacggcacgttgtgcgggcggaacggctgcgtgccgaagcccttacgcttgccgatgatgagcacgataatcagggcggcgactgcggcgttgatgtgcaccacggtaccacctgcgaaatcgtgggcggccgcgccgatggccttggagatggcgccgtcagcagacagcagaccaccgttccagaccatgtgggccataggagcgtagtcgaaggtaacccacagcgccacgaagatcatccaggtgctgtacttcacacgctcggcaatggcgccgcagatcaggccgacggtaatcatcgcgaaagcgacctggaaggcaacgtccacggaaaccgggtagttgttgtcgttcagaccggtggcggtgaacacgccgtcctgcgcgaccatggaatccttgagcaggaagccgctggccgggtcgccgaaaataccgccgatgtcggaaccggcgtatgcgatggaccaaccccacaaagtccaaataatcatggtgaccgacagcgcggccgcctcaagcatcagcatgttcagaacggccttggcacgaaccataccgccgtagaagaacgccacaccaggcgtcatgaggaaaaccaaggacgcggatgtcaggatccatgcggtgttaccggaatcaatcgctcccatgtctacctccctctctttcgttcagggcaccgggggctttgtgcggccggcgtcttatttgtctctacaatgccgtcccccttatgggggctaacagtttgtcagttaaagccggtctcgttttggtttcgttacgccaagttacgcgattgttaagcgtggctggaagcgtacgtgcgaccactcgaggaaattttggcgcgattccaacggatatgacgaagccccgaccatgtttcgagcatgattcggggcttggtttataggtaagtcgcgcgttttgcgctctcacaacgtggacgttggcttacgcgagaatgccgtccacgaaaccttcaggatcgaaaggtgccaaatcgtccggaccttcgcccagaccgacgagcttgaccggcacgccgagctccttctgcacgctgatcacgatgccgcccttggcggaaccgtcaagcttggagagcaccacaccggtaatgccgatggcttcggcgaacaccttggcctgggccatgccgttttggccggtggtggcgtcgagcacgagcagcacctcgtccaccggcaggttcttttcggtgacgcggcgaatcttgccgagctcgtccatcaggttcgacttgttctgcagtcggccggcggtgtcgatgatgagcacgtccgcgttcgcttccttggccttggcggatgcctcgaaggcgacggatgccgggtcggcaccgtccttgtcggaacgcacgaccggaacgccgaccttggcgccccaggtttccaactggtcggcggccgccgcgcggaaggtatcggcggcgcccagcatgacctgcttgccttcggaaacaagcaggcgggaaagcttgcccgcggtggtggttttgccggtgccgttcacaccgaccatgatgacgacgctcggcttgttcgcgccgtccttgtcggcgttgagccggcggtcgatgtcagtgccgacgagcttgagcagtttgtctttcagcgccgcgcgcacttcggccggatcggactggcctgcgattcgggcgtcgttgcgtagttcctcgacgagctgttcgctggcttccgcgccaacatcggcgagcagaagggtgtcttcgacgtcttcccaatcggcttcggagagctgatccttcgcaagaatgttgaacagggccttgccgaacggattgccggatttcgacagccgcgccttaagacgctgcatgcgtgtgccggcggattcgggggtgtcacgaaccggttcgggcttggcttcggtggctggtgcaggagccgccgtttcggaagaggaagcttgagctgaggacttctgctgactttcagccggagctttttcagctgcatcaacattggaatcaacggacggcttcaccgtggaagaatcagatgcggccgactccgcttccgcagcaagacgggcgtcggccttggctttcgcggcttcggtggacttggccacggcagccttgcggctcttgccgaaccaccatccgccgatcaccagaattgccgcgatgacggcgacggcgacaatcgcaataatcacattcgtatccatggctccagcctaagaagcgcaacggacacaccggctccgccccgcggacgcaccacgaatgtccgattcgccagggggataaggtgctctgccatgcaaggcatcgataatgcgatcttgacttcgatacatctggtgacgtttttatagatcatgaagagtgattcttttgtcttccgctgtctgctttgaaggactgcttcctttctttagggaatttgcgtagcgaatcagactcctcgcgatgaggaagaccagaacgaatacggcgattacgcctaggatctcaatcaataatgcaatccatgtccagctcatgattcatcctttctctttctgtactcgtctatgagtattcgagccgtgtcgacgtcgtatctatcgtcaatggcgagactcttcaccaagaggatgaatggatcctccgtatcgttgtcgttcaaccgtattttttcgataagcctgtcaagccggatcctcatggtcgggtaggagacttgatacagctgggacatttgcttcagagatcctgacgatagcacgaagttcttgatgaaggccaaatcctcc

SEQ ID NO: 3254 - DNA, 4032 bp, Unknown
  R53_2m  MAG No. k141_8216
tccggacgggatgaaaattgaatattcctgcgtagctcagttggcagagcatccgactgttaatcggacggtcactggttcaagcccagtcgcaggagccatcgaaagcctcggctctccgaggcttttttattttcatcgcattggtgaccagacacgacaccccatcatcaaccgggaaatccatggcgaagacctcaccactactcacatcaggcagacaggtcactgtcaattcaccgatgagaggcacagtattcccagtatcagtttgggaataccgtgcaaatcttacatcgagaccttggtcaggggcatggcggagtcgatcgggaagtcgggggcgctgggggccacgccggcttcgaccaggttcacgccgagcatggcgaccatggcaccgttgtcggtgcagagcttgatttgcgggatacggacgtcgacgccgtagttctcgccgaattcgagcagtttggcgcgcagctgcgagttggcggagaagccgccgcccacgatcagcgtgttggaatcgtactgccggcagccgcgcatggacttacgggctagcacggtggccacggagtcggccagggatgcgcacacgtcgtccaccggaatctcatggccggcggcctgctcgctttccacccaacgggccacggcggtcttgacaccggagaaactgaaatcatacgggtgcgcggcaccggccttgccttgggtcagacccatcggcaccttgatggcgtgcgggtcgccgttctgtccgtggcggtcgatgtgcgggccgcccggatacgggaagccgagcagacgggcgactttgtcgaagcactcccccgccgcgtcatccagcgtggtgcccaccacatcgatcttgcgcggcatgtcctccacatgcagcagcgaggtgtggccgccggagacaatcagagccagcgtgtccttggggaacgggccgaactgcagctgagtgacggcgatgtgcccgatcacatggttgatgccgtaaatcggcttgttcgcagcccaggccagcgccttggcgccggacacgcccacggccaggcaaccggccagtccaggaccggcggacacggcgatggcgtccacgtccgccaacgtcatgttcgcgtcggcgagcgccttggacacgcatggcacgaaggcctcagcgtgcgcacgggaggcgatttcggggatcacgccgccgtatcgcgcgtgttcctccatggatgaggccacgacgttggagagcagttcgcggccgcgtacgatggcagccgcggtttcgtcgcaggtggattcaatgcccagtacaaccggttcgctcatcgtgcttctccgttcttctccgtttgcttgccagtgatgtcttcagtgtccgccgatgccgtctgcggggcggcaaagcccacgaccctaggtttcaggtccaagctcatggtgtatgcgtcgatgccttcaggctggtagtagcgtttgcgcaatccaatgcgttcgaatccgaaccggtgatacagggccagcgcagggtcgttatccacacgcacttcgagcagcatgcgcgaggcgccctgacgcttcgcctcgtcgaccagtgcctgaagcaacgcagcggcgatgccttgccgctggtatgccttgcccacgccgatggtcatgagctcggcgtcctcgccgtcataccagaagccggcgtagccgcggacaaccgcctgttccacctctcccagcacatccagcagatacgtgcgggccggtgcgtccagttcctcgcgcaccatgttcgcattccatgcgccgcggccgaacagttcgccttccaactgtgcgatggagcgaaccgcaagatcacgacttacggcagtgatgtcaacaatcatcgaatcaacccgtctcacgccttatcggcgccggcatggccgagcacgtgcttcagcgggttcggcacttcggcgtccggccggcgcaggtacaacggttcgaccggcgtatcgggattacggttggcaaccagttccgcatcagtggcaaagatagcgagaccttgctccccttggtccaatacggattcatcggtgatgtcgccaagctgctcgattgcacccagcgcatccgcatatttgcgggccccatgacccacaacatccacgaccacatccacattgctgtcttctggcataagtccgtcgcggtacgtatgaacggcatcattcacgcgctgcgcgatggatgcagggtaatcgatatccatgtcaatcagagccgtcgccacggtttcgccatcgggatcgccaacgagcgggtccgagtacaacgcaaaatagagttgcttgcggcgtgcgtcgtttacggcaagagtgagcacatggcatttatgagtatcgccgagagtgccggctttgccacggcgaatgagattccattgcacctgagactcaagaacattatggccgataagcgtcgctcccgttgcgaaagccagtgccttggccgtaacgataccggcacgcagaccagtaaagggggctggaccggtacccacaatgactgttgcaatgtcagatgctgggaacccggcctcctcgaccgcgcgcgcgatattgacctgcagtttctccacatgggtgcgcgaatcggtctctacaatgggatcgcgccccacaatgccgaccgtcgagccgaatgaggtgtcaatcaccaacgtgcaacccatgaatcctcctagtcgtaaagcctctagagagtgtacatcgaggagtctataggcgcatggcttactgcagatcgaacgcggcccatcgcttgccgactgggacgaatgcgacggtacgagtgccgttgctggtgagttcgccgtctgatccagcggatgcggcatcggaggaatcgagaggtcgatcgatatggatttcaagtcgttctggcgccaaggctgtggccatttgttcgccccactccataagcaccaccgtgttctcgccggggtcttcaagttcttcgtccaatcccagcgattccagctcgtccaacaaacgcccgatggcgtcctgccccggcgcataggctgagccgcccagacggtaggcatccacatgcaccagatgagacggagtgccgtcggcgaaatgcccgtcgagttcgcgggcaatggtgaatgtaggagacacgatgggttcggtaatgcccagccccgccccgaagccctgggcgaatgtggttttaccggcaccaagagggcctgagagcagcaatacatcgccgccgtgtaccattccggccacacgacggccgagctcctgcatggcctcgctggtgggagccgcaatagtgtgttcgctcataaatacccctttatcgacttttaccgacctttatgactgatgtcttcaatgcagcgttccagcgcatataccgggtcgccaccgtttgttttgctttgctcatccgcccaggcgagcatacggatgcaatgcgcgagtcctgccgaagtccagccgccaagttggcgcatcgcattcttcagcacccaaggattggttttcgcttcggcctgggaaatcgtgccggcccgtaccgccgaggctttggcaatggtacggagcttcatggccaacgcgccgatcagcgcgatgggatcggtcccttgttccacagctgcacgcatcatgacgatggcttctgcggttttgccttccacggccttgtctgccacggcaaaaccggtgacctgcggattggcggtcaaatactggttgacacggtcgaggcccatcggattatcgtcaaagtcgaaacacagttgctcgcacatggcggcgagttcgccggttttgccgccgagtacggataccagctgctgtgcggccatcggttcgactctacgaccacgtttctcgaattctccgagcacgaaattgagctgtgcatccggtttcttcaaatccggcacgtcctctttgcgagcgccggctttcaccagttggtcgatgattttgcgccctttgacgccgccctcgtgctggcaga

SEQ ID NO: 3255 - DNA, 36264 bp, Unknown
  R53_2m  MAG No. k141_8585
ggcatcgtctgcctgatcgccggctttgcgtacggtccggccgccgccgcaatcgtgtctgtgctcggctttgtgccgcacatgttcgccgacccgtggggttcgctgatggctgtgctggtggcgctgttcctgtctgtgccggccgcgttcatctaccgtaagatccgtacgcgcaagggtgccgccatcggcattctggtgggtgcggtgctggccatcgtggtggcgctggtgggcaacctcatcatcacgccgatttacgcgcacatgccctaccaggctgtggccgcgatgattctgccgattctgctgccgttcaacgtggctaagatggcgattcacgccgtgatcaccttcctgatctacaagccggtctccaacctgctgtccaagcagcagtgaccggcctgagacgggcctatgcccgccacgactaacgaccactcaacgaccactcaaagaacaagaacgcagaactccggcccttgccgggattctgcgttttcgcctatcagttacggattgctgtttcatgaccgttgcaccccattccttcgacgccgacgagttccacgattccgccgagcccgctccccccgccgccgtactcaaggacattcgtttcagctatgaccgcggcacttcatgggctttggatggcgtttcgctcacggtccatgccggcgagcgcctatgcttggtcggtccgaatggatcgggcaagtccacgttggcccgtctaattgcgggattgaccgcgccggacggtggcgaagtgacgctactggaacagcgcgtgtacgcagccggcccgaatgccgacgcctatcgcgctgcccgccgcggcatcggtatggtgtttcagaatcccgaggatcagctggtcaccaccgtgttggaggatgacgtggcttttggcccggagaatctcgggctggagcgcgggctcatcggcgagcgcatcgttgattcattgcaggccgtggggttggcgaacttgcgtcagtccgacccgacccgtatgagcggcggacagcagcagcgcgccgccatcgccggcatgctggccatgaacccggcgatgctggtattggacgaaccgaccgccatgctggacgaatccgcacgcgccgaagttatgcgcattttggatgatttgcaggcgcgcggcaccactattgtgcatgtcacgcatcatccggatgagaccgttcatgccgatcgcatcgtgcacatggaggccgggcgaatcgttggtgtcactgcagccgccgataatcgacccccgctagcggaggctgtctcgcaaagcgagaccgagggtggtatcggcacagaagccgcccccagtcgtcctacgaacgacagcccccgccagcggaagcgcgaagacggctccgaactgccgctgctctccgacggcatcggtgatatgacgaaccccatcattcgcgtctcgcatctgacctatcgctatccttcggccaaacgggcggttatcgatgacctgtcgttcaccatcgcgcgcggtgaaaccgtggcactgatgggcgtgaacggttcgggcaagtcgacgctggtgcgcatgctgtgcgcgctggccgcgccgaccgccggcagcatcgaggtggccggcgttccggtggcctcgaccggcaaacgcggtagcaacgcacggccgaagccggcgaatcgcaggcaattggcgcaattgcgccggcatgtgggttacgtgatgcagcatccggagcaccagctgttcgcggacacggtggccgaggacgtggcgtacggcccgcgcaaccaggggctcgccgaggccgaggtggccgaccgtgtgcgcgaatcactggacctgctgcatatcgggcatcttgccgaccgctcccctttcgacctgtccggcggacagcagcgattggtggccatcgccggcgtgctggcctgcaatcctgacgtgcttatcatggacgagccgaccgcgagcctggacgtccaggccaaggagcgcatccatgagctgttgcgcacgctcaaatcgcgcggcgtgaccgtgctcatcatcacccatgaccgagcggaggccaagcatatcgccgatcgcgtggtacgtatgccgattgccggcgcggctggtgctgagagcatctcggcaaccgagactgccttccccgccgagtccgtctcccctgacaaacccgcgcactcggtgatccaccgacttgacccgcgcgtgaagatggtgggcttcctggccgccatgttcacgatgttcgcggtgaacacacccctccagcttgcgctgggcatcgccatcaccctggccgttatcgcggcggcacgcctgaacccgttacgggtgctcgaatccattcatccgattctgattctgctggtgctgatgggcgtggtcaatctgtttgtggtgcgcaccggcacgccggtggtggcgctgggcccgctgagcatcaccgatcagggcgtggccatagccgtgctgtacgcctgccgtttcgcgttggtgatcatcttgggcgcggtgttcctcaccaccaccacgccgaccgccatgaccgacgccttcgccaccctgatcagcccgctcaaccggctcggcatccacgcccaggagatcgcgttggtcatgagtctggcattgcgattcattccaacgctgaccgacgagacccgtgccatcgtcgatgcccaatccgcgcgtggcggttccatcgaaaccggttcgctggcccagcgtatcaaggcgatgagcgcgattatcgtgccgattttcgccggcacgttgcgtcacgcggacaacctgagcctcgcacttgacgcccgctgctacgaggagagcatccgccgcacccactggcgtgccctgaccatcgccgcgcaagatctcgtgttcgccgtcgccgtcatcgcctacatcgccgccatcatcgcgctgtagggcggcaaacagcgcagacagcaccggttgctatgctggtgtggttatacgaaagatgtaaggaaattcccatggcattgaccaagaagcaaatcaagcagctgcgcgcgatggcaaactcgctgaagcccctgttctatgtgggcaagaacgatttgaccgagtcggccgtcaatcaggccgatgaaaccattgagaagcacgagctcatcaagtgcgccgtgcaggacggttctggcctgaccgccaaggaagccgccgccgagcttgccgagcagctgaacgccgaagtggtgcagtccatcggcaatcgtttcgtgctgttccgtcgctcccggcgcgacgatgtggagcatatccgcttggtgcgcgagtagcgttcgctctgctcgatcccgtagcttgatatgagtaatggcggttggaatcagttcgattccaaccgccattattcatattcgcccagcgagcaccgtcactgatccaagatggacccgacgattcccgcaacaatggtcagaaccaaggaccccagtaccgaccaccagaaaccgtgtacgaagacgcccacgccgaacagactgaccgccagccagctggcgagtcgcatgaacagccaattgataatcaaggtgaccagcccgagagacagaatcgcaaacggcagtgcgatcagatgcacaatcggcttgattgacgcattaatcagcgccatgaacaaagcgaacgcggcgatgccgagaatcggaggctcccccaccggggtcatgccgggagtcaccgcgaccatgacggcggcggcgatagtcataatcaaccagctggtcaggaaacttttcatggcccaatcgtagcgcggcaggttttactattaggcaaaacatgagatgatgttgtgcagaaacggtaagaaggtactgccgttcccgattgagaagggatagacccacatgactgataatcaacaacaaccgtacggttcggacagtgttccgcagccggcacaacctgcacagccggcacagccgtcgtacggccaagatgccgcacggcagccgcagggctatggcgccccacagcccgccgcatacgctcaacccgccgccggaagctacggccagcagcagccgcaatacggccagcccgccggcgcatacgctcagtctcagtacgctcagccgcagtatggccagccgcagtatggccagcccgcacagcccgcagcgggctacggccagcagcccggctatggacaggcctaccagcagccgaatgcctacgcacagccgcaatacaccgccgctccgtatgccgccgccccggtgtggcaatcatccaagtccaagttggctgccggcctgttgggcatcttcctcggcggacttggtgtgcacaacttctatctcggcaacaccggcaaggccgtggcccagctgctgctgacgcttgtcggctggattctgctcggacttggcccaatcgcagccgccatctggggctttgttgaaggcatcatcattctgtgcagcaagcccggctcgccgtggcataaagacgccaacggctacgaactatcagactgagactgacctcgggccacgttcattggacctctgatcaaccacgcctctgcaggtatcatctcgatgccgcagtcgtagcgggatgcgacacgccggccgtgtacatgagttcatgtacacccgatacaggcgaatcagtatcgcacgagattcaacagttcctgctgtttggcatagcgggaaacgttggtcagggcgatgcggatgatgtgttcggaagtcttttccaaatgattgccgccggccacatgcggggtgatcaggcaatgcggctcatcccacaacggactttccgccggcaacggctcaggctcagtgacgtccaatccggcaccgtggagccgtccattgtgcaaggcgtcggccaaggcctcgggatcgatggcgtcgccacgcccggcattgatcacgatggctgtggatttcagacgccccagacgatccgcattcagcagatgatgggtctgcggcgagcgcggcaccgccatcgccaccacgtccgccaatggcagcagtgcttccagccgctcgaagccatacatcttttcaatgcccttggcaggcacgtccacatgacggcgcacgccgaaggtacgcatacctatggattgggcaagctgagcgaaatgcgacccgatgtcgccgacgccgataatcagcgcgatgccaccttccgggctcaataccgggccttcatcccgccactgatgatcgtgctgattggaggcataccggttgaggttcttcatcaatgcccacatggtggcgaacatgtgttccgacacgctttggccatacgcgccgctcgcattggtgaccatggtgccgcgaggcagcacacccgggcggatgtacgcatccacaccggcgctgcaggtctgcaaccattcaagacgggtgtattgggaagcctgcgagaccggaaagttgccgatgactgcggtagctcgggagcgaagctcctcgggaacagcggccgaccagaccatgtcgccgcggtgcgcttcgtcgcccacgaattcctgcggcacatcgcgggccgccttggcgaaagcgcgccgttctccttcgttgagtggcaggcagttgacaatcagcttatgcgtgttctcaatacccatggttcaccaaactaggcggcagggcggatattatcgcgtgtttcctcatgctgaaccaatgccgaacccgccccgccggaccaatgccgaacccgctccatcaaaccccaccaaaccaagggacagcccattgcgcatcgaccgtagcgtccgccccgaaccgtacactcacaggtggttttgtgattccatagcgtgcagccaaggcagtacgattgccggtttatccgcacgcacaggtacctacgccggttggtaaaccttacattccatacattgcaaccgaacgtttaggagcatgtatgcctgagcagcatattgataacgagaagattcccacacgtcttatcggcgcgattgtggctgtcggctcacttgccttcattggcattctgaccgaaaccgtgatgaccgtgcttttccccgcactgatgcgcgaattccatgtcgacacggccactgtgcaatggattaccacgatttatctgttggcggtggccgctaccatgcccatcagctcgtttttgaagcgccgattcgcactgaaaaccatttttcttgcggctgtgattctggccatcgttggctcgctgatcatgatcgtcgcccaagccttcccgctgctgattgtcgcccgcattattcagggcattggctcaggcgtggccacgccgttgatgatcaacatcattctggagcagtctcctcgttcgaagatcggccgattgatgggcgtaggatcgctggtcattaccgtggctccggccatcggcccgaccgtcggcggcgcggtgaccacagtgctgccgtggcgcgcgattttcgtcatcgccattccgctggtgctaatcgcagcatgcatcggcatgaagtgcattgagcagaagacaccgaccgaggctgcctatcttgacccgattcagcttgggtccattgttgtcgcgttggtcggtctggtgctggcgctcaaccaaggtggcgtggccatcagtgcggcggtgtccggcaagtcagccacacgctccggcattatcgccattgtcagtctgattgtgggcctcgccttgttgatcgtgttcgccatgagttccaagcgtgccttctccccgctgctgcgccttggcattctcaaggatcccgccgtactgttacacgcctgcgcatatctgctgctgccattggtcgccatcggctacggctatgtcatcaccaatgtggcacagctctcgctcggcaccacggcatttgtggccggctctctggtgctgcccggagcactggtcggcgccgtctgtgccccgcttggcggctggttctacgataagttcggcgcggtcaagccgattctgattccgatcggcatcgctattttgggcccagtgcttatgctggtgttctcgatgcagcttacgcccgtgctgctcgccggattctatttcattttcggtctgttctattccatcggcaatgcgaatgtgatgaccagtggcctgtcggaggtctctcccgagttcaagccggacggcaacgccattttcaacacgtgtcttcagtttggcggcgctgccggtaccgcactgttctccacgattctttccgtggctcaggccggcgcaggagaagaaggcaccgctgagtttgctcacgccactgccgtcggcggcacatggacgtttgccacgatgacggttatctgccttattggctggtgctgtctggccaccgcgttccgcattcgcgcggcacgtaagcgtgcataaatccgatcatcaatagagtcccccaaccacagggggggcgtgcccccgggagaccccccgggggcacgccccacacgctaatgaaaggaagaaaaggagaaagaaagctttggcgggcagtgccggctgctgtgaccttgccatcacagcagccgggctgatcccgcctattcagttatggtgtgtgtcgtattcggtgcggagaccgagcgggcaagcccgctattttttatctccgccgaccgccatcaccgcgcgctgaagcacaacgaagacgaggatcatgagaccgataacgatggtggtccattcggccggcacaccgaagtcagaggtgagcggatcgaggatggagcggaccagagagccgagcacggagccgagcacgtagccgaagccaccggtgatgatcgtaccgccgatgaccacggaggcaacggcgtcgagctcccagccaatacccacagtgttcttggcagagccgatgtttgcggtgtacacgatcgaggccagggcggcgagagtcgcagaggtcaagtagatgatgtactgcgtgcgcttgaccggcagacccataagttccgcggaggaacgggagccgccgatggcgtagatggtgcgtccggtgcgggtatggtgcaggaagacgtagccgaagaccacaaccaccagtgcgatgatcacgccgacgttgaaggacagatcgttggagatcttcggattgtcgatgatcttgatctcgttggagatgaacgagaagtcattgccctgcgggaaggtcagcgagtcggtggagatgatggaggcaagaccacgggccaggaacatcgtcgacagggtcgcgatgaacggctgcatgttgaattcctcgatcaaggtgccggccagcaggccgaacacagcgccgatgagcagcatgatgatcatgaccaggaaggcgggcacgccggcgttcgccagcttcaggccgacgactgcggtgatggccacgatagcaccgacagacaaatcgataccaccggtcagaatcggcagggtcatggccacagccagaataatcaggtaggcgtggtcaatgaacagggaggagatgaagcccagtcgaatgtaggtgccgaacaacgcctgacccatgatgatcatcaggatgaagatcaccacggccgcgagggtcgggatcatctgacgatcgagcttgaagcccttcttgggagccttcactttgtttgccgtagctgttgtcatgctgccaccgccttagcttgagccttgagcgcgcgcttgcgtttcatattcgcgctcaggttgtgaatcttcggagcctgcatcacgcagatcacaatcacaacgacggcgaagaaggccggagttgcctcggcgttgacgcccagggtgatgatggtcttgcggatcatggcgataattacagcaccgacagcagagccggcgagggagaacttaccacccagcagtgaagtaccgccgatgacgactgccagaatggcgtacatttcgaggtcctgaccggtcttaaccacgtcgacacgcatcacggatgcggtggcgaacagaccagcgatggccgcgaggaagccggaaatcgcgtagacgaggaagaggatcttcttcggcttgataccggtcatacgggaggcttcctggttgatgcccacggcctcaatcatcatgcccatagcggtcttgcggcacagcaggccaacgagaatcacaatgataacggcgatgacgaagttggcgggaatgcccagaatgaagccgttggcgaaccacttcagcggttcgttgccagcaactgcggaggcgtcggtgttctcaccggaggtgatgaccttggccataccacggccggcgagcatcataatcagggtggtgatgaacggctgtaggcccaggaaggaaaccagagcgccgttgacgcagccaatggccagaccaacagccaaggcgatgaggatggagagccacacgttcatgccattggacagggtctgcatggcggcggcacctgccactgccataacggaaccgaccgaaaggtcgataccggcggtggagataaccaaggtcataccggttgcaatcatcaggtatcgggcagattcctggagcatggtgatcagcgggccggccagaccaccggtgttgctgttccagctcagagccaggaagtcatgctggaagatggtgcagatgatgaccagaagaatgaatgcgacgatcgaccaggtcaagttgctgctcagcagcttcttgacaaagttgttgccctcggcttttgccttttcagccatctcatgcctcctttccggtgtttacgttggtgttagcgatggtttcgacgatggtcgcctgagagacggtgtcgtcgttttcgatttctgcgatcttgtggcggtccttgagaacctcgatgtcgtcggacagacgcacgacctcttcaagctcggaggagatgaagacaacgcccatgccctgagaagccaggtcaagcacgacctgctgaatttcagccttggcaccgatatcgataccacgggtcggctcgtccagaatcagcagctcggggtgcgtggccagccaacggccaatgagcaccttctgctggttgccgccggagagattcttgaccgggcgatccgggtcggcgggacgaacgttgagttccttcatgtacttgtcaacgatggcgtccgcttccttcttgggaatcggcttgaacataccgcgcgttgcctgcagggcgataaggatgttctggcggacggtcaggtcgccgatgatgccctcatcacgacggttttcggtggagtacgcgattttgttcttcaaagccgtgtacggatcggagatgttgaccttcttgccgttgagcgtgtaggtacccgaatccggcttgtcggcaccatacaggagtcgaccaagctcggtacgaccggagcccagcaggccagcgaagccaacgacctcacccttgtagatgtcaacatcaaccgggttgatggtgcccttcttgccgagacccttgacatcgacgatcggcttctcgccaggggtgatttcacggcgagccttcttggcaccaatctgggacagctcggcggcggacttaccaatcatcatgccgatgagttcgtcgcgcggggtgtccttggtcatgacctccttgatgaactggccgttacgcagaatggtcagacgatcggtaatctcataaatctgatcgaggaagtgggagacgaagaggatggccacgcccgagtcacgcaccttgcgcatgatcgcgaacaggtccctgacctcgttggcatccagcgaagaggtcggctcatcgagaatcagcaccttggcgttgataaccatagcgcgggcgatggcgaccagctgctgcatagcgatggagatggagctcagcggagtgtgcgggtcaatggattcgaggcccatctgtgccaaatacttcttggcggcctcgtgggtcttcttccagtcgatgccgaaggggccgcgcttttcgtggcccagcatcacgttctcaccgacggaaaggttggtgcacaggttcacttcctgatacacggtggcgataccggcgttttgtgcgtcgagggtgccgttgaactgctgaggcttgccgtccaccataatggagccggcgttgatcttgtacacaccggtcagagccttaatcatggtggacttgcctgcaccgttctcacccatcagggcgtgaacttcacccgggtagagagtcaaatcaacaccatccaaggccttgacgcccgggaattcaatcgtaatgcctttcattacgacgatggggtttttatctgtcatgtctttgccttaaacgagaatgagatgttatcgttttgtgatatttgagccacacatgagtgatggtgtggaaggaacatccttctcacaccatcacaccaattatttggtccagttatcaatgagtcgcagcagacttatcagtaggcgcgggtgttgttgtccagggcttccttggcggaggcggcgtcgaaggtcttggactcgatctcgatgtccttctcaacggtcttgccatccagatagtccttgacggcctgagcggtttccttaccgaagatcgggttgtactcgatcacgtaggagaggtcgccatcaacaagagcctgcagagcgttcttggtaccgtcgatggtgatgatcttgaccttgcccttgaggccggcggcgtcaacagcctgagcggcaccgaggcccatctcgtcgttctgagcgaagatgaactgcgggttgtcggacttgtacttgtcgagcagaccagcggtcacggtcttggcctcatcagtggaccagttagcggactgggactcaagaaccttgacgttggaggcaaccttgttgtcccaaccagtgccacgatccttcaccacggacaggccggcagggccttcgaggatgaagccgttggcgccatccgggaagttcttgttcacgaactcggcagcctgctcgccgcaccagacgttggacggtccgatgtgagcaacgatggccttcttggcctcggcgtccttgacgtccacgttacggtcaacggtgaagaccggaatctcagcctcagcggccttcttcagggagtcatcccaaccggaatcctcggtggaggacaggatgatggcgtcgacttcgtcgttaacgaacttgttgaacgcctgaatctgcttctgctgatcgttgttctgggtcggagagtaggtcaggtcaaagccggcatcctcgaatgcctgctgaatgtccttctcgttggcggtacggaagccgccctcagggcccacagcaacgaagccaaccgtcttcttgccggagtccgagctgccacctgcgttgctggaaccgcatgcggcaacgctgacaagcgcagcagcagaagcaacgagggcaatggccttcttccaattcttcataaatactcctcctcgagcagtgtttattttttggatgatcttccatcctgtttggtgactgttcgtcatcgacaatctctagtgtgacgctcacaggccaaatgttcaatcgcatgcgataacagtttgataacaggtttataacagtttgataacagtagttcaaaaaacggcttcacagcgccgttttgccttgtcattaagccataataagaggtggttgcacggcggcaatgccgctcgtcagccgagcgacaaagccgccgcatcacaacacaagaaaagttattatgaacaccgtttttcttataccatctactgcgcaccgagggcagtgacctggctatcggcgatggtccaggaaccgtcgagtgagccggaaacggagcgcacaatacccaaatcatccacaatggccaggcgacgagacaggctgatctgccccgatgccatcgacgttatgattccattgggtaaacgctgcgcattggccgggcctggtgccatttgacgccatgcctcttgttgttcgctgtttccctcaggaggtgtggtggcgtacaccagattcagatcattgtagaacgtgagcatggtgacgtgcctgagcacactcacttgggtggccgctttgctcagaccgctcagtgttttatcaccgttgcgcgccacaccggtcatcatcacgccgttcgtgtcctcgcccctgactgccaacgccaatcggcacccttccggagaaaccgccaatgccacaatgctgtcggcagcaccaagccaatcaagcttcagatcggtttccttgcccccatctgacacatgcaattcgcgcccgttctcggatacagcccatacttcgccatccagaccttcggtaatcgatcgcatcggctcgccggagaacatcaccccacaggacgcaccatcagatttcaggcattcgaccacgccgtccgcacgcaacaccgcgccgccggatgaggaaaaaacgaagccccgagcatcgtcatatccgggggcctcccctacacgcaacggactggagctggccagggaaacgatatgaccaccggtcagcgtgtatacgcccgctgtcggctgctcggtagtaagtttcacatttgcgtcggcatcggaatagtccactccatcgccggtaatcctcagcgcgtattcggcattgccgtcgcccatagtcagacggatgcgacgtaccagcaggcctcgttcttcctcgttcaacgcattgataccgctgttgaggtgtatctccaccacattgttcttcaccggcacgctgtcgaccgcgagtttgatggtagacaagccggcgcctcgcagcactccttccaaccaggagggtgcatccgagagcacttcaccgactgcctgggtgcgccagttgcgccagctcaaccaacgaatatccgggataagttgcttgccggaagtactcacctgatacacggatacttggcggaacacctgttcaaaatctgcggtggaaatcaccacgccgctttccaatgacgagatgcgccattggccgcttttcttcatcagcgtatagggaagcctgcgcgtttgggtgctgtttgacggcgtgtatacgccatgcgaatccaaggaacccaccacctgaagttccacttccacaatcagtgagctttccgcaccttgtggcgcgcttatggtgttggcgcgtcggcggaaatcaggggtgccgctgtataccagtgccgcagaatctccattccacccggcagaagccgagccagtcaggaattcgcgagccacgcgatagccatcggactgcacgccagcaggcatagcgtcatagaaccctttgacaatggtttccggctgtgcatcgtccgcaggcccctgaggattggtgtaaacacgctgggtctgctgttccaccggtgccagagtctgcaccgagccgctaatcggcaaaccgaacggacttgagcatgccgtcatcgtgatgcaacaggctatggccgcgcctgcggcggcaatcgttctggtcactcgtctcatagtggcctccccatcatcgtgtcgcggcgaacctcatgataatcatgtgtgacttggcttgtggccacaccaaacccaccggtaacacgcaggtcatccggcgtttcagaagcaaaattcaccggcagttcagcgtccgccacctcaccttggtcggggtcacgcggcagcaataccaagaaccaggtgccctcccccactgccgaacgtacacggatactaccgtggtgcagcaaggcatcagtcatggcgatggccaggcccaatccggtgccgccggtaacgcgtgaacgtgaaaggtcgcctctccagaatcgatcgaatacatgagcgactttgtcttcgtcgataccaacgccatagtcgcgaacgctgatggccacggctttgcggttggccgcgacgcgcacttcgatcggccggtcctcagcgaaatcgacggcattggccaacagatttctgacgatgcgaatcactcgacgcgaatcgatacgagtcaaaacctgcacattgggcagatacgtgtgaatcggcacccgtttggcttgggcgatgccgtcaacttggtccactgccgtttcaattggttcgcataaatcggtttccacaaggtcgagtgccgcataaccggcatcgtagcgggagatttccaacagatcggcgagcatgtcttggaatcgactgatctggccggccaacagttcgaccgtacgcttggtggaggggtcgaagccgtcttttttcatttcgagcaggtcggaagccatacgcatggtggtcaccggggtacgcaattcatgactgacgtcggacacaaatcgtttctggaaaacgcttgcttcctccagctcatcgatcttctggttgagcgcatcagccatcgtattgaaggattgctgcagcacaccaagctcatccttacgatccacggtaacgcgcatatcgagattgccggaggccagtgtttccgaggccgctgccactcgtccaatcgggcgcacgatgccacgaatcaccagccagattactacgcccaccacgatggacagcaacgcacagatgaccaccagactgagctgaatctgcgtcaaggactgctgctggaacgtgtacgaataaatggcgaagaattcgaggttgccggccacgccaaagtccaatacggtgccgagcaccgctgcgggcgtcccgctgcccggcatgccggaatcaccgggaatttcgaccggctgatagaacacgctgtcatccaagtcggaagccacggacgaacggatgtcgtcagaaatcagactttgatagctgggttcggtggatacggggatgatggcacgcgagttggtatcacgactccacaaatacacacctatcaggttggaggacccctcggattgcaacgaggacgccaagtcattgaccagctgttggatctgcactacggcggagacatcggccgcgtccagactggtttgggcctgctgcaccatgtttgaatagtcggcacgcgactgcgaagtgatttgggtaagcagcgaggcgcgcactgataccatcgatacgccagagaagacgatggccacggccagcgtaagaatcacggtgagggccacggtgcgggcctgcagtgagcgacgaacttcagcgcgtccgtggcgcagcaagcgtttgaggctgaatcgagggcgcaggttcattgttcaggagtgacgaacttgtagccgataccgcgtacggtctgcacgatttgcgggttctcggggtcgtcctccactttggccctaaggcgttgaacatgcacattgaccaggcgcgtatcgccggaattctcgtatccccagacattcttgagcaggctggaacgactgatggcctcgccggcggcggccgcaagcatgaacagcagctcgaattccatcggagtgagattcaggtccttgccatccttggtggcggtgtgttccaaacggtcgatgacgatgggtccgcgttccagatggttgacgtttgcattgccaccgcttgcgccaccggtggcaccgtcttcggcggccggcttggcgatgcggaagcgtgcacggatacgcgccagcagttcggctactttgaagggcttgggcacgtagtcgtcggcaccggcttccaagccggccacgacgtcaagtgtgtctgatttggcggtgagcatgataatcggcacattagaggtagctctgatgcggcgggccacctccgtgccgtccagcccggggagcataacgtcaagcagaatcaaatcgggcttgacgatggggaacatttccacagccctcagcccgtccaggcaggtcacagtctggaatccctcgttttccaaaacaagactaagcatttcgccgatggcctgatcatcgtccacgatgaagatggtcgccatggtgtttgcctcccctttttccactgttattgttgcgttacactttactcccctatgttcatttctgttcgggttccccaccatgcagtatcgggcgaatcttggcaagacgctggctgacttcgtgttcatagccgcgatcgttgggatggtagtactcggtgccacgcagctcttcgggcatatattcctgtggcgccacggcaccgggccaatcgtgcgcatacttgtagccctcgtggttgccccactctttcataagcttggtgggggcgttcctcaaatacagcggaacagcgccgatcttgccggtatccacgtccgcgagcgcctggttaatggcgttatagctggcatttgatttgggcgcggtggccacggcaatcgtggcttcggccaaaataatacgtgcctcgggcatgccgaccagcgccacggcctgcgccgcggccacggtgacctgcaaaatctgcggggcggccatgccgacttcctcgctggcggcaatcatgatgcgacgggcgatgaagcgcggatcttcacccgctttcagcatgcgcgccagataatggatggcggcatccggatcggagccccgcatggatttgatgaatgcggaaatcacgtcgtaatggtcatcgccgtctttgtcgtagcgcacggtggcggtgtccattaccgtagccacgatttcggaggtgatgatgggtcggcgtgcgccctttttgcgggcttcgtcgccggtgaccgcgccagccgcggcctccagaatcgtgagactcttgcgtgcgtcgccaccggccatgcgcacgatatcggcgatggcttcgtccgtggctttgacctcgtccctgagaccgcggtcatcagtcagcgcgcgctgcaccagttcggtgagctgatcaggctccaatgactcaagcttgacgaccaccgaacgggagagcaacggtttgatgatggaaaagctcgggttctcggtggtggcgccgataaaggtcacgtcgcggttttcgacggcgggaagcagcgcatcctgctgggatttggagaagcgatgcacctcgtcgatgaacagtacggtttcccggccgcgtgacacgagccgttcgtgagcgcgggtgagtacgtcgcgcacgtctttgacgccggaggtcacggcggagagttcctcaaacacgcggccggattggccggccacgatggtggcgagcgtggtcttgccgacgcctggagggccgaacaggattacggagctcggcgcggtgagactgcctttgctggccggattggcgaggcggcgcagcggcgagccctggcccaacacctgcgtttggccaatcacctcgtccaaagtgcgtggacgcatgcgcaccgccaacggccgtgtcatcgactccggcgcatcagccgccccaaacaaatcgttctcactcataacgtcctatagtaccccagtgttcgaacagacgttcgagctgcaccttggcttccctcagagaggggagccaggaatcagttactcaccttgtagtcgtggaagactacttcgccggtgtcttgggtggcgtcaaggtccacgatgccttcgatggcccagtcgtggtcgccatcggaatcatcgataatctgacgcaccttccacgtatgctcgtcgttctcgtgcttgtcatccaacatgaacagttcgggcgagcgcgcttcggcgccgatgcccacgtactcgtgctcgtcgtagtagtcgtcgagcacatcttcccattcgtgcacgccgtagccccagtccttgtcgagcgcgccgagcttgtccggctggtcaaggtccataagccgcacacggcggaacaaggcattgcgcaccagcacggtaagaccacgacggtcctcgaccaccgcgctttttgcgccgggcgcggccagggatgccgcagcctcggattggtcagccgagtcaccggcgttctcccattcgtccaccagcgaggagtcgatggagcgcacgagcacgcgcagccacgagatgatgtcttcgagttgctcgtcacgcttttcgggcggcacggtgcgcgccagcgtgcggtaggcgtccgagaggtagcgcaacagggtgccttcggagcgggcgatgttgtctcgggtgatgtatccggtgaagtcggaggcgggttccaccatgtcgcgcaccacggatttcggcgacagccagtagtcgttggcccacgggacatcgtggcggtactgatcgaacgcggcttcgagcatgtcttccagtggcttcggatacgtaatctcctgcagcttatccatacgctcgtcatagtcgagtccgtcggccttcatatcggccatcgccttgtctcgggcctgacgctcctgggcacgcagcacctgcttggggtcttcgagcgtggcctcggccatggagatcacgtccagcgcataggtgtcggactcggggtcgagcagttcgagcgcggccagcaggaacggggagagcggctggtcgagggcgaagtcgtccggcatatcaagggtcatgtagtagtccttgccgccgtccttgcggtcctcggtttcgatgacttcggtatcgaacagggtttggaagatctcgtcggcccgctggtgcagatgctccttctggtcgggggtctgcgcggaatcgtcgatgagatcgtcgatacgggcacgggcgtcaccgccctgcgccacttcattgagcaccatcgaatgcgtgattttcaggtgcgggaccagggtctccggttcagcgtcgatgagcttatcaaacgtgctctggttccaggtcacaaaaccttccggcgccttcttgcgcttgaccttcttgagtttcttcggatctcccccggccttggcgatggctttctggttttcgatttcatattcgggagcctcggcgatcaccagtccctcggtatcgaatcccatacggccagctcgtccggcaatctggtggaattcgcgggcgcgcaggcggcgcatcttggtgccgtcgaacttggtcagggccgtgagcaccacggagtgaatcggcacattgatgccgacgcccaatgtatcggtgccgcaaatcaccggcagcagaccctgctgggcgagctgttcgaccaggcggcggtagcgaggcagcatgccggcatgatggatgccgacaccggtgcgcagcagtcgctgcagaatcttgccgaaggctgtggtgaacttgacgcctttgatggcttctgcgatggcttggcgctgttccttgctggatacaccggtggaggcgagcgcttgcgcggtctccaatgcggcgtcctgcgaaaagtggaccacgtaaatcggggtttcgccgttacggaaggcgagttccacggttttttccatcgggtcgagcgtgtattcgtagctcaacggcaccggtcgcggcgcgtcggcgattacatccacgtccggggtgtcgttcagatcggagagcttgtcggcgatggcgtccacattgccgagtgtggcgctcatcagcaggaactgggtctgcggcagcgtgagcagtggcacctgccacgcccagccgcgctccggatcaccgtaataatggaattcgtccatcgccacgaggcccacatcggcatgggtgccttcgcgcaaagcctgattggcgaggatttcggcggtgcagcagatgatcggcgcgtccgcgttgatgtggctgtcgccggtgatcatgccgacattgtcgcggccgaacacttcgaccaagtcgaagaatttctccgacaccagcgccttgatcggagcggtgtaataggagcggcggccagtgcatagggcggcgaagtgcatgccgagcgccaccagcgatttgcccgaaccggtcggggtattcaaaatcacatggtcgccggccaagaggtccataatggcctcttcctgatgcggccacggctcgatgcccttgacgtcttccacccagccgaagaaccgttcgtagatgtcgtcggccgtaagattccgttcgcgtccgtcgccgtcccattcgggggccagccgccccagggatccgtattccttctcgtcagtcataatgctcagtctacctagtggcctattccgacggcacgagccgccctccgtcgctatgcgacgcctcccgccagcgggcggagccatgcgaagagctgtgccatgcgcttggctccgccaatgggaggatcgctcacgccaaccggcggcgcacctcgtcggggtccacctcgggttcgaggggaggccaggtcatgttcatgttcttcaaggtggtgcgcagcagttcggagaccacggctcgcgaataccagcggttatcggccggaacgaggtaccacggtgcggcggccgtgctggttttctcgaacacctcctgccaagcgaacatgtactcatcccagcggtcgcgggcctcgagatcggagatatcgaatttccagaacttggtgggatcatccagcctcccaagaaagtgttttttctgttcttcctggcttaccacgaggaagatcttgaggatggcgcatccgctggcggccagttcacgttcgaaatcgttgatctggtcgtagcgggcacgccatacgtcttcgggataggtgccatagacgtgcggcatgaccacatcttcataatgggagcggtcgaatacggcaatccaccccggcttgggcaattcacgcttcacacgccagaggaagtcgtggtcgagctcctcggccgcaggcttgccgaagccatggtaatggatgcccatcgggtcgccttggctgaacacgtggcgcacaatgccgcccttgccggaggcatccatgccttgcagcacgatgagcagccgccgtgccgagcctttgacgccattcgcgtacatgagccgctggtatcgggcgatttcggaggagctgatcgaaatgaacttctcggcatcctctttattgccgtcgaatccgggagtggaatcgccttcgacatcagtgacctgcatgccgtggtggaacataagacgttgagcgggcggcaacgaccatacggcgctgagcagttcactggatttcgccgcacgcgccagtcgttcaggcacgctggcactggagtcgatggtgtctatgcgatccaccgcgagctgtaataccttgtcgatccgtcgatcggttttggattcctttcccttgccgttcttgttgttctttcctgaggattttccggccgtaccccacttgccggcctcttcaggctcgttggttctgtcgtcgtccttggtcatgctcccgattgtacgtcttgtaactcaggagacctagcaacgtagcgacattcacatttcgcctgttactgcaaatctataggcatgcagtcgttcggaccgtaattgttggctttgcaccaattccaagcctcatctgtcgagtcgaagccctcaccggcaagaatcacatagtatttgtcggaattgctgctgtaggcgggccagtcacccgaccagataagcagtacgtttgaattcttgttgtgcatcgtgatgaattgcgcaagaatatcgcggtagttccaggtcttgccttcagcctccatacccttacgcttgctggacagctgtgcggtatacgtggaatagaacagctctgcggagtccttgtcgtgctcgacctgccaatccaatgccttgcttgcattattttcggcttcgtcatccgtaacgttgctgccgcttatcacgcctggatcagacgatccccagcaatatcttctttccggcagacccaccggaacgcggctgcgcagcgccaccgttgcctggcgccgtcgacaatgccgaagtaggtgcggtcgccgtgttgaaacttgggggcagcggcatcgaacccactggcacctgctggggagcagccggtaccagcgtcgggccatccatcgactgaggacttgggcttggcgcagactgtgccatcggcgcaccgcattccgtgcagaatcggcttccctccggcatctccgttccacatacctggcacttcatactctctccgttctccctcgtccctatcggccaatcccccgtccgtttgcagtacataaagaagcggcaaacggcccgaaacatacctgagctatcaggaagacggcacgatctgctacgagaaagagatcatcaccgaccggcaaatcgtcggcatcatgctgaagcatccgaccagcgcacgcggcttcaagcgctacttgcgcgccgcatcatgacgcttgaccacgatggtgacgccacccgcagcgaacagcgtcgccagaaccacaaccaacgcaaccgaggcaccggtatcggccgtacgttcggtctgctgtggcttggtgctgccattggcattgacgctaccgctatggttgccgttatccttgtcgtccgtcccggtggacactccggtaacggcaacgggcagagcgaccgtggtcttattggtcgcaccggtcactgtcaggcttatatcaccggtcttggttccggcgggaatcatgaccttgagctcggcggtatcgccattcgcaacctgcgcttcgccgaccacctgctcgccgatggtggcggtcagcttcgtctcgtcaggcacgcccagcgaggtgagcgtaagcttcgagaagtgcagggtgaacgagccaccggccttgaccgcaccggtcgggatgccggtgacggccactgcacggcggtcgtagcgcggggcaaccggatcgttgtccttgagatagtcaatccaagcatcgcggtccaccagaccggtgtccttggtgttcgtgccttgggcgaaggcgcggaagttatcgccgccctccaacaggaagctgaacgaaccgatacggtagttgcgtttcagatccaaaggctcaccgttgacggtcaccgaggtgatgtgatggccttgcgcggcatccggatcatacgtgtagctcacgttgtgggacagtccgagttgcagatacgcgcgcgatggcgtgctgccgtccgcgttcgtctgccactgctgttccagcgcttccttgaactgcgcgccggtaagcgtggtggtccacaggttgttcaggaacggcagtacagcgttggcctgggcgtaggtgatattgccgtcggcatcgagcgtgcaggcgtcattggtgccggacttgcagaattcggcacgcagaccgccggggttgaccacaccgatttcggccgcgccgcggtcctcacttttgagcgaatcgagcagcgcatcggccaccagattgcccatggtcgattcggaggcgcggtcgtcacgcttgccgtccttgaatgcggtggtgatatccgcagacaccttgccgaccttctcgccgcccttttcatcggccaccttaagggcctggtacacgatgtccctcaccttggcgacagtcgggttcgcggcggcgagcaggccatcgttgtattcggcgtaatcgttgtagtgcggatcatttttgtcggcgggctgcgaagccacctgcacggccgtgttaccggacttgtcgtaagacaccgcaccggtggccgtgttgtaggtgagcaccacttggccgatgttggcggcatagctaccggtctggatgatcggccggttgttgtgcgcgggatcggtgtacgagtacttcatgtgggtgtgtgcagtgaagatcacgttcactgccgcatcggtatcgtccacaatcttctggaatacggggctggcggccttctgctcgtcaagcgtgggcttggccgtggcgtcatcttcattggaggctgcaccctcatggtattcggccacaatcacgtcagcctcgccgttggattcgtcgccgtcggtgagttgcttggccacacggttcacggcttccaccggatcgccgaattcgatgtccttgacaccaccgggagccaccaacgtgccggtttcctgagtgaccgcaccgatgatgccgaccttcacgccgttcacctcctgaatgctgtactcgggcagagccggggttgtggtgcccttcttgtacacgttggcaccgaggtaatcccattgggcgttgcgcgcgccctccttgccaatcacacgatcggtaaggtcggcatagccttggtcgaactcgtggttgcccaccgccgaagccttgacgcccaaagcattgagcacatcgatggtcggctggtcctgctgcaccgaagagttgaacagcgaagcaccgatattatcgccggcggacagcagcagtgatgagtcagggtattcgcccttgagctgctcgatggtggcggcgaacggcacggtgaggttcttgtcgatacggccgtggaagtcgttgaagttcagcagattgatggtggtgctggcgggaaccggctgattggttgccatatagcccatacgcaatgaatggccattggtcacgccgtcgtctgcccagaacaccggcttgtacaccttgccatttactaccttggtggcttcggtatcaggggtgatggcaaaaccttcggtgttctgcgtacggatttcatccggagtgtcggtcagcttggtcagctgcagcacaccgttcttgaattcgtaggtgccgattttggcaccggtgttcgcgtcattgtcgctttgggcgagcagctggttgtgctcggcgtcccaagtcagatcgcgcgggccatcatagccggcgttcaccgcggactgcggcaggtcgatgtcggccaccggatgcaccaggtcctcatcattcacggtttgcagtgcgaaagcgtagatatggccggttttctccagtgcggcgaagaacagaccgccgaaatcattgccgaaaccgtccgggtcgtaggtcattacgttcttcgggtcaaggttggactggaatccgttggcggtcaggaccgagtcgggaataaaggctatgccttccaccccaagattggcgtccgctccgtggcccagcgtcacgccgaactgcgtgagtgctgcggtgagattccactcgtgcgtagcggtcagctcttgcgctccgtcgccgttggcgtcggtggttttcgcggtcacgtcatactgcaggatggaaggccgcggcacattcttgttttcgttgtcgcgctcggcgccgatgaatatgcccttggatgaatctccgttgatcagcgtgatgccttcggagtccacaccgcccttgccgtccttgaagtgcagctgcttgccgcccttggtctgaccgttgttggtgaaggtccagccatcagtgggatcctgctgccatgtgccgttctggtagacgaacttgttgatggagccagggcccttatcagcggtgttgccgagcgtggggttcagatcgttgtcggccgcccacagcacgccttgcttgccgtctttaccggcttcatacaccagaccagacagattgccgtcagtgtggtcgccgccttgtcctttggcgccaaattcgccttcggcatccactgtggtcacatcggccaatcccgaccatgcgtccacggtcatggtctcgccggcgggcggagtcggagtcgggtcatcgaacacgttctgtgcaccgggcgtgggcgtatcggaaagcgcgaaagtgccatcgtccttacgggaccacgactgactgtcgctcatcttcttcacgccggttgtatcggtattccatgacgtggaatccaccacatcgctatcggtaaagtcgccgctggtagtggtcagataggcttcgtcggcatcggaacccaggccgggctcggccttgtcggggtcgatgtatgccaccagatatccgccggctttgatgacggtgtccgtattcgttacttcgctggtgccgatggtgtagtgcttcttggctttcttgccgctgtcgtagatgccccagcccttcacgtcaacgtctgtggagccggtgttcttgagctcgacccaatcgcaacgcttgctatccgggtctccggcagctttcgtattgccggcatagacctcgttgatgattacggatggtttggcagccgtgttctgttcggcagtggcctgctgctcgtccgcagccgcagcgggcacgccgatcagggcgatgctgctcagtgtcaccgcagcggtgagcagcgcgatggcgcgccgcgacatcgcggtgaaattgttggtgtggaacattactcccgttccttcctcgggttgtgccgccgcagcatgatgctcttcggcggatgacaccccgagagtatgagagagaaatgaagccgacaccgtatgaaggcaaactcggcagatctccaaactgaactttggctgaattaccgctgaagctggttcttggatttgcgtcgaaccgtccgtattccgccgacaatcgcgattacagcggtaccgatggctacgctgatcaacgccggtcgttgcgcggcatggagggtggcgagatccggcccggccgcaatggcgctgttttcacccgccgagccatcagacgccggatgattacccgcgtcggcgtactgggcattgaccacactcgggccggcaagcgccacctggtcggcggtctcgaccttggccacatcgccgtgcttatccaaggtgacgcgggcgcacagggctttggcccagttgatacgctgccagccgtcgctcgattgccatagggggtatccggaatccaaggcagtggctttcaaaatcgcgttgcgctgatcggcgtgcagttcgggataggccagtcgcagcacgtccgccgccccgcgcggtgccacgaaatcagcgccggactgggcggtgtcttgcgggaaggtgtaggtcaggcgtgcggtgtagacgcgcacggccgaggcctggtccgcgaccggctcggtggccaccgggtccagaaaatcgttggtgtagccgcccgaaccggaggccttggtgttggcgatgcaggcggcgagggtagtgccgtggccgtccgcggcgcagcgggacaccagatagtcccgcagctgccgggacgcgggcacgatggacgaagcgaattcgttatgccagtactgcccgttctgggcggatgcgccaatgcgcccgcccatgatgtcaagcggataatgcacgccgagcacgatgcggttgttgccggcctccgaagtgcgggccatgatttgcggcgcgagttcgggaatcatgccggccagcgcgataccccacgaatcggcgccggtagtgtggccggaggggtaggaactgtttttctgcaagttcgagtagccgggcacgtgttcgagccatgagggtgattgcttgatgtcaagcgtggcgggcagtccggcgagatcgttagtgccgccgtagctgctttccgcacggttcagataggggcgcggatgcatggccgcacgttttgaggcgtaggtggaggccacgttaaaggagaagatatcggcgacggcgttgagtttcccggatttgagcccttcgctcatatatttgccaagcaccggaccgagcgcgtccggcatggcttcctcggcttgcagatcggagtcgacgagcgcacgcttgcgttgggcgttcaggccatccttatcgagattttcggcggctttgtggttaatggccacggccaaatcttcgtcgagtttcattgtatcggcgtcgagcaccttgccaccgtgttcggcatcggtgggggcctgccaatagttcttttcgtagtcggagagcaatgccacccaatccgggttgggcagctggtcggcctgtgcgattgcaggcgtcacggctagcgtggccgccaacgccagcggcgcaatggtcgcaatagcaaaaacggaggataggtgccggaacatcttcatatgttccaacctatcctccgtgaaggctacgtagccggagcccagtcaaacactcagtaaattcttcgtgccggcttagcggcgattgagctgactgtcaggcctctgactcgtcttcggacttgcggaacgccgggaattcgccggtttccgggtcaacctgtgactcgggctgggtggcgtcatatccctgttcgtagcgggtgcgccgccagttgcgaatcgaggcgttggtgccacggtgatgcacatggtatttgcgcggcgtaccgcccagcggcagctcttcgacctccttggccacagcgatctggttgacattggacgggtcgccggcggcgatcggcgccacgggctcgggttcggcgggtgcggccgtacgctgctgcatgcgcgagggcagccattcggcgagcctcgacaacagccagcaggcgacgaagtagatcaccgcggccatgaccagcgtctgcaggatgttgaagtacatcgagccgagtcggcgcgattcctgcagcaggtcggtatacatgatgatcgagcccagagcggtatccttcaacaccacgaccagctgggtgacggcggccggcagcatggcgtagacggcctgcggcacctcgatctccatgagcgactgtgtttcggtcaggcccaaagcgagcgaggcctcacgctggccgcccggcagattgccgacgccggagcgcaccagttcggcgaccaccgaaccgttgtacagcaccaaggccagcaccacggcccaataggacgggctgggcaggcccgcgaacgcgaaccatcgccagaagaagatcatgagcagcagcacgggaaccgcacggcagaactcgacgatcacggcggagacgccacgtaccaacgggttcggcagcagtcggcccacgccgaacaccaagccgaacaccacggcacccaccacggccacgatggtggccttgatggtcatccacagtccgggcaggtagaagtcggtccacgcctctcgttcgacggcgggcttccacagctcccagctgagctggttctcgccgtccggcgggttgtgcaggcgcatgaggataaacacgagcaccaccgcgaacagaatgcccgcgatccagttgacgatgcgaatggtgcgccggcccttgggacctggcgcgtcgaacagcacggaattcgaagtatcggccatatccgtcacctccttacggcgagtttgttggacaggtacgtggtgagcatgccgatggggatgatcaggatcacgtagccgagcgcgaagatcaggaagatttggatgatcacgtcgggacggaattcgatcatctcgctcatcagcgaggatgtttcggtggccacggatgcggcggcggccacggtggagttcttgagcagggcgatcagcgtgttgccgagcggtgccacggagcctcggaaggcctgcggcagaatgatctcggtggcggactgcatgaagcccaagcccagcgctcgtgcggcctcggcctggccaatcggcacggtgttgatgcccgaacgcagagattcgcacacgaacgccgccgtgtacaggctcaggccggtgaccgcgagccagaagaagttcgtggtgaaggtgtcggagaagctgagcttcagctgcgcgtaggcacccagcaccatgaacaccatgatgatggtcagcggcaggttcttgaacagttccacatacgcaccggccacggccctgagcgaggaaatcggcgagatgcgcatcaccacaaggatcacgccgaggatcagggagaacagggcggaccatagggtcagttcgatattgaccagaaacgcgccgagcacgtcatactggctgaagagttccaggaatccgctcatcaggcctcctctccttcgtccggggtgggcgggttgtagcgtacgtcgggcgtgtagttggtgcccttggtgttatcgctgatggcgttctcccacgagccgtcctgaatcatgtccacgatggcgttgttgattttggtggccagctgcgtgtcgcccttcttgatgcccacgccgtagtgttcctgcgtgaacggtttgccgaccaccttgagcttgccgcgcgaggcggaggccaggccggccaggatgatgtcgtcggtggttaccgcgtccacgatgccggagaacagggcagtggcgcattcggcgtaaccgggctgttccataagctggacttcggaggcgaacttctccttgacggtggcggcggaggtcgaaccggtgacggagcataggcgcttgccgttcaggtcttcggggccgttgatggagttgtcgtccttgcgcacgagcagatcctgtccggccacgaagtacgggccggcgaaggagacggccttcttgcgctcgtcggtgatggagtaggtggcgaggatcatgtccacgtcgccgttctgaatcatggcctcacgctgcttggagggagcttccttccagatgatctggtcttcggaatagccgagtttcttggcgatgtacttggccacgtccacgtcgaagcccacgtaggtgccggacttcttgaagcccaggccgggctggtcgaatttgatgccgatgcggatcttgccggtttcgtccgcgccgcaggcggccagcgacattgtgcaggccacggcggcgagcgcggcgatcacgcggcaaaccttccgtttgaacgtattggtgaatgtcattggattgcgtacccgtctttcagtgggttcgtcagtgggtgaggatcttcgagaggaagtccttggcacggtcggtctgcggatgctcgaagaactcgtcgggcgtgttctcttcgagaatctggccgtccgccatgaagacgatgcggtcggcggccttgcgcgcgaagcccatctcgtgggtcacgcagatcatcgtcatgccttcatgcgcgagttcgaccatcacgtcgagcacttcgttgaccatttccgggtcgagtgcggaggtgggctcgtcgaacagcatgaccttggggcgcatggcgagcgcgcgggcgatggccacacgctgctgctggccgccggagagctgggagggcatcttgctggcttgggagtcgacgcccacgcgggcgagcaggtccatggccagttgctcggcttccttcttgtccatgtgacgcaccttgatgagggccaacgtcacgttttcaagaatggttttgttggcgaacaggttgaacgactggaacaccatgccaacttcggccctgaggttcgcgagctccttgccttcctgtggcaggggctcgccgtcgatgcggatgtcgccggaatcgatggtctcgaggcgattgatggtgcggcacatcgtggacttgcctgagccggacgggcccacgaccaccagcacctcacccttggtgacggtcaggttgatgtccttcaggacgtgcaaagcaccgaagtgcttttcgacgtgggtcagttcgactagcggacggttcgggtcctctttgccgggaaccagcggggtcaatttggccttgcttggtgatgttgtgcttgtcgtgcgcgaacgcactgctgtttcattgttcgtttcagacatgagtgggaggataacacaccgacgtttccaacgtgttcacagtatgtccacacagttgctcagtcgatgtctcatttccgcatcagacatcgtgaaggcggcattgggcatcggcatacattctcgctgagtcgcgcatcgctcggcgtctgctgtgcgctgattgcctgctgcgtggcggctgagacgttgctgcgacggcaaagcgggcacgtgttgtcctatctgctgattccatgtttggccttggtgtcgttggcgttgctgccgtgtatgccgcagtcgggcgcatggctggcggtcactttgtattgtgtggggctggtctcgccgtttcccatgccgtattcgtataaatgtgctaggcattttgagcgtggctagctgttcgcacacgatgagtgctgttatacggtggacgacactcccgaagcgcggtggataaccgggcgcggcacacgatatgccggtggataaccggttcgcgccgcttaagttatccccatttttcggttttgcccctgtgccaccgtggaatgcgctacgctcggcgcatgaacggatacagcgaagtgccgcacaatggcgaaatcaacaactatctgcgcaaagatcttgacgccaaagccacggccaagaacacggcctgttggaatctgctgggcaaagtgcgcacgaaacgcacgttgtgtttctcgctgtataccgcattggaattatgcggcgtggagttgccgaggcacagcacgttgccacagaaggacttttatgtgacggtgaggagcaaagggacccgctcttcattggacaatgtcgactatcgcatatggaatgcaaagttcagcagtatcgttttttcaaacggcgtaacctgcatgcatcccatggatgcgtggatacagtttgcccaatatctcaacctcactgaattagtggtgctggctgaagcgctcatcagacgttatggatatgccattgaacaattcactcaacgactaacggcctttcaccgcgttattggtcgtgcgcgttgtgaggcagcgctgaagctcgtaaaaccatcggattccgttcaggaaactcgtacacgcttggcgcttatgcttttcggcctgcccataccgcaaacacaatatggcattaccgattcagagaacggatacacctacaccgttgacatggcttatccacaatacaaagtcgctattgaatatgatggcgatcatcaccgtcgcttccgcaaacaatatgtgcgggaccagcaaaaacgtcgacgtctgcggcaattgggctggaccgtcatcgaggtgttcgccgatgacctgtggagtaccgccaaacaacgtgccttcgcacaagaggttgccaccgcgatgcaaataccgcttcctggccgtcctcaaccttcatgccaggtattaatagacggcagccttaccatcaatgcgcgcaaaggggaatacaggaggcggaaacaagcaaagcacaacaaagcatcacaacattaatcaaatacggagttgcgatcgctcctcatggggcggcaattccctcatggggcggcaatttgctcatggggcggtttgaagaaattgtaaaaccgcggaattaagccattttgacttaccgccccatggggttttcaccgccccatgggttgtttaccgccccatgaggaagttaccgccccatggaaggataatcggcaaacgccaagggggacaccgcatggtgcgaggtttgccgcatggcggaggtgccatcgggcggagtatttggcaccccttggcaggtatttggcacattgggccccacccgcaaaaagcaaatggcccttggaattattccaagggccatttgcggctaatagcaccggagcattactcctcgaaaattaatctacgcatgcgaagaccgccgttcgaagccgaaggcgcactaaggtgcgtcgagtgctgaggaaaggcggtatacgctccgtagattagttttcgtcggcgtccggatcgtagtcgacgccggtctcggcgcgctgctcgtcggaaatcggggccggagcaccggtcagcgggtcgcggccgccgccggccttcgggaaggcgatgacgtcgcggatggagtcggcaccggccaggatggacacggtgcggtcccaaccgagggccaaacccgcgtgaggcggagcgccgtacttgaatgcctcaagcaggaagccgaacttctcgtcggcctcttccttggtgatgcccagcacatcgagcacacgggcttggatgtcgtcgcggtggatacgtacggaaccgccgcccatctcctcaccgttgcagacgatgtcgtaggaatcggacatggcgtgctcgggatccttgtcgaacttgtcgatccaatccttggagggcatggtgaacgggtggtgcatggaggtccacttggagtggccgacagccacatcgtcatcatccggatcgtcggtgggcttgaacagcgggaagtccacgacccaagtgaaagcgaacttcttcggatccagcaggccttcgcgggaggcgagctccacacgcacggcacccagcagcagctgggcggactcgcgagaaccggcggcgaagaagacggcgtcgccttcctcggcaccgacggcctcgcgcaggccgttgcgctcctcatcggacaggttcttggcgacggggcccttgagttcgccgttttcgccgaagaccacgtaggcaaggcccttggctccacgctgacgagcccaatcctgccaagcgtcgaactgacgacgcggcgtggcggcaccgcccttgaagaccacggcacccacgtacggggcctggaacacgcggaacggcgtgttcttgaagtactcggtcagttccaccagcgggttgccgaagcgcaggtccggcttgtcggagccgtacttgtccatcgcatccttccaggtgatgcgcggtagcggcagctggacctcatagccggcggacttccagatggcggcgatgaccttctcagtcatggccatcacatcttcctggtccacgtaggccatctccatatcgagctgagtgaactcgggctgacggtcggcgcggaagtcctcatcacggtagcagcgggcgagctggtagtaacgctcgacaccggagaccatgagcagctgcttgaggagctgcggggactgcggcagggcgtaccaggaaccgggcaccagacgggccggcaccacgaagtcgcgggcgccttccggggtggacttaatgaaggtcggggtctcgacctcggtgaagtccatgtcttccagcgcgtggcgggcggccttagccatgtcggaacgcagcttcagattgtgctgcatggacggacggcgcaggtcgaggtaacggtacttcagacgcacgtcctcgcccggcagcttgttctcggactcattctcaagagcggtggaaacctggaacggcagggcgtcggacttggcgaggatctcgatggtctcggccacaacctcgatcttgccggtggccagatgggtgttttcgttgccatccgggcgcaggcgcacttcgccggtaatctgaatcacgaattcgctgcgcagcgggcgggccatatcctcgtcgtaaatgacgacctgcacgaggccggtcgaatcacgaaggtcgatgaaggccacgccaccgtgatcacggcgtcggtcaacccaaccggcaagggtgaccttctggccgaccagggcctcggtcacttcagtggcatgatgtgttctgtaagccgtctggctcattatcttgtttctcctcgatttttcgcgcgaatacgtcagatttcgacggtttgctgggcaaccacagtatccggctcccacgacgtgcaatcggcggcaacctgctcgcccgtgacgatgttcttgacctcgtcgccagcgggctctgcgccttccgcaccctcggcggcactggcc

SEQ ID NO: 3256 - DNA, 5968 bp, Unknown
  R53_2m  MAG No. k141_8851
cgaaggagtgcgcggtcaccggagtgccgtcggtgaacttccatccgctcttgagcttgatgacgtaatgcgtggcgttgtcgctggaggtgatgctgtctgctacctcgttgtggatgccgcccttcgcatcgtaggtcaccagacctgcgaacagttggtctacaaccttgccgccaccggcctctgtggtgttgccggggaatagtgggtgtgccggctcactgccgtacacggaaatgatattggaatctgaagcattgctggaattggaggtaccggtcgatccgcagccgctgagcagcatgacgattgccgcaccggccgcgaccagtgaagtgacatgacgtgtgttcatgaatctctcccaaatattctggcgtcgtctttttggcgacgaaagaccccataggagcttcatgttaaccatgtatgcaatattctcgaaatataaacattactgaagactcaaggcagtaattaatcccagaaacgcaaaaatcccctcatgaagaagggattttcatgtttctgtttggaaagtattcagcgaggcagcatcatcggacgctggctggccttgatcggggccggcagctcgctcttttccttggagaggtactcgtccacggctgcggcgcaggagcggccttcggcgatggcccagaccacgaggctctggccacggccggcatcgccgcacacgaacacgccatcctgggaggtggcgaacttgtcattgcgagcgatgttgccacgcttgtcgagttcgacgggcagctggtcgaggatggtctcggtgtccggatgcaggaagcccacggagatgaggaccagatcggcgggcagcacgcgctcggtgccaggctggcgagtgaacggaccattttcgccgggagccacggagacgaccttcaagccggtgacatgaccacgcttatcggccacgaagccttcggcggtggtcgagttgtcgatggtgaccttggccttctcctcttcggtgccctcgaagttcacggagtcggtggagtagatgtactcgccgccctcttccatggaggaggtcttctggtaggtgcgggcgaaggtcggccacgggctgttgtccggacggcttgacggctctttcggcatgatctgtagcacggtgacgtccttcgcaccctgacggatcgaggtgccgaggcagtcggaaccggtgtcgccaccgccgatgacgatgacgtgcttgtccttggcggtgatatcgtgcaccggcttgacgccgaagatacggcgcgtggcgtcgggcaggaagtcgagggcgaagtggatgccgtcgagctcgcggcccggaatcttcatatcgcgcggcacgcgggagccgatggccaccacgacggcgtcgtaacggtcacgcaggtcatcccacgtgatgtccttgccgatttccacgttggtgcggaagcgggtgccttcggcctccatctgcttgacacggcggtcaagcagacccttctcaagcttgaagttcgggatgccgtaacgcatcagaccaccgatggcgtcgtccttctcgtagacgacgacggtgtggccggcgcgggtgagctgctgtgcggcggcgaggccggcagggccagagccgacgacggcgaccgtctggtcggtcagacgctgcggcggcagcggcttgacgtagtccaaatcccatgcctggtcgatgatggtctgctcgtcaagcttgatcatggtcggcggctggtggatgccgagcacgcaggcctgctcgcacagggccgggcagatgcggccggtgacttcggggaagttgttggtcatggacagacggttgtaggcgtcttcccacttgccctgacggaccaagtcgttccactcgggaatcaggttacccagcgggcatccggtcatgcagaacggggtgccacaatccatgcagcgggccgcctgcgtttgggtccacggttgcaggccggtttcggcgtgaacgtcgaaccagtccttgatacgctcctcaacggggcgttcagccaactctcggcgggtacggaccttcaggaatcctctcgggtcgcccatgtcagcgcgctccttccataacctgctcgtacaccttttcccaggcgccgggcgcattgaaatctacattgttggccttggcttcttccatggccttcgtcatggccacgaactgcttcggcaccacgtgagtgaaccgcttgacggtttcgttccagtcctccagcagggccgcggcgaactgggaaccggtctcttcggcatgctgcttgaccagtgcgtacaccagcttggaggtttcggcatcaagcgacttgaagagcagtgcaccggacttgatggcactcgggttgaccttcttcatatcgaggtcaagcacataagtgttaccaccggagaagcctgcaccgaaattgcgtccggtggggccgagcaccacaacagtgccgccggtcatgtactcgcagccgtggtcgcccacgccttcgacgacgaacgtggcaccgccgttacgaacgccgaaacgttcgccggcgcgaccggccacgaacatctggccggacgtggcgccgaaaccggtgacattgccggcgatgacgttgctgtgcttgtcgaaggtgacgttgtcttccgggcgcacgatcatgcgaccgccggacaggcccttgccggcgtagtcgttgacttcgccgtagatgcgcatggtctcgccgcgcgggatgaacgcgccgatggactggcctccggaaccgtgcagggtcatgtcgatggtgtcgtccggcagaccttcctcgccgtaacggcgggtaatctcgtagccgaccatggtgccgaccgtacggttgacgttgcgaatcggcatttcgatgcgcacgggttccttgtgttcgagggccggctgggcaagttcgatgagattgttgtccagcgccttctccagctcgtggttctgctcggtggtctggtgcagaatcgtgccgggtaccgggccggcctgcttgaggacgttggacaggtcgatgccgccggacttccagcgtttgatggcctcgttctggtccaggcactcaacgtggccgatggcctcctcaagagtcctgaagccgagctgggcgaggatctcgcgcacctcctcagcgatgaacatgaagaagttgaccacatactcgggcttgccgttgaaacgtgcgcgcaactccggatcctgggtggcaatgccctgcgggcaggtgttcttctggcaggcgcgcatcatgacgcagccttccacgatcagggctgcggtagcgaagccgaattcctcggcaccaagcagggcggcgatgaccacgtcacgaccggtcttgagctcgccgtcgcactggacgacgatgcgggagcgcaggccgttcaggatcagcgtctgctgggtttcggacaggccgatctcccacggggtaccggcgtgcttgatggcgttgagcggggctgcacccgtaccgccgtcatagccggagataagcaccacgtcggcatggcacttggccacacccgcggcgatggtgccgacgccgaactcggaaacgagcttgacgtggatacgtgccttcgggttggccatcttcgcatcgttgatcagctgcttcagatcctcgatggagtagatgtcgtggtgaggcggcggggagataagctccacgcccggggtggcgtgacggaccttggcgatccacggcgggaccttggctccgggcaggtgtccaccctcaccaggcttggcgccctgggcgagcttgatctgcaaatcggtggcgtgcacgaggtaatcggaggtcacgccgaagcgagcggacgcgatctgcttgatgcggctgtagcgctgcgggtcgttgatacgatcgtcggattcgccgccctcaccggagttggagcgtgcgccaatcgaattcatggcgatggcaagcgtctcgtgcgcttcctgtgagatggaaccgtagctcatggcaccggtggagaagcgcttgacgatctcagaggccggctcgacttcggagatgtcgatcggcttgcggttggtgttgaacttcatcaggccacgcagggtcatgagtcggttcgacgtgtcgttgatgtggtgcgaatacttcttgaacatctggtagtcgccacggtgggtcgactgctggagcaggaagatggcctcgggatcgttgaggtggtcctcgccggtacgacgccacttgtagtcgccgcccgtgcgcaggttgcggtgcggggatgcgctccactggttcgggtaggccacgcggtgacggatggccacttcttcggcgatctcgtcaaggcccacgccacccacacgggaggtggtgccggtgaagtattcgtcgatgatttcctggctcaggcccacagcctcgaacagctgtgcgccacggtagctcatgatggtggagacgcccatcttggacatgatcttgagcacaccggtggaaagcgccttggtgaggttcttcacggcggtgtccgcgtcgaccttgaggtagccgttacgggccaaatcctcaacggattcgaaggccaggtacgggttcacgcaggcggcaccgtaggcgatcagcagtgcgacgtggtgaatctcgcgcacgtcgccggcctcgacggccatggagatctgcgtacgggtgtggcggcgcagcaggtggtgctgcacggcggaggtcagcagcagggacgggatcgggccccacgtgtggttggattcacggtcggagagcacgatgaagttcttgccgtcggcgatggcctcgtcgatttcggcaaagatctcgtcaagtcgctcttcgagggccttgccgccgccggcgacctggtagaggcccttgaccacgtacgggcgatagtagccgccgaggatgcgggccttgtcaaggcgcttgagctgggccatctcatcagagttgaccacgggcagcgggatgaggatcttcttggcgtgcagctcggaatcggccagtaggttaggctcggggccgatggcggattcgagcgaggtgacgatctcctcacgctcccagtccagcggcgggttggtgacctgcgcgaacttctgggtgaagtagtcgaacagcatgcggctgcggctggagagtgcgggcataggcgcatcgttacccatggatcccagcggttccttaccggtgttggccatcggagtgagcaacagcttcagatcctcttcggtgtagccgaaggcacgctgacggcgctggacggactgtccggagtggctcacgtgctcgcggcggggcaggtcgctcatttcgaccgagttgccttccacccacttgcggtacgggtgctgggaggcgagggtcttcttgatctcttcatcggggatgatgcggccttcggcggtgtcgaccaggaacatcttgccgggctcaagacggcccttggacacgatgtgctcctgcgcgatctccggcagaacgccggcctcggaggccagcacgatgtagccgtcgtcggtgagctgccagcggccggggcggaagccgttgcggtcgagcagggcgccgacctgggtgccgtcggtgaagacgatgtcggccgggccatcccacggctcgataagcgtgttgttgtactcgtagaaggcacgcacgtccgggtcgaggtcggggttcttctcccatgccggcggcagcatcatgcagatggcgtgcggcagggagcggccggcgaggtgcagcagttcgaggcactcgtcgaaggtgccagaatcggagtagcccggagtggtgatgggcagcagcggctcgaactcgccgagcagttcgctgctcagacgaccttcacgggcggagagccagttgcggttgccctggatggtgttgatctcgccgttgtgggccagcagccggaacggctgggccagcggccagctcgggaaggtgttggtgga

SEQ ID NO: 3257 - DNA, 5915 bp, Unknown
  R53_2m  MAG No. k141_8918
cttgggaagcctgccgatccgccgaaagtcaggccttgcggccgttcggactggacccatggagacgtgggcttatgcggcggcccacttctcgacacagcaatcgtcaattgtacggattattgcggacagaatggctgtcggatggcattccaacaccaaggcactgcgacgtagttgacagacctgcaggcgggctttatcttgggagcgtcggtaggcgaggctaccgcagggatatgggttgctgccgctaacagtggagacactgcacgcaggtcagcagttcttgtcggatcaaggcatgaactaacgcaattccaccgccctgcgatgctgaagcttgaacgatgacacgactaggggcaactcttcgagaagtcgcacttcctcatgtcgtcaatgtccgacggcgtactggttccattgaggaggtgaatgtcatggacggcgatttaggtcatagtagccggctgcgcggtggcggacaatatcacatgccatcgggcgcagcatacggcccattctcttcacacgtttgtaccgcgaccatggcattggccgtccgtcacgataccgccgtatccggcgagggcgatccgatcactgactgattcggctcgcatcgacttcaccgcctcacgacggctgcgacatcccgcatgacgtacgcaccgaacgcctgaatcgcgaatccacatcccgttctccggactcccggcatatcggcatcatcatatgacgacgccgatcggctatctgcatgcagacatacccgcatatcggcgcgcctgcacgcgaccgctgacgtccatggcgcgcacttgccgcacggataccgagtcgaacgcccaccgaacgggaaccgtttatctccttcgagataacgacatgagagcgcacaggttccgttatgtccaacttcttcaattactcctcgttccccggcattcgtccgcgttccgacgtcgacgccgccgacatgtcccgcagcagcgccgcgcgccgcatcgccgcagacgtggtggtggccgcgggcgtgctcgccctgttcggcgtcgtcgcctggctgctgccgcaaatcaacgaaccgatcggcccgtcaggcgtgccgagcacggtgagcgacgatttgcatctgctgccgtattacgcgctgcgttcgatgttccgcatgttcatcgcgctgtttttgtcactggtgttcagcttcatctatggtttggcggcggcccgatgccggcgactgcgcatggtgctgataccgctgctcgacatcctgcagtcggtgccgatcctcggcttcctgtccgccacggtcaccatttggatggtgttgttccccggctccattctcggcgtggaggcggcgtcgatcttcgcgatcttcaccagccaggcatggaacatgaccttctccttctaccattcgctgctcagcgaaccgcaggagctggatgaggcggctcgttccatgcagctcacgcgctggcaacgtttctggaagctcgacgtgccgaattcgatgattccgctgctatggaactgcatgatgagcgtcggcggcggctggttcttcctgacggcctcggagatgatctccgtgaacaacaggacgtacgcactgcccggcctcggcagcttcgtggcggtggcgtccgagcacgaacagctgggcaaggtgctgtgggccatcgtgaccatggtcatcgtggtgctgctcatcgacgtgctgctgtggaagccgctgacggcgtgggccgagaagttccgtatcacgcagaacgagtccgtgcaggccaagacgagtctggtgctgtcgattctgcggcgttccggcatttcggatgcgctggctctcgtgggccggcccatcgccgatctgatgttctggctgacccgcccgctgggccgtaccggcgcacgctggccggccgccggcacccggcgtcgcacactcgacatcgcgtttatggcgctcatggctgtggcctgcctggccggtctgtggatgctggggcgtttcatctcggacggcgaggggttcgccgaggtcggccacgcgatggtcctgggactgatcacgttcatgcgcgtgacgctgctgaccgtggtgtgctccatcatctgggtgccgatcggcgtgaagatcggcatgaatccgcggatttcccggttcgtgcagccgctggtgcaggtgttggcgagcttcccctcgaacttcacgttcccgttcgtcacactgtggttcatcgcctggcatatcgacatcagctggggcggcattctgctcatgtcgctgggaacgcagtggtacatcctgttcaacgtgattgcgggcgcttcggccattcccgatgacctgcgcgaggccacgcgggcgttccatctggacacgcggcagcggtggaccaagctgatcctgccggcggtgttcggctcgtggtgcactggcggcatcaccgcggcgggcggcgcgtggaacgcctccatcgtctccgagatcgtggcctacgggcacaccacgcttacggcaaatggattgggaacatatatcgccaatgcgaccgcggtgggagacaccggcaagaccatcatcggggttgccgtgatgagcgtgttcgtcgtgggcgtcaaccggctgttctggcgtccattgcagacgtacgccgagcgccgtttctccgtcgcctgacggaagccgcactggccatcccggcccatcgacccgcaacaatccaacagcatcggcggcgagcgcatgtcattcgaatccgccgcgatcatccgcaaaaaaacgtaacagcaaggaccatttatcatgaccatcacaactttttccgaccgcaccgcagccttcccgcataccgccgcgacgaacgccgccggcaccgcgatcatcgaggcgcagcacgtgggcaagacctaccgtgccaagcgcggtaaggagctgaccgtgctgcgcgacatctccttcaccctgcatgagggcgagatcgtggcgatcctgggccggtccggcgctggaaaatccacgttcctgcgcatcctggcgggcctggtacccgcgtcgagcggtaccgtcacctaccgcggcaccgacatcaccggccctaatcccggagtgggactcgtgttccagaccttcgcgctgatgccgtggctcacggtgcaagcgaatgtggaactggggctggaggcccgcggcgtgccgcgcgaggaacgccgtcgcgctgcactgcaggccatcgatgccatcggactggacggattcgagaacgcgtacccgaaggagctctccggcggcatgcgccagcgcgtgggcatcgcacgggccctggtggtgcagcccgatgcgctgttcatggacgagccgttctccgcattggatgtgctgacagccgagaacctgcgcaacgaggtgctcaagatgtggagcggcgatcagcgttccatcaagtcggtgctcatcgtgacgcacaacatcgaggaggccgtgcagatggcggatcgtgtcgtggtgctcggctcgcatcccggttatttcatcgccgacgtgcccgtcaccctgccgaggccccgcgaccgtcattccgcccagttcgaggctatggtcgacaccctgtatgcgatcctgaccgggcagagtcgcgatggcgggccggcggataccgccgacgagcgcacggccgccggggacggcgtcgtgcatggcacgtcagatggcgcggcgaaccagaccacggtagcggatcaggccccggcccgggcgagcaacgccgaccatcaggcatcctccgacatgctgcccaacgctacgccgggaggcctggccggactggtggagatcgtatacgatcacgcgcagggcatcgatctggccgatctggccgccgagctgtcattcgaggtggacgacctgttcccgctgatcgacgccggaaccatgctgggattgctgaccgtcgagaacggacacgtgacattgaccgagctcggacgccagtggaggcaggcggacattctgacaagcaagacgatgttcgccgccatgctgcaagacaaggcaccgctggtgcgcatcatcgaccgagcggtccgtcacagcgaacacggccgcctgcgcggcgagctcatcgtcgacctgttgagggcccgtcatacggacgcggaggcggagcgccagttcaacatcgccatgacgtggggtcgatacggagaactgttcgactacgacgccgatgatgacatcatcaccgtcgacgccgccaacccggcaaacgccatccgaccggccggggaagccagcgaaacggactgagttggcccgtctcagccaactgccgcaatggaaacaacgatcaacccgacagcggaacggaccgccccgaatcgccaaggaggaatcatgaacacgctacgactgatacgctggcgcggcgagcgccacgccagcatcacccagcgactgaatttcgccgcccatgccacgccagaggccacgctcgccttggtgtatgcgcacgaatccggcttggaacccgacgaggttcgccgggcgcgtcgggcttacggcggcaacaccataccggcgcccgacgtccatgaatcgccggcgcagcggctggtcagggcgttcatgaacccgttcatcggcgttctgatgttgctggcgctcatctcgttcgtgtgttcactggcccagcacggaatcgtgacttcgggcaccactgcggcgaacggaggcggcacgccggtgaccgcgggcatcatcctgctcatggtggtggtgtccggtctgatctgatacgtgcacgactcccgaagctcgcatgctgcgacggcgctggccaccatggtgagtatcacggcgacggtgcggcgggtcggtgccggcgagcggcagattccgtccgaagagcttgtcgtgggcgacatcgtgacgttgttcgtcggagacatcgtcccggccgactgcaagctgctggagagccgagacctgcgcatcgcacatgggggcgctcactggcgaaagcatgcccgtgcgcaaggatgctgccactgatcgtcaccgtctgcctgtcccggggtgcgcgggcgatggcctccggcaaggccatcgtcaggcggctcgacgccatcgagacgctgggcggcatggacgtgctgtgcgtcgacaagaccggcacacctaccagcggcgtcatcaagctcgaccgggcgcagagcatgagcgggttgaactcgtcctacgtgctgcatgcggcatggctgaccacactgattccccacacgacgagcaatccgtgggatgacgccatcgtcgcagtcgaaggcgactcggcaaacgataccggcgacgtacaggtctagggaggcacgcctttcgatccgatacgacgccgggcgaccgtcatcgtcgcgaagagccatcaccacgcggaccgcgagcacacaggtggcagcgatatcagtgagaccagcggcgccggtgccggaacgtccgggaacgtcagccgcatcatggtcgtcaaggacgccgtctccgaaatgctgccccgctgcgacaccgtcatgcgcaatggaaccgcagagccgctgaccgatcgacgactgcatccgctggcacgaccacgagcgcatcaaacggtcgctcggctggatgagtccggtacaataccgtcaaagccaaggaacggctgcgtgatcacctccaaaaaacgtccgcagccccccttatctacagccctcgccccgacattaaaattacccatcatcccaatatcacccagtaattgcgataatgctatgaagtggcctgatttttgttccgcccttacagtgaggcggcttgtgccgcttgatgttgataatactcggtttccaccgcttcgggtgtcctgtagcccagggac

SEQ ID NO: 3258 - DNA, 9998 bp, Unknown
  R53_2m  MAG No. k141_8927
ggctgtcacattggctgcagtgcttaattgagcgtcggtgatggacatgccggaggcgcggaatgttgtggcgaaagcatcgcgcacttcatcaagaggaatatctgtgagcatgttcgttttcgcgcgacgtaggaacgtgatgacttcgtcattgaacaaatcagaaatcatctgtgggagaccggcgaacacgatggcgatattgcgtcgttccctgatttgatgctgtatggcagtggcgatggcaatcatgtcggatcgctcagccgcttgagtctcatcaatggtgataagcaacccagcatggcgcttctcaagcgcatccaaccgtccggcaatggcacttctcaacgtttcgggcatacgcttcggggatagttcggcttctccgaggccgatgcccgctccggcaaaagtcaacgatggtcggatagtgaggcggtcaagggcccctcgcccggttcgtaaggcatcaacaaggcgttcgcatagtccggcagaggccgtttcttcgatgacatcccatctgcgcgctttggcccggtctccgaacacagtgagcatcacggtttttccggttccacgagcgccggtgacgagcataatgcgccctggggcaccgactccgttatcgagacctttctcgaaatcgcggataactttgcctcggccgatgagcaggggcggttcccctcctgccgttggcttgaatgggttttcctttgccttcatgtggaccgcctcctcgctgaatcaacctaaaataaaaattatcaaaagtatcaaaaaaatagaaattatcaaaagttgggttgagccgactgaagaaaacagccgtggtgacaatgattctgccgcaatccgcggtgacaacaactgacgcggaccttcttggcagaatcgttgtttgtcccgcttcgccaatcaacgtcgctcaagttcggtgcgcagaccggctaccgtagcggtcagctcacgcacttcctcgcgcaataggtcgatttcgggattggctgatggtgcaatagcctcttgcgcggcttccttggccacttccttctcccgagcgtcctcgcgccgatccgtctccagattgacctgatccacgatccacgaagccagcgtggccgtcacaataccgatcaacgcgatgccggtgaacatcagcaccaccgcaatgatcttgccttggaaggtgaccggcgagaagtcgccatatcccacggtggtcacggtcacgaacgcccaccacaacgccgtgccgaagtcggtgatcgtggatccggacgccccgcgctccacggaatacacggccagcgcgcccacgtacatgagcattcccaccgcgccgaccgcgtatacggtgatgcacccgcgcaccgccatgccggaggtgcggttcagcacgtgcagcacggtcagcaaacgcaacagtcgcaagggccggagcatcggcagcgcgatggtcagcagcgtgaacaggttgtgcttgaaccaccgccagcgatcgtcggccaaccacagcgagaccacataatcgacgacgaacaccacccagatcacgttgatgacggtttcacacagcgcgatatgcgtgcgggagagaatttcccacgaatacaccaccagaaacaccacggacagcaccatcagcggccagtccgtccacttcttccacgtcttcagtcccatattccgattgtagtggcgcgtccgctgcgccactgcggagcatgactccggacatcagtgttgtatacgttcgtatacatttcacgttgtgtacgaacgtatacagcggtatttttcatctcgtatttcccctatgactatcaccacagtgatataatcaagaatatgtaaggagagagaaggagccggccaatggagaccgcatcgatcgaactgtggcatggctcttcgcatgtcctcaagcatcctgaatacgggctggtcaagccgaacaacgattatggccgcggattctattgcacgcgcagcgtcgagctggccaaggaatgggcgtgcgcgggactggatgacggtttcgcgaatcggtacacgttgaccacggacgggctcctcttcctggacctgtcccagccgccctacaccatcctgaactggctggccatgctggtcgaaaaccgtcgtttccagccgaccaccgccgtcgccgcgcaaggcatcgaatatctgaaacaagtgtttctgccggatgccagtcaggctgacgtcatcgtcggatatcgtgccgacgattcgtatttctcgttcgcccgcgcttttgtcaataacgcgatttccatcgaccaactcgctgaggcgatgcggttgggcgagctcggcaagcagatcgtactcgccagtcctcaggcattcgcggcactgcggttccaaggctgcgaaatcgcccgcgcttcgacctaccacggattgcgtaacgagcgcgaccgcacagctcgcgaagcctaccgccgcaaaagtgcagaagccgatctcgacggcctgttcatgcgcgacatcatccgcgagaaagtgaccaacgatgatccccgcctatgatgagacatacttgccggacgccatggccaacttggccggcgccttcgattatgcgctgaacgattgcgggttgccggtcggcctattcatggacttcttcgccacctccgaggcggccgcgcttttcgggcgaggcacgcccaaatacgtgtgtggcatgtccggcgaggagctggtggccgaaatcatgcggcaaaccggttgggcgcgcattctcgatatgccgccagccgcactgcgcgccggctcaacacccgaatactgggccggatgggtactcgcatactgccaatggaccaggggagtgcggttctcggacattctcgatgtgctgtcgctcgacgatatcgtgcgactgtacccgactctgcacgaagccgacgaaagccgattcgtcgacgtgtacgacgagcgggccgcccataatcgcaccgagggcgactcccggctgcacacgatccgcgtgcgcgccggactcagccaatccgggctggcccgccgctccggtgttaccctgcgctccatccaaatgtacgagcagcgccgcaaagaccttggcaaagctgccgtctccaccgtgctcgctttggcccgcacgcttggctgccgcatcgaagatctgttggagccgtaaagacgcggagtagtatcgcgccgcatcgattctgataactgaacaactacttttaaggcctggccggatgctcgtttggacatccggccgggccttctggctccacacggggtgccgaggtatccgttctccgcttcgaggggctgatttggccttccgtagaggtttactcccgtttcgaggggctggtggcccgctagaacacgggtataaacggcttcgccccaccgtcattccgccattttggggatgcgcttacttgagtaccagcccctcgaaacggagatagatctccggaaagggtcaaaacagcccctcgaaactcaagatggcggttgcagggcggttgaggatcagtcgaagagcggttcaaacgcaaatgtgaacaatgccacatgtgattgggcgggtcgctgcacgccgattttcgggggtgcatgggaatggcggaatatcaacgaaaaaccctatatctaggtttgttatgtgacacgcgccactacatatagtgccttgatttcaaatcacaccgctgtaatatggccttcgcttcactgttcatcagaaccacatcaaggggagtcgccatgaccgtcaccgtgttcaccaagccgcattgcccgcagtgcgatgccaccaagcgccagctcaccaagctgggtgtgccgtttgaaaccgtggacctgacgcagaacccctccacccttgagcagctgcaggccgccggtttccagcaggctccggtggtcatcacgccggacaactcctggaccggctaccgccccgacctgattcgcgaagtcgcccagcaggtggccgccgacaaccgcgccgccgccacggtgtccgcgtgagtctgagccagcccgaattcgcggccgaaggcaagacgatcggcgcattggtctacttctcgtcggcctccgaaaacaccgcacggttcgtggccggatgccgtttgcaggacgaaggcatcaacgtctaccgcatcccgttgcgggccgccgacccggcgctaaacgtccgcgaaccgtacgtcatcatggtgcccacctatggcggcggcgtggtcaagaaagcagtgccgattcaggtcaaacgcttcctcaacgatccagccaaccgcgagtggattcgcggcgtcatcgcctcaggcaacaccaatttcggtgaggcctactgtgccgccggagacatcatcgccgccaaatgcaaggtgccctacctctaccgttacgaactcatgggcaccccggaagacactgccgccgtgcgaaacggcctcgtccgcttcttcaccgaacagtaaatcttgaccccctcgaggtattggctcccctctccgaggggagctgtcaacgaagttgactggggggagcaactgtctgagtaaacacacttctgccatattccaaggatttccaatgactgacctcaccgccaccggcctgccgctcgacaatactgccgacaccgcagcggaacagtacgacccggcgcacgattaccacgcgctcaacgcgatgctcaacctctatgacgccgacggcaagatccagttcgacaaagacaaggccgccgaacgcgaatacgtgacagggcacgtggccaccaacagcaagcggttcgcctccaccgccgagcgtctcgaatacctgatcagcaaccagtactacaaccctgcggtcttcaaccagtactccgctgaattcctcgaccgcatctacgagcacgtggaatccgccggctttgagttcggcactttccttggtgcgttcaagttctacacgtcctacgcgctcaagacgttcgatggtcgcctctatcttgaggacttcccgcagcgttgcgccgctgtggccctggagctcgccgccggcaatgagcagcaggccatcgaatacgccgacgaaatgcttgccggccgcttccagcccgccaccccgaccttcctgaacctcggcaaggcccagcgtggcgaaccggtcagctgcttcctggtgcgcatcgaagacaacatggagtcgatttcgcgcggcatcaacgcggccctccagctctccaagcgcggcggtggcgtggccctgctgctgagcaacctgcgcgagctcggcgccccgatcaagcacatcgagaaccagtccagcggcgtgattccggtcatgaagctgctggaggactccttctcctacgccaaccagctcggcgcacgtcagggcgcaggcgcggtgtacctcaacgcccaccaccctgatatcctgcgcttcctggacaccaagcgagagaacgcggacgagaaaatccgcatcaagtcgctggcactcggcgtggtgattccggacatcacgttcgaactggccaagcagaaggcccagatggcgctgttcagcccgtacgacgtggagcgcgtatacggcaagtcgttcgccgacatttccgtcagcgagcattacgacgagatggtggccgacgatcgcatcaagaagacctacatcgatgcccgcaagttcttcaccaccatcgcagagctgcagttcgaatccggctacccgtacattgtgttcgaggacacggtcaaccgcgcgaatccgattgagggccgcgtgaccatgtccaacctgtgctcggaaatcctgcaggttcaggagccgagcgcatacaacgaggacctcacgtatgcgcatgtcggccgcgacatctcctgcaatctgggttcgctcaacatcgccaaggcgatggatggtggcttggcccacacggtggagaccgcgatccgcgcactcacctcggtggccgagcacaccagcatcaacgcggtgccttcgattcgccgcgctaatgaggagggccacgccatcggcctcggccaaatgaacctgcatggcttcctggcccgcgaaggcatccactacggttctgaagagggcctcgacttcaccgacatgtacttcatgaccgtggcctaccacgcctaccgtgcctcgcacgcgctcgccgtggagcatggccgcacgttcgccagcttcgctacgagcgactacgccaagccggccggccagggcaactacttcgacaagtacaccgatggtcgtcgttcgctcactccgcgcaccgaacgggtccgtgcgctgttcgaacagtacggcatcgcgatcccgactgcggccgactgggaggccctgcgcgacgcgattctgaaggacggcatctacaaccagaacctgcaggccgtgccgcccaccggctcgatctcgtacatcaaccattccacgagctcgattcacccgatcgcctccaagatcgagattcgcaaggaaggcaagatcgggcgcgtgtactacccggccgcctacatgaccaacgacaacctcgggtactacaaggacgcctacgagatcggctggaaggccatcgtcgacacgtacgccgaggccacccagcacgtggatcagggactgtcgctgacgctgttcttcccggacaccgccaccacccgcgacctcaataaggcccagatctacgcctggcgcaagggcatcaaaaccctctactacatccgcatccgccagcaagccctggaaggcactgaagtccaaggctgcgtctcctgcatgctctgatcgttcgagggagcgtataccgcctttcttcggcactcgacgtaccttcgtacgccttcggcctcagacggcggtctccgcacgcattgaacaaccagagagccgttgttactcccctcactcggctaacgccgacagctcccctcagagaggggagctggccgcgaagcggactgaggggggctccaccatctaaggaaccaacaatgtcacgaaccatctatagagcactgctccggctgaccgcgccggaggagttcgaaaacaagtccaacgacgataacgataacgacaacgacaacgagtaataaggaacactcatggcacctatctccattccgcgcaaaccgctgaaactcatcgaccgcgtctccgcaatcaactggaaccgcctcgaagacgagaaagaccttgaggtctgggaccgcttgaccggcaacttctggctgcccgaaaaagttcccgtctccaacgacatccccagctggcagaagatgaccgaggacgagcacacgctcaccatgcgcgtcttcaccggcctgaccctgcttgacaccatccagggcacggtcggtgccgtgagcctgattccggacgcgctcaccccgcacgaggaggccgtgtacaccaacatcgccttcatggaatccgtgcacgccaaaagctactcgtccatcttctccaccctgtgctccaccgaacagatcgatgccgcattcgactggagcgagaacaacgagtttctgcagaagaaggcggaaatcgtgctcgactactacgagggcgacaacccgtacaagcgcaaggtggcctccaccctgctcgaatccttcctcttctactccggcttctatctgccgatgtacttctccgcgcacgccaagctgacgaacaccgccgacgtgattcgtctgatcatccgcgatgaggccgtccacggctactacatcggctacaagtaccagaagggcatcgcccagctgagcgatgccgagcgtctggatctgcaggactacacgtacgacctgctcaacgagctgtacgacaacgaagtggagtacacccagtcgctgtacgaccgcgtgggcctgaccgatgacgtcgagaagttcctgcggtacaacggtaacaaggcgctgatgaacctcggctacccggctttgttcccggctgagatttgcgatgtgaaccccgcgatcctggccgccctgagcccgaacgccgacgaaaaccacgacttcttctccggctccggctcctcctacgtgatgggcaaagccgaagaaaccgatgacgacgactgggacttctaagggtttcgcggtccgcgaacccgcagcgccgccgcgttcgtgcggcggcgttacgctggagatatggaacaggatccgttggtcagcatcattattccggtgtataaggtcgagaagttcctcgacgaatgcgtggcgtccgttgccgcgcagacgtacgccaatctggagattctgctggtcgacgacggctcgcccgacaattgcccggccatgtgcgacgcctgggccgcccgcgacccgcgcatacgcgtgattcacaagcccaacggcggcctgtccgacgcccgcaacaccggcatcgccggggccaccggtgcgtacatatacttcgccgattccgacgacaccgtggcccccacgttggtggaggactgcctgaacgccatgcgcgagtatgacgccgacctcgtgatgttccagttcgacaccatctccgagaacaacaagccgctgctgtccaactatcgccacaacgacttcaccgaggtgcagatcctgaccccggtcgaggccatcaaaaagcaggtcaaggctgagatcgacggctatttttgggccttcctggcacccgcctccacctatcagggcaccggattctccttcccggtggggcgcaaaatcgaggatctctcccgtatctgcaacgtgatcggcgaggccacgcgcgtggtccgtctgcccaaggcgctgtaccactaccgcatgcgcgagggatcgattaccgccaactgggatccgcagctcacccgcgactggacccgcgccgccgacgaccgcgaggaatacatcgtccaccgattccccgagctcaagggcttcatgacgctgcaacagctgaatttctttgccaacctcgattacgagaccatgcgccagtcgctgatcgccgggctcaagatcgatcccgaggacgccgacgcgcttcgtcgccgcatcgagggcctggccaagtccgccgatgagggcgatgagccagtaccggaaacgttgcgtgagttgctcggactgctcaagctgggcatcaccaaggtggccgatggcacgttcggtaaggccgatggcagcggtactgatgacgatgccgagaacgatgacgtaacgctggccgaccgtttccgcgacatgcgcgaggactggcgccagctgcgcatccagcgcatcgaaaacgccgaggagcgcaaggccgagcgcaaagccgcccgcaacggcgtcaccttcgagtctgtgttgcattagtcggcgactgatggaatccgtcagttcgggaagagcaggcctgctctacgccgggcgtgccggttcgcacgttcgagaaacaggcgtgtcatgggccgaaccacacaacacccccagaaacgcccataaagttaactacatttcagacacgccacttgccttggtccacggtccgtgtatagtagttctcggctcaacgaagagaaccttcactgaaccggaaaaaagtaaacgctgaagcttgcagtttccgagagcaaagttgtatgtcggtggcgagggcggaagcacagtaaagaacaaatccctttacaacggatcgtgaggcacgtacctgcctctgaaaggattggtaattatggcagaagtcgttttcgaccacgtcactcgtatctacccgggcaacgacaagccctccgtggatgatctgaatcttgatatcaaggatggcgagttcctcgtcctcgtcggcccctctggctgcggtaagtctacgacccttcgtatgctcgccggcctggaagaggtcaacaagggccgcatcctcatcggtggcaaggatgtcaccacgatgcagccgaaggaccgcgacatcgcaatggtgttccagaactacgctctgta

SEQ ID NO: 3259 - DNA, 19104 bp, Unknown
  R53_2m  MAG No. k141_9186
acgatctcatcggtaaaatccgcgaactcgcaggtgccgctgggcaagcagtgggttaccttgagcacgtggccacctacacgcatatcaacggcgagttcctatccaccatcgaccaactgaatcaggccattgaagaaggccacggcgtaaccttccaataccgtgattacggcccggacggcaccctgataccgcataaaagccgtacgggcgcaggtcgaattacctacaccgccgacccttaccagatggtgtacaagaacggacggtattacctcatctgccatctacatggcgaggataatctccgcattttcgtggtcaaccgaatcgccaacgtcagcgccaaaggcaggaacggcacagttccactggaaaaaccagcgccggctgattttgacgcagtgaacttcatgcgtcaccgcccgtatcccgtagccgatgccccgattcgcatccgcatggccgtacgagacgaatccatgctcaacaacgtgttcgaatggttcgacgaccctcaaatcaaacattcaccggacggcacacagttcgaagtcatcgtcgatgctcccgaacgcgccgtgttctggtgggcattgcagtattcctgggatggccgcgtagtgattcttgagcccgattcgctcaagcgcaaactctatgatgccgggcgtcgcatggccacagcctatgctcccgaatgatgcaacatcacatcgcacacctccttgccgagttgttcaccagcgaatttcaccggagaacctatcatcccatcgccaatcacgttcggtaattttttaccgaacaactcgatttcaagccattccacgaactatggcccccgcctagccgtacttgacgctaaggtggaaccatcacatgccgcgatgcacatgcaacgcaaacgcaacgatatgtaaggagcaactatgagcgaagagcgtaccgcatggggatggggtctggccagcgtagacgccgccggcaccaccctggacgtctggtaccccgaactgaatctcggtgaggcaccggccgaggccgatcgtccaaaccacaatttcggcactctggctcacgatgaagccgacgcccgtggcatccgccgcgtgccggtattcgtcgtcagccagttggacgagccgatcagcaacgccgcggacgcttacctgaaactccatctgatgagcatgcgcatggccaagccgaacacgctgaaccttgacggcatcttcgcccagctcgccaatgtggtgtggaccaactacggtcctttcgccgttgaggacttcacactacgcaaggccgatgtcgaacgcgcctccaccgaagccgctctcgctttcgctgctcaggccggactgcctgccgcagctcctgccaccaccgtcaacgtgttcggtgtggataaattcccgcgcatgatcgattacgtagtgcccaccggcgtgcgtatcggcgacgccgaccgtgtgcgcctcggcgcttacctatcttccggcaccaccgtgatgcacgccggattcgtgaacttcaatgccggcacgctcggcgtctccatggtcgaaggccgcgtttcgcaaggtgtggtcgtgggcgacggttccgatatcggcggcggtgcctccatcatgggcaccctctccggcggcggcaagctgcgcaactccatcggcgagcactcgctgctcggcgccaacgccggtatcggcatctccctcggcgataactgcaccgtcgaagccggtctgtacatcaccgccggcaccaagatcagcatctgggacaaggccaaggccgcagccggcgagccgctcgaagtcgtcaagggtgctgagctctccggcaaagacaacatcctgttcatccgcaactcggtgaatggacgtatcgaagcccgctaccgcaaggtgggaattgagctcaacgccaagctgcacaagaactgaaattgaaataatggagcgttatcttcgttgctcctcggtcgacgtacttccgtacgccttccctcggtgcgcttcgataccgcacacattatttcaatttcagaactagccctgctcgttcttatgcagccgtcgcagcatagctggtttgcactgtacatatagaaagcgcctcactggatctccagcgaggcgctttctcaaaccaacaatcaccgctcgtccatcggcacgaaatcgcgctcgaccggaccggtgtagacctggcgcggacggccgatcttggtgttcgggtcggccagcatctcacggtactgcgcaatccaaccaggaatgcggcccagtgcgaacagcgtggtgaacatggccggatcgaagccgatcgcccgataaatcaagcccgtgtagaaatcgacgttcggatacaggttgcgcgatacgaaatactcgtcgttcaacgcaatatcctcaagctcggtggccacatcgaacaacgcacgctcgtcggacggcagtttctgcgtatcctcgcgctccatgatcttctcaagatacttcttggcaatcgccgcacgcggatcatatgacttatacacacggtgaccaaggccggagatcttctggccattctccttggcatccgtcacgaactcggccacagacttgccggaatcacgaatcgccttcagctggcgcagtacggcctcattcgcgccaccgtgtaacggtccggacagggcattgacgccagcggccaccgccgaatacagattggcgtgggcggaaccggcgatacgcaccaccgaggtcgagcagttctgctcgtgatcggcgtgaataatcagcaaacggcccaaagcatgcacatacaacgggtcagattcgaacggctcgtacggcacagcgaagcacatgcgcaggaagtcgtctacatagccgcgcgcgtaatcggggtacagcatcggctcatcgcgacgacggcggaagatgtacgacacaatcgtgcgggccttggccatgatgatcttggcggcctcatcgagctggtcggtgtcggagatatcggtggtgtccggatagaacgtggccagcgcattgatggcggaggcaagcacgctcatcggatgagcggagcgcgggaacgaacccatgaaggtacggaagtcttcgccaaccatcgtcttgtggttgatgtccgcgcagaactgctcatactcagccctgctcggcagctcgccgtggcgcagcagccacgccacttccagaaaatcggagttctcgcacaactgctcgatggggtagccacggtagcgcaggatcgaatgcttgccgtcgatgtaggtgattttcgattcgcactgtgcggtggtgaggaatccggggtcgagcgttacccagccgtcattgcgcagcttggaaacgacgatgccatccggccctgcactagccttcaccacgggcaggttgaacttgttcgaatcgacatcaagttgtgccgttgccattcgcgcaccttcctcttcatgaaccacttaccccaaacattaacgttcacacgttcgcgaacgctagtgttcggtactttatgtcttctgtgttaccgccggcgaatgccagtcgatacacgaaagccgaagtgcgctcatgctatcaaagcaaacgcacttcggcttgttacgtctcgaattcacgggaaaaccgcgaacatatagacggttgatgagataccgatcgcccatcacaggtcaatcagacacccgccatacgccaaacgccaatcagaggttggtgcgatcggtgaagatgatcgggccgttctcggtgatggcgatggtgtgctcggagtgggcaccgcgcgagccgtcggaggcacgcagggtccagccgtccttcggatcctggaagatctcgtcggtggtcttgaggaaccatggttcgatggcgatgaccaagccttcgcgcagcttgtagccgtggtgggcgcggccgtcgttcggtacgtgcgggtcgccgtgcatgatgtggcccacgccgtgaccgccgaactcgaggttgatcgggtagccgtattcgcgcgcgatgtcgccaatggtgttggagatgtcgccgagacggttgccgggcttggccacgtcgatggcggcggcgagcgcttcctcagtgcacttgatgatgcgcaggtcttcggggtccgggtctttgccgaccacgaagctgacggcggaatcggccacccagccatccacggagatggcgagatcgagggagacgaggtcgccgtccttcaggctgtaatcgtacggcacaccgtgcagcacggcgtcgttgacggaggtgcagatgtagtgggcgaacgggccggtgccgaagtcaggagcgtagtcaacatagcaggattcggcgcccttgcggtccacgatcttcttgtggacgaactcgtcgatttcgagcagattggtgcccaccttggtggtctcctgcagttccttcagaatgccgccgacgaaacggccggccggcttcatttcctcgatttcacgaggggtcttcaattcgatcatgaggttctttctaccttgttgagacttgttctcaactctagcccagcccggggtcaaccgccagagcatcacccgtggtctgcctagggtccgctagtagcctatcaacggccaaggccgagaaaaagcgcccggcagatacataacctgcacgggcgctttggattgattgtccggagattgattgtctggagcgcgagattacttgcgacgcttgccgaaagtgaacgcgcgaatcactgaagtaatccccatcaccaccatggcacatccgccgaagataatcatgaatacggcggagctcagcgggctcatcagcaccacgaagccggcgataatcgagatgatggcataggcgatggcccagccggagcgcgggatgcgccatgattcgactagagccatcacgccttccataatccaaccgaaaccgaccatcagggtgatgagtaatgccaaggtctgaccggtcataccgtagtttcgtacgactacgacgcctccgaaggtcagcagaatgccgacgaacacgtccagcacacgccagccgcccggcagacccggctccacgagagcgctgacgatgcgcaccacgccggaaatcacgaaatacacgccgagcaacaatgcggccaaagccagcgtcttgttcggcaccaacaacagcgcagcgcccaaggcgatggcagccacgcccaccacgccgtaaatgatgcgaatcttggtcttggccttttccggcagccattcctcgatcaggtggaatggactgaaattgccgacataccagttggtctgctgccagccgggttgactttgatcgccccatgaaccattcggctgcccgtccgcttggctattcgattggccgtccgcctgataccgccgaccgtccggaccccatgctggctggccgttcgggccatagttcggattgtaggcgtacgggccgtagtacgggttctggttcggtccgccttgtggctggccgttctgcgcctgctgattctgagtgtcttgcgctcctggcgcaccttgcggaggatattggccgccatgattgctgtcatacgcgccatactgcggttggcccggttggcccgccggattcggctggctcggctggctctggttgggctggcccgtctggccattccactgaccctcgtttggattgctcatcgtaactccttaactcaaggtccatattcaggttccacataccatgttaggcaagttacctaatttgaaccatcactacagttaggcaatccgtctagttcactgacagcgcaatacccataacgcaatatctgcatcaccaacgcttctcccccgccgcgattaggcttagggccatgaccaacgaaaccgaaacgctgacgtcgggcatcgacccggcatcgttctcctccgtcatcaagccgaccaatgacctgttccgctacgtgaatggtccatggatcgacacctaccgcctacccgacgatcgttcgcgctacggctccttcgacaagctcgccgaagacgccgaaaaccaagtgcgcgacatcctcgacgccgacgactgcccggccaccaaatcgcaggctctgtatcattcgttcctgaacaccgacgccatcgaggccgccggccttgacccgatccgcgatgagcttgacctcatcgattccgccatcgacaaggccgctctcacgcgcgtgctcggcaccatcaacccagccggcggccccgacctgttcggcttggccgtttacggcgaccccggcgacccggatcgcaatatcgcccaccttgagcaggccggcctttgcctgccggacgaagcctactatcgtgaggaccactacgcccccgtgcgcgaagcatacgtggcgatggtcgccacccagctggtgaacgccgggtacgcgcccgccgccgaatccaacggtggcgatgaactgccggccaacaccggcgatgacgagagcaatgctcccaccacggttcccagcgaagccgcacttgatatggcccgacacttccttgccgtggaaaccaagatcgccgccaatcattgggacaatgtggccacgcgcgattcggtgaagacctacaaccccaccgattacgccgatttggccgccacgctgaagaacttcgatctcggttcctggatcgacgcctggcagaccgcctatgacgccaccaaggccgccaaggctcagccgatcgatttcaagtctgtgttcgcgcgcgtcattgtgcacgagccgagcttcctcactggtcttgatgcgttctgggccgaggctgatctgaccgaccttaagctgtgggcccgtgttcacatgattctgggcttcgcctcctccctgtctcgcgacttcgacaccaccaactttgacttctacggcaaggtgctctccggtgccaagaagcagcgcgatcgttggaagcgcgcggtgagcctggtcaacggcgtttgtggtgaagatgtgggccgcgaatacgtgcgcctgcacttccccgaaagctcgaagcgccgcatggaagagctggtcgccaatctgattgacgcctaccgcgtgtccatcaccaattccgattggctgggcgaggataccaaggccaaggctctggagaagatctccaagttcacgccgaagatcggctacaccaaccactggcgcgattattcggcgctgagtgtctccgcggatgcgctgcccgccgagaacgccaaggccgcgaacctgtacgagaccggctaccagctggccaaggtcggcaaggcggtcgacaaggacgaatggctgatgaatccgcagacggtgaacgcctactacgagccgagcatgaacgtcatcgtgttcccggccgcgattctgcagcccccgttcttcgacccgaaggccgaggatgcggcgaattatggcggtatcggcgcagtgatcggacacgagatcggccatggcttcgacgatcagggttcgcagtatgacggcgacggcaagctcaacaactggtggaccgacgaggatcgcaagaacttcgaggcccgcaccggcgcattgatcgcccagtacaacagctttgtgccgctgcagctggcagagaagtacgctgacgagtctgataaggcgccgcacgtgaacggcgcgctgaccatcggcgagaacatcggcgatttgggcggcgtgaacatcgcgctcaaggcgtatgcattcgcgctcggcaaggcggcaggtaagcccgacgccgaagaagacggctcccccgccgccatcaaggcactgctcgataccgccctcgaaatggacggattcaccggcctgcagcgcttcttcctgagctacgcctccatctggcgcaccaagaaccgcgacgagctggccgaacagtacctgcagatcgacccgcattctccagccgaattccgcaccaacggcatcgccagcaacgtggacctcttctacgatgcctttggcgtgaccgaaggcgacgccatgtggctcgcgcccaaggaccgtgtgagcatttggtaatccccgttatgtaagagaaaaccgctgtgcttgcctcgattacaggcgaacacagcggtttttcatgatgtatggttggcactcagaattcggattcgctgggatcggaagattcggcgaaaccgtcgacgtaggtttgttgggctgcggactgtggctgattagcgccagcgtccggttgcgacatgacggcatcggccatggacgcagccgctgactcggttgatggcgacggcgattggccggaatcggaggtgaccccaaattcgacggggccagattccgacgaggtcgcatacgggtcaatgcccacaccggatgcggcaccgtccacactatattgcgttggcctcatgtgcggtgacgatgctcgttgcccgtttccgccatccatgccttcggcggcaccattggcattgccgttaccgttgccaccattgcctccgttcccattaccggcacgctgtggcttgatcagcgacgtggtgccgaaggtcaggtcatgcccaatgttggtggcttcgagaacggttctactgcgcggttcgccttgctcattggtccactcctcggtgatgagtgagccgaccacaatgatgcggtcaccgcggcgaaccgaactggcggcgttcacggccaaagcacggaacgctttgacgcccacccatgcggttccgtaatcctcccattgtctggtagtcgggttgagtcgactgcgggtgctgcccatacggaatgtcagcacgcggaaactctcagttccgcctagtgtcggatcaccggccacaaagccggtgacggtcactgctgcttgttgatttgccatgatcggtcctttcctcggcctgctggcctgttgtttggatgtggaccgccggagcctgtctccggcttcattgccggcttgcacgccccagcggtacctccactgtgaggcatgacgtttgaagcgcacaagggcaactggcaaatgtggatactgtgacgcagttgaaattttaagaatgtggataaatttcggttatccacaacaaagcgccattctgcgactgagcagaatggcgcttgatgcgattaacgccgaggctgagtaagtgggactcagctgagggcggcgaagcgctcggcgagcgcgtcggcggcttcggcggcgggcacggcgaccttgttttcgccgttgcggtcgcgcagttcgatggtgccgtcgttgacgtaatcgcggccgaccacggcgaccagcggcacgccgatcagctcggcatccttgaacttgacgcccggagacaccttcttgcggtcatcgtaaataacctcaaggcccttggcctcaagctcggagaccagcttctcggcaccttcaaacgccacggcgtccttaccggtggccaccacgtgcacggcagccggggcaatcacggacggccaagccaagccggcttcgtcgtggtgtgtttcggcgatgcaggccagcacgcgggaaacaccgatgccatagcagcccatccacaccggcacggccttgccgttctggtcgagcaccttcaggtccagtgccttggagtacttgagacccagctggaacacctggccgatttccacaccacgctcgaagctcaacggaccggaaccgtccgggctcatgtcgccgtggcgaacctcaacggcttccaccacgccgtcggccttgaagtcacggccgtacaccaggttgtagtagtcgacctcgttctcatcggcaccagtgaaccaagcggaacccttgaccacgtgcgcgtcgaccaggtagcgaaccgggttcttcacgccagcagcctcggcctgcgggccaagcaccatcggtccgatgtagcctggcaccagttcggggtgctgcttcaggtcttcttcagtggcctcctcaagctcggcgggagcgaactgggcttccagtcgcttcatatccaccgtacggtcgccgggcacgccgacgacaatcacttcacgccacggctcgtcatgctcttcatcctcagggtgcttgacggtaatcaccacgttcttgaggatgtcggaagcctgccattcacggccatcagtacgcgggtggtcggcgttggcacgctcaatcatgttatcgatggtcttggcatccggggtggcttccttggaagcggcgggagtggcggaagcatcgatttccggcagctccggagtgctcagggcctccacattccatgccttgccggaaggtgccagcgcgaaggtatcttcgccgatcggcatcggagccaggaattcctcggatgcggagccgcccatcgggccggacatggcgaacacaggtacgtacttcaggtcgaggcgctggaagatgcgctcgtaggcgccgcgctcgtcatagtaggccttgcgcatgccttcttcatcgatggtgaaggagtaggcgtccttcatgacgaattcacgaccacggatcaggccggcgcgcggacggaactcgtcgcggtacttggtctggatctggtacagggtgacgggcaggtctttgtaagaggagtacatgtccttgaccagaagggtgaacatctcctcgtgggtgggggccagcaggtaatcggcctcgtggcgatccttcaaacggaagatgttgtcgccgtactcctcccagcgatgggtggcctcgtagggttcgcgcggcagcagggccgggaagtgcacttcctgggcgccgatgccgttgatctcctcgcggatgatggcctcgatcttgttcagcacgcgcagaccgagcggcagccaggtccagataccgggtgcggccttgcggatatagccggcgcgctgcagcagcttggccgaatcgacatcggcatcagcggggtcctcgcgcagggtgcgcaggaacatggttgacatacgaagggtattggaagtcatgtgttccacgatattcgcgtgaaccgacaagcccgcctgctattcgcactattccggccttcatcttggcattcggactcattcgtacaacaatgatggctagaagggtaggagggcacgatgacgcagccgaccgagcaacaggggaatcagccggaacccgcggagcaaccggtgtatcaaccggcccagcatgggccccgcaattttctgctgcaaccccgcaattcccaacggcagttccgcgacaaccggtatcgcaacagccaatggccatgccaccatttgcgcaatcgcctatgtcggtcccggaacaagcggcctgtccggagcggccgcgctgattgtgggtgtgcgtttgctgcaagcaccgttgatctacggcacggtgattcttatcgtcagcacggtgactgtgctgtggccatggcgggccgaattctcccgccactaccggtgggtgtggcttgctttgggcggcatcattctgattgtggcagccgcgcgctatgaggcgagcctcaaatcaatgaggacgatcgccgcgcgtattggcgatctgcgctaaatcgcgcgggcgacctgaggcagattaccaacgtccggcgatagcagtcctgcatacggggcagtgcccattgccactgtatccggcagataaacggttggcaatgattcgataccaatcgcgttccacgagcttggccctgcattcagggtttgggcaatatgtggtatcgccttcacgatcatgcacgttgccggtgtacacataattgagtccctcttcgagggcgatgcctcgggcgcgggtcagagtctcgtgcggggtgggcgttacgtccatcatgcggtaactggagtggaatgcggaaaagtgcagcggcacgtccgggcccacgtgctcgcgtatccatgtacattcagcatgcagctgggcgtcgtcatcgttgagtccagggatgagtagcgtggtgagctccacccacacgtgttcgccttctggtgtgcgtgcctcgttgaccgcatagtcgatggtttcgagcacatcggccagatgcgtgccggtcactttccaataaaattcttcggtgaagcctttgagatcgatgttggcggcgtccatggcggcgtagaagtcgggccgggcttcggcgctcatgtatccggcagtcacggcgatgggatgaatgccgagcgctcggcaggcttcggccgtgtcgatggcatattcggcgaacacgatcggatcgttataggtgaacgccaccgaatcgatgccccggtcggccgcgacctgcgcgattttctccggactggcttccacgccgagccggtcgaaactgcgggctttggcaatatcccaattctggcagaatcggcaaccggaattgcagccagccgtgccaaaactcagcacgctggaaccggggtggaagtggttgagcggcttcttttccactgggtccacggcgaagccggagctgcggccgtaggtgtcggagacgatgagtccgtcgtggtttgagcggacgaagcaaaagccgcgttggccgggcttgaggacgcagcggcgcgggcatagttcgcagcgagcgcggttggtaccgtcgtggaattgcgtttgccagcgggctatggcggggttacgaacatctgtgactgacgccgtatgaccgcacgattcccggtggccaccctctgattctcggtgaccaccctccgtcgcttcgcgccacctcccgccagcgggaggggacatggttgctgcgttagtgctcggcataggcggtcacctcgtagcgttgacagtcgatttcgccatcgttccagtcgtaggacgggcggataccggctttggcgagcaggtgagtgacgaaatcgtgcggattgggcagctcatcccacacttgtggcaggaatgtggcgctgcggccacgacggtcggcgagaatcagaccgtctttgccggggcgtaatacttcctcaagttcagtgcgcgaacgtaccgggcgttcgacgttgctgccgtcccgtttgacggcgtcggtctgaggtccggattgcagcgatgccagagtcgcggtcttcgagccggtatcgcgcgaatcggcgtcacaggagttcacggtaatcggctcgggcgcgcccaagacggatatctccacattgagcaacgggtattccgcggcggtgaccgggttgaaacgtgggtcacgggtggcggcgtccaccgcatgtgcagctatgtccttgccgagcgagcggtgggcggccagcgaaccgatgcacccgcgtagccggccaccctcggtcagggtaacgaaacaggcaccggactcgttcagccatgggtctgcggcaagaatggacgcggtcgaatcggcggcggtcggatgctcgatatgcaaccgttcccggatagcggcacgggcgagtttcagcagcacatcaccatgggctgttcccgattcgcctaagtcatctgcaccggctggagcatctgcttctggtttggatccccacgcggcaaacgagacatatcccactaccggctcgtcggcgtctcgcattgcggggcgaggttggccggcaagcgccaccacgccgtcgtcgccggaagtggaacagccgagctcgaagagcttcatgtccttgcggccttttaacacatccagaaggccgttgatcgggtatgcgccacaggcccggcgagggtgaatcggcagatgcaaagccgcaatgtccgcaatggtctggtcatccaacgcgcgggcgacttcgtgcggatgatagtgcgagagatccgaactaatcacgatgacggtttccgggccaccccacaaagcacgcaacacatcacccgcctcttgtggcgtggcatcgcccgcgttcaacggcacaatagtgaggtctgggccgagcacggtttgcaggaacggaatctgcacttctaccgcatgttcttgtgcgtgggttgggccattgacgatcattgcgggagccgacgcgcccggacgggcatgtgtaccggagcgcaatggctcattgacagacaggcccagagccttacgctcggctgcaatgtctaccggcacagtgcccagcggcgtttcaaacgccgctgccgtggaacaggcgacgcctcgcacggccacacggtgagtcggtcccacgattaccgcgcgagtcacactcccccgccctcgttcgagcaaagcataggcaagcgcggccgccgtgccggaatacacataaccggcatgcggcacgattacagcctttggcactcccgctggaagcgtgggctccaactgttgcagaacctctcgactgtaatccaattgatggttaatgagttgcttgagcgttgtgcggtcagcggggtagaacgaaccagccaccgctggcggacgtattgcgccagtgattttgccgctgccgtctgccgcgcttgctgcatctgacgcactagccacactaaccgtatcgatttgcacaccggcccggacggcctcgcgaacctcattgtttccacgaaatatctcggatagcaccataactaccacctcttattccatggtagccgttcagttcctcaatgaagacaagttcgcagtgtcttcttcggcttcaaggggccgattccgccccttggagacatctacttgcgtttcgaggggctggtcatccgctcaatcgcacatagaaacggcttcataccaacgtcattccgccgtttttaagcgttgtctacttggacatcagccccttgaaacggaagtagatgtcccgaaaactcaaaatccgcccctcgaagtgcagaaacactcaaattagcggtcgttcgatatatcgaccgtcagaataacgcgtcctgggcgaagtcatcatcgggattgacaccgaattcgtccggctcggcgggtttgaacgcggttgcaccttcatcggccaactggtcggaggccgaggccgaggcttcgcgcaggtcgccgtcgagcaccacggcatcgggcgagacgaggaacatgcgttcgttgacgccagccaaatacagtccacccagcgattcgactcgtgacagcgccacatatcccatgcccggcgcgaaggtgcgcttcagatccatgaccgcacggtcgagcgtcatgccttgcgatttgtggatggtgatgccccacgcgcaacgcaacggcacttgagagacggaggcgagcacggtgtcgccgtccatcatttcccatgtggcctgtttcatggtgacgatgttgccgttttcgaattccacgatcggccagccgcccttgttctcctgcgcgaagccgcgcacggtgccgagcgagccgttgacgtactggcgatcggtgtcgttgcgcagggccatgacagccgcgccttccttgagtatcaatcgctcgggggccaacatgttctttttgagtcggtcgaccaggttggcagggcctgctgtctcggcgtggaactcgtgcggctcaagcatgatctggttcaggcgcatgtcgttgagattgtcggcctgccggttcaccgggaataggtggacggcgacctggccgggctcgggcagtttgcccagacgggtgacgagcacgtcacggtcggactgggtcacgtcgccttcgcgaatgtcggtgagcacggtcagcagttcgccggtgtcctgacggtgctgttcggtcagatagcagatcaccgggttgagttcgggccataccagcgattcggtgatgaagccttcggggttcaagccggcacgggcataccgttcgcgactggcgatgaattcgggggtgggggcgatgaggtcgcggttgcgcccggacaccgaaaccggcggcagttggaagaagtcgccggacagcacgacctggatgcctccgaacgggcgtgggtcgcgacgcacttcgcggcagacttggtcgaccatgtcgaacagccatgcgtgcagcatggagacctcgtcgatgacgaggatgtccgtagcctgaatcttgcgtttgcgccgggatttgatgagtttgagcagactcgggctcagggcggtggccacgccgacgccgctccacgaatggatggtttggccgttgatatgcgtggaggcgatgcctgtggacgcggtgactgccacgctggcgccgtcggcccgagcctggcggatgaactcgttcaagacataggtcttaccggcaccgggcgcaccggtcaggaacacgttcgcgccggcgttcagaatggctagggcttcggtttggcgcatatcaacctctctagactcccctcagggaggggagccaagtacggcggactacttattgagaatgctggtggccacgatgtcggcggcgatggccttggaggcggcatcatccgggccggggacgggggccatgaaggccttacggtagtagcgcaactcgtccaaggactcgatgatgtcggcgagggcacggtggccgccgttcttcggcggacggttctcgtagacggccgggtaccagcggcgggcgagctccttcaaggtgctcacgtccacgctgcggtaatgcaggtggctcatgaggcccggcatgtagtggtcgaggaacttcttgtcggagccgatggtgttgccggccagcagcgggcgcacgccttccggcgtgaagcgcagcacgtattcggtgaccttctgctcggcctcggccagtctcaggccattctcccactcgttgatcaggccggaacgggtgtgcatctggcgcacgaaatcgttcatgtggttcacagccttttcggacggcttgatgacgtaatccacgccctcgtccagcacattcaggtcaaagtcggtgggaaccacagacacctcgacgagttcgtcgccgccgaagatgtcaagtccggtcatctcgcaatcgatccaaatcaggcgcgagtccttcgcgctgtacgtttccgcgtcatggctgtcgaccatggtgtgcctcttttcttcgctggtcatcgcttatgcagaacagttcagactataccccagcgcatacaagctatctcgagccacatacgcgaaaagggcctgcatacgcagacccttttcacaagaaatcaacccctaactagcgcaagctagcgggcatcaaccgatcagttgttgtggaagccggagtagttcggggcttcggcggtcatcacgatatcgtgcgggtgcgattcgcgcagaccggcgtcggtgatgcggatgaacttgccacgctccggcatctcggcgatgttgtgggcgccgatgtagaacatggactggtgcaggccaccgagcatctggtagagcacggcgttcagcgggccgcggtacggcacttcgccttccacgccttccggcacgaccttgtcgctggaggtcacgtcggcctggaagtagcggtccttggagtaggacttcttgccgcgcggggccatggcgccgagggagcccatgccacggtacagcttgtactgcttgccgtgcaggagcaccttctcgcccggggcttcctcacagccggcgagcgtgccgccgagcatcacggaggaggcgccggccacgagggccttggcgatgtcaccggagtagtggatgccaccgtcggcgatgcagggcacgccagcggcacggcaggcctgggcggcctcgtacacggcggtgagctgcgggacaccgacaccggcaacgatacgggtggtgcagatggagccggggccaataccgaccttgacggcgtccgcgccagcctcaatcatggcctgagcaccggagcgggtgccgacgttgccgccgatgatctgcacgccgtcgaaggcggagtcgtgcttcaggcgggaaatcatgtcgagtgccagacgagcctcaccgttggcggtgtcgaccacgagcacgtccacgccagcctccatcagagcggaggcacgctgccaggcgtcgccgaggaagccgacgccggcggccacgcgcagacgaccctgctcatccttggtggcgtccgggtactgctcggtcttgacgaagtccttgacggtgatcaggccggtcaggtggccttcctcgtcaacgagcggcagcttctcaaccttgtgctgagcgagtagacggtgagcgtcgtccttggagatgttggacgggccagtgaccaggttctccttggtcatgacatccttaaccttcagggtgtcgtaatcctcggaggcgatgaagcgcatatcacggttggtgatgatgccgacgagcttgttgtccttgtccacaaccggcagaccggagatgtggaacttgccgcacagcttgtcgaggtcggccagcgtgacctcggggttgacggtcagcgggtcggtgatcataccggactcggaacgcttgaccacatcgacctgagcggcctggtcgtcgatggacagattgcggtgcaacacaccgatgccaccgttacgagccatggcgatggccatctcggactcggtcacggtatccatggcagcggagaggaccggggccttcatcacgatcttgcgagtcagatgagtgctggtgtccacttcggagggaatgacatccgtctcgttcggcaacagcaacacatcgtcataggcaaggccgagcttggcgaaaatcgggggaaggggagcatacgccgactgggcgtttaattcatcaaggtttgtagccatgtaaacactatatgaaaatgcgctgaccttcacgacacacgcttgtgagcgctcacttatccgctgccgggtcctgcacctcacccacctgcgagtcccgcgaatttgcaggcgaatcagtcatcgaatccgctgcctgagagccaatcgaatcccggctctcccctactgcagactgcgatttaggcactgtatgctgcgcgtttttacgtgcggattcgaacgtcaggttctcggcttggatctcgggaatacgatgccgcagataggggtacatcgtggctatggtcagcaccaccacagcgatggccatgcccacggccacgtgctgcgctttgaagaacagaatcgtcagcgaaccgaatgcgatcaacgcggcccatccccacaggatcagcacggcgccacgcaccgaatgcccgatcttcagcatgcgat

SEQ ID NO: 3260 - DNA, 5929 bp, Unknown
  R53_2m  MAG No. k141_9288
ccgtcaccacccatggcgaggaacagccggaccaaagctacacattcaactggaaataaccgctccgaacatcatgtctctcccgagagtagtcctcacaacagggcaggtcccacaaggagcatagctcatgcacccactgtccggtctcaagcccatgagacacttggagccatgactaccattatcatgcgcacctccgagggcgacatcaccatcaacctgttcgacgacaaggcaccgaacaccgtggccaacttcctgggcctcgccaccggcgagaaggaatgggccgacccgtacaccggccagccttcccatgaacccttctacaacggtctgaccttccaccgcatcatcaaggatttcatgatccagggcggctgcccgctgggcaccggcaccggcggacccggctacgaattcgacgatgagatcgaccccggcctgcaattcgacaagccgtacctgttggccatggccaatgccgggctccgccgtggcatggacggcaaaatccacgggaccaacggctcgcagttcttcatcaccaccatgccgaccccttggctcaacggccatcacaccatcttcggcgaagtcgccgacgacgcctccaagaaggtcgtcgacaagctcgaagcactggacaccgattcgtccgaccgtccgaccgagcccgcaggaatcctctccatcgaagtgaagcggtaaaaaccgcccacaccttcatgtcacaagtggcatacggcggggccccgatctgacgattcggaccggggccccgccgtatgccacccacatccctacttcatcttgcgcagacggggttcggcggattccttggcaccggtgatgcggtatacgtcaaacacaccgtcgatcttgcgcacggcagccaacagcgagttgagatgctgcggatccgccatctcgaagctgaactggctggtggccactcgatcggaacccgtggcgatcgtacccgagatgatattcacgccatgatcggaaagcacgcgcgtcacatccgacagcaggttgcggcgatccaatgcctcgacttgaatcttgaccatgaacagacccttggtgctggtccattcgacctcgaccacacgctcgggctgcttgctcttcaagtcgatcatattctgacaatcggtgcgatgcacggacacaccctggttgcgggtgatgaatccgatgatgtcatcaccgggcaccggcatgcaacaacgggcgagtttgatccacacatcgcccacgcccttgacggataccccggtggagctgctggaagtcttgcgctccacgggcttgagcggcagaacctcctgctcgacctcttcatcgacctcgtcggcacccgcgtccttgaccaaatgcgaaatgacgttctgcgtggagacctgaccgtccccgatggccgcgaacacggcgtccgcgttcgggaagttgagatcgtcggccacacccaccaacgcttccggagtcaacagcgtgttgaccggcaggttgcgtttgcgcatcgcccgagtcagctcgtcgcgaccctcctcgatggcctcggtgcggcgttccttggagaaccattgacgaatcttattgcgcgccttcggactcttgacgaaactcagccagtcgcgcgaaggcccggccgtatcggatttggacgtcagaatctcgacggtgtccccattgtcgagcgtggtgtcaagcggcaccagacgtccgttgacacgtgcgcccatcgtgcgatgacccacttcggtgtgcacggcgtacgcgaagtcgacgggcgtggcatgagcgggcagggatacgatcttgcctttcggcgtgaacacgtagacttcggacgagccgagatcctccttgagcgaacccagaaactcattggagtcgggggtttcgctggtccaatcggcaagctgctgaatccatttgagattgtcggcttcggaaagctcctggttcttctcgtcacgcctacggtcggacttgtccggcgagctcagggcgcggccggcctgaccgttctccttgtacttccaatgcgcggcgatgccgaactcggcacgacggtgcatgtcccaagtgcgaatctggatttccaccggcttgccgcccggacccaccaccgtggtatgcagcgactggtacatgttgagcttcggcatggcgatgtagtccttgaaccggccgggaaccgggttccaccgcgcatgcacggcaccgagcgccgcatagcaatcctgaatcgtgtcgacgatgatgcgcacgccgaccagatcgtagatgttcgcgaaatcatgcccgcgcacgatcatcttctgataaatcgagaagtagtccttcgggcggccggtgacgtatgccttgatgttctgctcatcgagatcctcgttgatctctgccagaatctgcttcaggtacacatcgcgctggccggctcggcgagccaccagcaccacgatctcgttgtagatcttcgggtagagcaccttgaagctcagttcctcgagctccgtcttgatggcgttcataccgagtcggttggccaaaggggcgtatacgtcgagggtttcgcgcgccttcttctgggcggacgtggtcttcacatagcgccaggtgcgggcgttgtgtacgcggtcggcgagcttgaccaccagggtgcgcacgtcgcggctcatggccaccaccagcttgcgaatcgtttcggcctgggcggagtcgcccacttcaagctgactcagcttggtaacgccatcgaccagaccggccacggtgtcgccgaactcggcacggcattgatccaacgtgtagtcggtgtcctccaccgtgtcatgcagcagaccggccgccaccacaatcggccccatgcccagatccgcgagaatctgggaaacggccaacggatggatgatgtatggttcgcccgacttgcgccgttgcgtgcaatgctggatgacggcgcgccggtacgcgcggtcgaggatggacaaatcctcaccgggatggtgggacttgcataccttcttgattggatccagcggattgagcggatcggcgctgatctcgcaacccagtttacgggcggcgtactgctcgccatcaatctctgccatgccagtcacctccctcgtcatgaagttcattgtaaccgcgaaccagtgccatgcgcacgcacccgcccgccatcattggttccgcaaccgttgttgccgtcatcaccttggtcattcaaccggcctaatccggtcaggacgccactcccgtcgaaccgaacccgcgttcggcgcgatcggatccgggcagtgtctcggccgggatgaaccgagcctcaacataccgctgaatcaccaattgagcgatgcgatcgcccggatggaagacggcggtgtgcttcggatcgaggttgatcagcggcaccttgatttcgccacggtagcctgcatcaacggtgccaggcgcgttgagcacggtgatgccctgcttggcggccagcccggaacgcggatgcaccaacgccacgtagcccgcaggtagggcgatggccacgccggtgggcaccagtgcccgctcgaagggcttgagggtcacgtcgacggtggtgatgaggtcggcaccggcatcgcccgcgtgggcatagtgcagctgggccggatgttcggggtcgaggcttttgaccaggacctcggtggattcgggctcgttgtaggtctcgtcgaacgccatcaggcggcgcactcctcacacaccggctggccatcctcgtccgtgtaggcgagctggctacgatgcttgaccaggaagcactgcgagcagatgaactcgtcaccctgcatggggatgacggtcaccgaggaatcctcgttgctcaaatcggcgcccggaagttcgtagtcttcggcgatggcgttctcatcgtcgtcgatgtcacccgaggcgttctgcgaggacttccccagcgcctgcagcgattcctcgtcctcatccttattgcggggggaatcataatcctgagccatcatggtcctttcgtcgtctttggttcgtaagtcgatatatatagcacggtcagcgccgtactcgcccataggatacacgatttgaaatactcgtaaagttcgacacgtggggcatacttaaaagaagtaatgtctttgcgacggaaagtggtgcgaatatgccagatgatcggcttgaaaaagcccgtttcgtacgcgtgagcaagacgggggacctcgtattctccattggcggcggggaaatggctgtgagcgtggacgacacgctcgaacgggcgattcttgaggccaagcaggtcagaagcgagatgcgacaggctccccagccgcatcagcagtccactttgccgatttcccagatacagtcgctgattcgcgccggtgccgatccggcccgtgtcgcggagaaatatcatctgagcgaaacgctggtacgtcgtttctccatggctgtggaaaccgagaaacagtatgccatcgaacagttccttgccgtggcggcacccaaagacagcagggtgcgcaccatcagcgaactggtggaacgcacgctggcctctgcgggaatcggcatggaatcagtgacctggaaatccacccgacgcggacttgagccttggcgcatcgtggcgatattcacttccgcgggccgtgagatccatgccgaatggacgtggaatatgcacgacaattccgtaatgagcctgaacaatgccgctcgaaaactgctcggcgaacagagtccggaatcagccacggattccaaactcaagccgacgattcctgaactgcccggcgactccgtacgttccgcgcgtatcgagcgcgctgtgtctgcttgggcggcgcctacgccttcgattccggccgcacggcctgcagcaatccggccctccgtcacttccacaggttccatgcccccggtggacctatccacgtccatctcaccggccacgaaccaggctcatgacgctacggcccccagcccggtctcttcgcagaccgccggatctgtttcgtcatctgccgcaggattgcagcaatcgcctgccacggcaccagagcagggttctgacaatatttcggacaagaccgtacggcgtggccccaatgcacagctggcagccaccgagcaggagcgggcggccgaatccgccgccaccaaacacgaggcaccagccaaaccggccaagcgtaaatcaggacgttcggccgtaccaagctgggacgagattctgttcggagactgaatttccgaatcaggccatatcgatcaggcagggaatatccatttccaatgccgtttgggagccatgcacgctcggcaggtgggtggctttgtctccttgcgtacgcgaatcgacgagggtcacggctcccgctgcctgcacgaccacatcgccgagcatcggccggactcgctcgcagaccggtccaaacaatccgtccgcgatggcctcatccctggtccgcaccaaggctcggtcttgcaggtaatcgcgccaccggcaagctatatcctcaggtcgttcatccggctcggcatacagcatcagcgagcgcggctctcccccgaccagtgacacgcctcgggtgagctgcggttcaacggcgatgtcaatccgctggtccatgtcggtttgcaccatgccgtggtcggccacgatgacgatcagcgtgcctttgggtgcgctgcgtttcaggagcgcgagctgggcgtcgatatgttcgaatgcggccacccagtgttcggaatcccacccgtaattgtggccgactttgtcggcgtcacggatgtacaggtaggtcaggccgggggtgcgtgaggcgcgtgaggcggccagcacacgatcacgtggggtgacgttgccttgatagtcggtgcctcgcaatgc

SEQ ID NO: 3261 - DNA, 3207 bp, Unknown
  R53_2m  MAG No. k141_9319
gcgatatggcattgcgggattgtcgggattcatgaactgcacctgcagcaggggaatgccgaaagacaattcggtgatctggccacgcatcaatgattcgccgccgttttcgctcaggggatccgcgtacttcagcagcttggtcacggagacctcgtcgcagacgctttgaatcatcagcgactgcacctcttcgatggtcgtcagggactttctcagagccgaatcgtatatgggcagcgcctgtgggaatgggaatgccgcgcagtcgagcagcgttcgcgccggagtcgtcaagagaatgccattatgcttccgcgtcggaatccgattgatatagatgcggttgagacgcgcctcgtctccgccgccgatgccggacttcgaggcgatgtgcactgtgccgtcgtgcagggaatagttgtgctgtagtccgtatacgcacgccgcactcaaccccgcaaatacccactgagggtggattgcggacagcgcacgtatgacctgcaatgactgttgctctctggtcatggtgttccaaagtattcggtcggcgtacaggttcttatacggtgacaccagctccccggcatgcaggcgacgtttcagggcgcgccgttgcgcatcactggtgccatagcagcagcgacgctcctgcttcgcctgctgcagcagtgcagaaacttccttgtgttctttcatatctcgacgctaagggtgattttgattgttgcacaagctcaaccggcaaatgtgaatactatgtcacgcgaattgttggtgtggataacttgaatcgacgtcgacggctttgccgacggtcttgtcggaggcgatattagcctaggacaccttgctgcgccgccttccataccgagaacagtcatcagtgacaccgagggcatcttcagcgtatgttcttcacgaaatcagctgccatttcgtgaaaaccgtacgctcagaatgactcagtgtacgttcttcacgagatgaggccccatttcgtgaaaaccgtacgttgacgacgattcagtgtacgttcttcacgaaattagggatgatttcgcggaaaccgtacactcaccgcaactcagcgtacggttttcgcgaagttattgatttggatataggttccccgtcatgaactacaatgaatcgcggcgaaaaacggggaaccgaagtcggagcgcggctgaacggatatgggtgtgactggatgactgccatggtgatgccggttctccttgacgtacgcaataacaacaactgacaacaacaggggagacaaggatggcgagaagtgcgggccgcacccgaccggtgatcaaggacgtggccagactggccggagtctcggcaccgaccgtctcccggtatctcaacggcaccgtcaacgtcaccgaagacaagcgtgaacgcatcgccaaggccatcaaggagctgggctatgagccgagcattgtggcgcgcgccctgtcgaaccgggagatggactccgtggtggtgttcgcggccaatccttccgccttctccacgtccgaagcgaaccatggggtcgaggccgccgcccgtaaacgtcggttcctgctcaatatcgtttctttggatgagtccgacatggactccgtcaaggctcgtgtgcgcatgggtttgtcgatcaggccggcgggcgtgatcgtctacgagtacgaccgggccggcatcgccgcactggaatacattcccaaagatatgccgatggtcgtggtgggtggcagcttcggcgacggcgaataccagatcatcaacgccgaaagggatggtggccgttggatgaccatgcatctgctggatctcggccatcgcaccgtgttccatgtggggcgcccggaaggaccgaccgataacacccgcaccaatgggtggcgtgacgcgctcaaggagcgcggcgtcacggtacctgacccaatcatcgtgcccgacgatgatttggaggagtcggtcaaggctgggcgcaccttgggccgtcgtggtgatgtgactgcgattttcgccggcaacgacgagaccgccatcgctgtgatccgaggtctaagggaggttggtcgccgcgtgcctgctgacgtgagcgtcgtaggctttgacgaccgcaacttcggtgccatgtggaatccggcgctgaccagttacacccagaacttcctggacatgggggagcggtccttccggatgctgttcgaacagattcaggccaagcgtgccggcgatgacgcgccgccctcgcaggtcgaagtggtgcaaggcaagccgtgtctgcgtgcctccgaacgcgcgtacggcgacggcgaaatcgcgtagtcgatggggcgtgcgtatcaatcgatagtgactgtagcgcattcatatcgtgacgaggagtctcccatgccgaactgtaagcgcttaccttaaatagttcgtaatgtgatttacgtcataccaatagatgttctgaatcatagtgttatgcaaggattccttgcggaaaatggctatttatcaacagttttcgaaaagtccgcatgatgggcgactgtgagcacgctttatggtaatcgctttccgtagtgttattgttacagtgtgacttttgaacaatcggtaactctgaagactcagccccagacctcgggcactatctcagcggcagacgccgcgatgcaatcggcccgcgacgaacgcatccccggcaaactcatctgcgcgatcgtggccgtcggctcactcgcattcttcggcatcctgaccgaaaccgtgatgaatgtgctgttcccgcagctgatgggcgtgctccacatcagcgaggccaccatccaatggctcaccaccggctatctgctggtcgtgtcgattactgtgccgctcagcgcatggctgcgccgtcgcttccgccagcgcagcatcttcctggcggcaacgcgatgttctccacgctgcagcagttcacgggtgcggccggcaccactgtggtgggctaccgtgatctccgtgttccagtccggctcgggcaaggtgggttccgccggctatgccgccgccaccgtgaccggcgcatagattgactacgcgatcatggctgtggtcatcgttatcgttatcgtgttcgtcgccatgctccacgccctgcgtaaccggaagtagatggtaagtcgagtggcaccatgctaccgcgcaatggctgggcatgga

SEQ ID NO: 3262 - DNA, 16717 bp, Unknown
  R53_2m  MAG No. k141_9387
atagagagacaacgaattagggaaccatcattatgaagaaaagccttgtatccaaggccgctgccctcgtgggcgcccttgctatgactttcggtttcgccgcatgtggccagaccaacaccgccgactcctccaactccaacacctccgacctcaagaaggtcactttcatgctctcttgggcacccgataccaaccacatcggcgtgtacgtggccaagaacaagggctacttcaaggacgccggccttgacgtggatatcgtggccgtggcccaggccggtgccgaacaggccgtgaacaacggtgtggccgacttcgccctgtccaacttgaccaatgtgggcatctacacgctgaagggtgctcacatcaagcaggtgctgcaggtgcagcagaagccgagcgccatttggtgcgcactggcgtccaacaccgccatcaagtcccctaaggatttggatggcaagaccttcgccaccttcggctccaacgagtccgacgccgtggtgcgccgcatgatccagaccgacggcggcaagggcgagttcgacaaggtgaccgtcggcacctccaccttccagaccatggaatccggcaaggccgatttcggcggcttctacgccacgtgggaaggcgtgcaggccgacatgtacggcccgaagctcaactgcttcaccgagcctgactacggcgtgcccggcaacgccgacgccatcggcatcatcaccaatgacaagaccatcaagaacaatcccgacctggtcaagaagttcactcaggccactcagaagggttacgagtacgcgtacgccaacccggatgacgccgcgcagattctcgtggacgaagcccctgacgccaacctcaagcccgaattcgtcaagaagagcatgcaggttatcgtcgacggccagtactggggcgatccggccaagatcaaggacggctctttcgtgctcggcaccaacgacttcaagggcactcaggaatacttcgacttcctggctgaagaagacgcttacaccgacagtcacgacaaggtgattcatgaggccccgcaggccaaggaccttggcaccgacgaattcctcggcaagtaatttccgatattccgagtttgaatctacgcaaaaatgcgtccttcccatgaggaaaggacgcatttttgcgtatcggccgataaggttattcatagcgaatcatgctaacaaggaggcgattccatggcccaacgtcctgaccgcattattgccagcatggataccggtgttgatgatgcgttggcgttggcgtatttgttggggtcggcggatgagtgcgagctgagcggtgtgatcgccagttatggcaatgtggatgcgaacacggcttatgccaatacttgcgcggtgcttgatttgtttggccgggcggatattccggtgtttttgggctccgagcatccttcttgggctgatgcgtttattcccgatgcagggtgtgcccagtttcatgggaaggatggactggggaatacttggctggcaggggccggggctctggctgatggagctggtgtgcctggtgatatgtctggggatgacatgtctgaggatgtgcccgatggggttgtttctgttggcgggtatttggtaggggacgctcatgctcatccggcgtcggggtcttgttctcgtgtgggtcgctctcggcctgtggaccgtccccagtcggctacatcgacagctctcgccagctggggcaaaaggaggcgctccgttgatgctgcggatgggattgagtatctgattgagcaggttcgtgagtttggccgagacgttaccgtgctggctaccgggccgttgacggatgtggatgcggctattactcgggcaccagatattgcgtcgaaactcaggctggtgatgatgggcggtacgcttacccaacccggcaattgttgggatgcggtggccgagacgaatatcatccaagaccctgaggccgcgaatcgtgtatttcattccggcgcagacatcacaatggtgggacttgatgtgactcaccagtgtttgctaccgcgatcggcggccgaccggtggcgtgcgacggggaccaagcgcgggcggttcttggctgatctcgcggacttttccatcaaggcaaatttggaagccgaccccgcactgttctctggcggcatgccgttgcatgatccgttggcggcggcggttgcacttgattcttcactggtcgattgttttgatcttgcgttgcgcgcggagaccaataccggtgatttcaatggagtacgaggccggaccaccggagacccggttgggctggtgaatcattccatgccgcatgtgcatgtggcacttggtgcggattcgggacgttttttggatgagtttgcagagaggatggctgaggtgtgccggtaactcccctcagtccgctacacggacagctcgaccgcaattacggacaagctgccgctcgcattcttctggctcgactctcgtctcgccttcgcctacaaacagcccatcgggctgtttgttttacggctcagccccctcaattttgaggggcttaacaaggactatttcacacccccagcaatcaaggaccggcttcgccggactcatcattacctggtcatgtcctatcggcctcggccaggcggcgtgaacgaacagtccaccggactgttctttatttcacgccgccaaatcggcgatcgcggtggatgtaatggtcgatggagcgccatagcacgtcacggccgcagtccgggaagagttcgggcacgaagtcgagctcggcgtaggcggcctcccacggcaggaagttggaggtgcgctgttcgccggaagtacggatcaccaagtcgcaatcgggaacgtccggattgtacagatggtcggcaatcatcttttcagtcacacggtcgccggaaatcttgccatcacgcacttcgcgagcgatggcggcgcaggcgtcggcgatttcagcacggccaccatagttgatgcagaacaccacatcgatgaccttgttgttcttggtacgctcctcggcggcctcaagctcgtcgatcaccgacttccacagcttggggcgacggccggaccaacgcacgcgcacaccccactcgtccatctgttccacgcggcggtggatgatttcacgcgagaagcccatgaggaagcgcacttcctggggcgaacgcttccagttttcagtggagaacgtgtacaggctcaaataccgcacaccggcttcgatggcaccggcgatagtgtcgaacaccaccggttcggcggcctgatgaccattggtgcggaccatgccgcgctgcttggcccaacgaccattaccgtccataatcacaccgatatggcggggtaccttgttcttggggaagtcgggaatacgggcagggtcgctgaacggagctgcgggaatgtccaacgacgtgtaatcaacgttctcaaaagccatactcatgaatctatcaagcgcagcgaacgaatcgggcgttcgaggtaatactccccccaatcttcaaccaactcctgcacaacccgctccacaggcgcggcatcaagcaccgaccaatcgccacgaatcagtgcatcgaactggtttaacacgaacggcgcgatacggcgcgcatcggtagtgtggtcggcttcgcacatcacgccgccggacgcgatggacaggtacgccggctccgccttgccgcataccacgcaagtacccaatcgtggcgtccaaccggccaaggccaaggcgcgcatcacataggagtcgcctatggcttgcggggcgtgggattgtttggcgagcgcgttcaacgcgccgatgagcagccgatattggttcgtcagctgctcgtgttcggtgctggcgagtttatcgatggtctcgacgatgacgttggcggcctcatacgccgcataatccgccgcgatcggagcaccgtaagcggcgaccgcttcagcctgggagaccacgtcaagcgagcggccttcagcgataagcacatcgactcgcatgaacggctcgagcctggcaccaaagcgtgatttggtgcgacgcacgcctttggcgaccgcccgaatcttgccatgcccacgcgtcaggatggtgatgatacgatcagcctcgcccagtttggaggtgcgcaacaccacaccttcgtctcggtacagcgacatctcatctcctttccccgcgacgcccggcagactctactcaatgaagtagtcagtaaataaacaggccccagaaggcgaacaccaacagtatgtacagcatggtgaaggccaccagccagaacaggactcggcccagacgggtggaggcgagtaccgggtcggcaccggtgacgatgtctcgaacggattcacgacgagggggtatctgaatcagtccgcgggcggaagcgacctctatcagatgcataaagacgcgggaccaagcccatagcaccagcacggacaccacttggatgaccggccagctccaatacatgacgcccggcgtctcggtaggagcgctgccccatgcaagtttgaccacacccataatcacctgtccaagtccggcaaagaagatgagcagtgtggcaagagtggtgagggtcaaagtcagcagcgcgttgccgaaaccatgtgcgaaaccgagtatcacaggccgttccggtatcagcatgcccgcacgtttggcctcgcgtttctcgcgccgccatcgggcatccgccgcgattttgcggcccagcgccgccagtgccagcacgatggatgcgagcagcagcagtaccaccgtgacgtgcaggatcacaccatatatggtgccgacgcgtcttgccttcaaagcgcccggcagaccgattgattggtacagattggtgccggccaccttttcgctggtctgcgtgagtccggcggaagtgccgacggcccaatcgatgagatcgtccacataggcgtccgcaaacggggtgcccgcttcggactcatcccccaaacgcagcacatggttggcgaccggatagctgcgcacggtcacgttccagttatcggctttgtgggcgttgtagagaatcgcacgcacgccgtcgacctgcgccgtcatcacgtcttttgaaccgtaagccacataggtgggtacggcgtaagcggcgggtttgagcgtggcgaggtcggaattgttcagtccgaacaggccggtgtccgcgctgaacacgcgttggacgatggatcgatagccctcgttcgcgccgacaagagtgaagtcctgggtgacgaaaaatcccagtgattggcgtgggctgaacaccatcgggctcagaagaatctggaaggcgacgtccggatcgtcctcgagcagatatgaggagatccatgtcgattcggaggtggcatagatgccgaccttggcggcgtctacatcgctttgggctcgtaggtattcgatgacctgatcatatgccttggctgaggccggataatcgcggttgatgtcggtggtgctccagacgggtttgtcgagcactgcggtcacaaagccggccgaagccatatcggaggccacgtcgccaaaggagttgtcacaggtgccgtatccggcaccgtgcatgaacaccacgccggggcgcttgcctgatgcgttctgaggttcccgaatcaataccttgatggcttggacgccgtccgcattggccttgccccgatcaccaggctccttggtcagattgccgtcgctggtcatgttcagcgtgatgtatcgctcggtgacctcatacgtgtctttcgccggcagcgtttctccggacgggttatcgaaggtgacttcggtatcgtcggtgagcgtggccatcgactggccggtgggttcgatgttccaaggcaccgtggtcaggttggaaatggagaccagcacgccgatcaggataatgaagatgggcaggctgaccatcagccggtgggtgctggtccacggcttggatcgaacagtcaggcgatgctcttcttcttgcgacacgtgcgctattgtaatctgaccgcgatatttacgccgagggcctattcggccgaatcagtgaccgggatgctggattgggaccacgaccgggccggtggaattgacgggcacttggccgtcggcctccatttgggcggcgatatcgttcgctatggtgagcagcgtgtcgacgatctggtcttcgggcacggtcttgatgaccttgcccttgatgaagatctggcccttgccattgccggaggccacgccgaggtcggcttcgcgtgcctcgcccggaccgttgacgatgcagcccatgacggctacacggatcggcgcggtcacgtccttcaggccttcggtgacggcggatgcgagctggatcacatccacttgggcgcggccgcagctcgggcaggagatgatgtcgaacttgcgggggcgcaatcccatgtattccaggagtttgcaccccaccttgacctcttcgaccggcggcgcggaaagggacacgcgaatcgtgtcgccaatgccctcggccaagagcgcaccgaacgccaggcaggatttgatggtgccttgccaggcggggccggcctcggtaacgccgaggtgcaacggccaatcgcccttggatgcgagcagtcggtacgtttcgaccatggtgatgacgtcatggtgtttgacggagatcttgaaatcgtggaagccgacgtcctcgaacatgtgcgcttccttcaaggcggaggccaccagcgcttccggagtcgggccaccgtatttggcgtagagttccttgtccagcgagccggcgttcacgccgatacgcagcgagatgcccgcgtcggtggcggccttgcagatgtccgggccgacttcatcgaacttacggatgttgccggggttcacacgcacggccgcgcagccggcgtcgatggcttggaacacgtatttggactggaagtggatatcggcgatgaccggaatcggcgatttgcggcagatttccggcagtgcgtcggcatcgtcctgactcggcacggccacgcgcacgatgtcgcagccggcggcggtcagttcggcgatctgctgcaacgtggcaggtacgttggccgtgagcgtgttggtcatcgactgcacggagatgggcgctcccccgcccaccggcaccgggcccaccatgatgcggcgggacttgcggcgcgggtgcaagggcgattcgctggtcaggtcgaccggatcaccggttttgcggaacggcttttcgatgggattttccgtattcaaggtattcatcattgcttgtttatcaggttgtcggcgcgtcggcgggcttcaagctcaagctggttcatttcctccacgtccgtgaacagcgggttaccacgaagctcggcgtccatctggtccagcacggctttgaccgtgtccacgatgccgaggtacggcagccgatgatcaagaaacgcatgcacggcctgttcattggctgcattgagcaccgccgtatgcttctcggaggcggccaggcagtggcgggccagttgcacggcggggaacgcctcatcgtccaacggctcaaaggtccaagttgcggcttgcgtccagtcgcacgcggcggccacattggtcatgcggtccggcgcggacaggcccagcgcgataggcagacgcatgtctggcggcgaagcctggcaaatcgtggcgccgtccacaaattcgaccatggaatggacgatggactgcgggtgcacggtcacgtcgatgcgttcaggcgacacattgaacaagcgggacgcctcgatgacttcgaggcccttgttcatcagtgtggaggagttgatggtgacaaccggccccatgttccacgtcggatgatgcagcgcctgctcgggagtgatgttctccatgtcgacacgtttccagccgcggaatgggccgccggaggcggtgaccacaagcttggcgacttcggcgtgggttccggagcgcagggattgccagatggcggaatgctcggaatcgaccgggttgatctggttctcgcgcacttgcgcgctgaacagcagatgaccgcccgcgactacggactccttgttagccaatgccagctgggaaccggccttgagcgccgcgatcgatggttcgaggccgatcgagccggtgatgccgttcaatacgacattcgcaccggatccggccatggcgatgaccgaatccggaccgccggtcacgcggacaccttgtgcgccggcctgtgcgagagccgcttgcagtgctggaaccttggtctcatcaaacaccgcgacttcgggcacatggaactgtgcggcctgttgcgccagcagctcgatatgtgctccgcccgccgccagaccggtgacggtaaatcgttcagggtgacgcgagatgacgtcaagtccttgggtgccgatggatccggtggatccgagaatgatgacggtggagttggaggctatgctcacttttccttcttcgtatcgtcattgttcagtgtggggaacgacaggtcggggatatccgaatcgaagttaccgccaagcgggaacagcagcgggaacgaatcgttggaatcgtgcttatcctgtgacggctgagctgcttccgtgtcgtgggaggcggcaacgtattcagatgattccacagccggacgggagaccgtgctgtctgcaggctgactatcggatacgcgaaccggaatggagttcgtgttacgatccggcttgctggtgggagcaaaggagaccggcatggcagcggacgcagcctcgtcggcagtgctattcacaggttgcgctgccggggcggagggtgccggggatgaaaccgaacccggtacctcattcaatttcagcgcattcggtgtatcaaggctgggcatcttgggagcgaaggacggcgcatccaccgccggaagttcctgagaaaccgcagccatgtgggcgagagcggccagagaggaaccgtcctgcaccatatccacgggctgttccgcgaacaccgacggggtcgatgacggagctgcggattcgtatgacgactgtgccggagcaaacgagggggcgctgccagcggtcacaccggaaaccggcgcggacggggcactggcgggaggctcagccgcaacagctgcggtaggagccacggaaggcgtctcggagacgggcttcgccgcagactcgttggacgtatgcaccgggtatgctgcgggagcaaaggaaaccggctgttccgcattggtgttattggtgcttgtggaagcatcgaacgatgcaggagccggcgcataggcgatcggtgccgccgcggccggcgccgcgggagcaaccggagccggagcggtgaacaagctctgctcggcctgatgcagggcatcgaatgattcgtcatgagcaacggcagacggcgcaaaacgttcgtcagttgccgggcgctgcgttccggaagcgaacaatggcgagacgccgttcgcttgaacggtcacgttcgtggcggtctgggcaggagccgtgggctcgccggacacgaaatcggccacacgtgcataggattccaagcgactcagcaactgcacgcaggcgttcaggaagtaatcgacctgtcgctcgtcatagcctttcttgcccttgcgctgggtgaagatcacattgttgaccgtatccgcattgagatcggccaaagaccgtacatcgtcttcggtcacgccgtcaacgcccaatgcggccgccgccttgtccacaatctggtcgaccagacgatccacctgcttcttatcgtacgaaggctgcttgggcgctccggacttgaagcgttcgcgctcgtcacgctccgcatggttctggacttcgtgatacagcttctcggtcttcgccttccacgtcacacgcccatgctgtgcgatctcccatgtggtctgcttatcgaccacggcacgttccagacgtccaagcgcggcgtcaacctgtgcgatcacatagccgttcttgcgcaaatcaaaggacacgttctgaatgtcatgctgggtgagattcatgccctcgctgtcatacagagcatgggcgcgctccaagaaagcgtccacctgagcggggtcatacccccacttgcgcttgcccgcacgtgcgatgcccgacttgccgtccccttcacgaagttcctgcgccatcggctattcgacctcctgctggatataaacactctgccacaactttacgtgactattgagacgcatctgaccaagaagaccgaaattcacgattttgtagcagtactgccggtttccttctgcgcgcatctcactgagatttcagaaccccttgccgaagactgtcagggaatatcgtcacagcccatgtctgtggaatgaggggattgcacgaagtgatgaaaaatgaaagtgggcaatgagggactcgaaccctttgcgcccgtttttcctgatcgttgccattccgccgttttcccagtgtttccaacggttcccgcatggtttgcatatcactccaattcaccgcaaatcactacaattcccggaagagtgtgggcaaaatgtgggcacggatgcccacatgtcaccagatcatcggcaggttgaggcattggcgtgcccaccgttccacggccagattctcctcgtcgtcgccaagcaggaggaggaagccggcgttcttgccgagcgaggcgggttccagctttttaatcacgccacgctcctgaaggaacagccaagcgttgctgatgttcgtcttgactgtgttctcgcgcttcttcatctccttatcggcattctcgcccatggactgctccggcgtgagcagaatcattccgaatgcgtcggcgatggcacgccagccgagcgtgtagtagcggcatggcgcgttgaccttgcgcagcttctcgggtggctggttgcgttcgcggtcccagtcgtaggtcatggagcacatgaaggagattgcgagttgcgcagtggtatagcaggtcaggttgtctccacgcttcttggcgaggcgtccggtgcggtttaggtcgtaaagggcttgcgtgttctggtatcccatgtcttccatgtctttccctccatgctttgccttagaatggtgcatggagaatctagctggttttccgtcgccccgatttgctctggtcagcgtcggggctttttcgtttataactgcattgtaattgcactcgaaagtaaaagtcaaattgcacagcgagtaaaattgcaaaagagaaaatagagacgtttggtgcaattgcgattgcacatatataagactctacaagttttaacattctttttataaggcgcaatgcgcaggaatgaataaaagatgccggaaaatcatggttcggccaaattccatgcccaccggctcgcacaaaacccataggcgaacatgactcacggcagtctaaggcaatctaggcgcatatataagagaggcggagccttgcattgcccggctccgccttgtccatcgtgtcagcaaaggacgtcttacagtctagtgcgcgacacgcccgacttgattattaccactgtagtagtaatattaatcatgtcagcaaacgaaaggacaaacaaaatgagcaccatcatcgaccaggacggcaaggaaatcgactacgccacggcggtcaacctcatggacgatgggatccgcgaggaactccacgccgagatggcaccctgcaccgaccagcggttcttcgacgcctacatcgaaaggcactacgccaagtacggcgaggatttcaccatctgacaagcacggcggtcgcgccccctcgcggggcgcgtggatcgaaacaagaccagcccggccccacccgggccgacaccgatccaagacgggagcatccgacatgggacatcgtaacggcaaacgcctacgcctcataccatcacacctgccgctcatacgcgacaggctcgcgcagacgcagaagaaacggctggcgcgccaatacgacgcgatgccacagtaccgcagggtcatcgccgacgcatgggacgaggccgaccagatgatgacggcgcaactatggtggatcagccgcgacatggcaaaactcgcggcagacaccgcagccgtgggcgactatccgaaaaaccgccccccggccgcaaccgggatgatgatcatcgatggcggcctgccggtggacgcctcgccggtcggctttcggacgagcgtcgcggggttcttctgggtcgcgcagcccggcgaaacggcagttttcccgctgacctgcgatacggcgacgctcgagaggaccggggcggcggaagccgggctcccggtcgccataatgcccttaaccggagcgttgccggacgccgtcaacgcgagccccgccctacagcaggcgtgggtcgatttcgcgcaggccgtttgggcgttgagcgaggagacgcgcatatgccagtcaaagccgggcgagccgagcgccgcgcacccgctcccgtcgaggttcgacccggagatacgcaaggtcaagatgctggtgctgcgggaaaacctccaccgtcccggcggaagcgccgacggcgacgagcgcgtgcggcgtgaatactcgcatcgtttcatcgtgcgcggcttctggcgggaccaggcgtatgggccgaatcattcgctccgccgacgccagtggataccaccatacgtcaaggggccggccgacaagccgcttgtctgcaaggagacggtgcgcatatggagacgttgaccgacatgatcgccggttttctcgccggcctgacgccgggcacaagggcggggtatcggagcgtcgtatcacgatggctccgctggtgtgcggataacggcatcgacatgctgcgggcgacgcgcacccatatcgaggtgttcgccgcctatgacggcggcatgcggccagcagcgaaaagcacggtgtacaggaatctgagcgtcgtttgctgcctctaccgctacctttgcgaggagggatacatcgactgtgatccgggcgagcatgtgcgcaggccgaaagtgtatggtcattcgggtggcacgtatctcacccgcgagcaggctaggctttttcttggcgaagcgcgtggtatggatgcgcggacggatgccttgtgcagtctgttgctgttgactggtgcgagggtcggtgaggcgcttggactggatgtcgaggactgtcatctggatgacgggcgtccgtgggtgcggttcgaccgcaagggcgactggtcccagcgtgtggccattccctccgaggcgtccgacgctctcgcacgacttatcggcggacgtaggcgtggtgcggtgttccgtgaggattccggcgtgcgtctgcggcagcagaccgccgtgggcatcgtatcgtccgtggcattgcgtgtgggcgtgccggatatttcgccgcactcgctgcggaggacgttctgcacgctctcccgtgacgctggcgtgccggacagggacatcatggccgcaggcgggtggaacagtccgcagatgctcgactattacgacatgtcccgtcgcgggctgaatggcaaggctggcgacggattgcaggattacctgggcaaggaggattgatatgggtttgaggtcgatgcgcgagggcactggactgtcgcagcaggatctgtgccgggcgattgggagcagtaccgtggggcgtgtgtgggcgtgggaggcgtggtctgacagtccgcgtccgaagtcggcgcgcgacccgcatttgatggggttttccacggccaaggcgctggcggacgaattgggtgtgacgttggatgatttctgggccgggctgagtggatgacgcgacacgcccgacttgattattaccactgtagtagtaatattaatcatgtcagcaaacgaaaggacaaacaatggtcaagctcatcgacaacaacaaggcaatcgagaccggcatccgcgagtgggatatcgaagacgtttgggacgacgaggagaactgggagctcgaaggcatcatggacggcatcacgtccagcatcgaccgcgaccaagccgtcgatgaggactatcacccaatctacaacttatacaggtttagcgagatcgacggagataccacggtcgaattcacggcggacgaagtggcacggtttgccgaggaatggtgaccatgacgcgcggcaaacaggcgacttcgcgctgaatacggcccacagtcgaatcagtttgttgacgtgacggaactcgaccggagcgcatacccgaagctgtgaccgccaaaaacgcagaaacgcccctcccccagcaatgctgagagaggggcgatgtttcataagggtgcaaaatattcttttatgggttattcatgcgatttttcacacctgagtttgatttccgggcgtgagtttgagtttcacgcccggaaattaatcagttttggcgaagtgggttgtatgcgactccgaatccgccggcgatgatgcctgcggcggtgctgacgaatccgccgatgtcggcatgtccgaagctcatgaggcccaagccgaccacggatgcgatcaaagcgacgacgtagatgatggtgcgcacggtatccgggaacactggcgtgtatccgtctgcgtgctgtggttcggtgcttgtcatgtggtcaatcctctttcttgcttgtggcggtaacggtgatgtccaaggcgtccagtttggctttcacggccttttccacggtggccgcgatgtcggccgggttggttcccaacgccttggatagcgcctcgatggcggcggcctgtgcggtgacggtggcgctcatttcgcgcacgcgtttgtcgatgtagcagacgcgcgtgtaaatgtcgccgctgctgccgtccttggtgccgccgtcgtcggtgcgcgtaaggatgctgtacagtttggcggtgtcgtggtgcatccagctcaggcgtatccacgcgggcagattgtttttcccgggcgtggcgtcctgtccaataccatagttccaaacgtctcctgcgcttgtcatgtcgttacctcctaatagttggttggctttgttgattacatagttgacgtcaaggccgttgacggccttgtcgggacacccgtaatggtcggtgccgggtatctcgcggtgcagccacacgttgccgttgagcccgtcgtaccacaggcggccccagccttggcggcgggcgatatcggcgcacaggcgggccgaagcgtccatgcacgcgcgcgtgcaaggcacgccggccatgccgccctcgtgctcgatgctcaccgtgctgttgttgctcgcatagttcgcatcgctccaactgccgtcgctctcgctcacgtactggtgtatctcgccgctgcctccgatgccgtagtgggccgaagcgcctccggcgcgttggaaaacgctgtcggtgccggcgagggtgccgaccatgatgtgcaaggtgatgtggcttatggcgtagccgttgcgcccgttgtagtggttcgggctgccgcgccatcgcgcgaaactagcgcctgtcatgctctttgtccttcccgccccgagtcaaggggcaatagaaaagccatcccgaaatgggatggctttgaaaaccggtgtgaaaatcaatgcctgtgcgcgccgtgattgaacatgagaactagcacgagcaacagcaggtatatgcctgcgatcgtgagacgcgtcattgccggtcctccaaatatttttcggccgcgttgacgacccagcattgcgcgtcgagtttttcgagcttggcgagctcgtatcggacggcctccgaatggtcgtgcgactggtcaccgtagatcaggctgatgatcgtgttcttgatcgtgtcacggcagagctcgtccatacggtcgtcgaatttctcggtacgctcgccgagacgcctggtcttggcgaaatgctgcgagagcggcgaatcgtatggcaggcgttccggccgcacgtgcgcgtacaggccggtcgccaacgcgtccaaagcgcccggccatatcctgagcaacagtgtgatgagcgcgcacgcgccgcccacaccgccaaaaccagctagaaatgtctgaaacacattacgtctccttaaaaaatcagttttgcagtggcatgagaccgccgtacagtgcgtccatttttgggacgagcttcttgtattccttccaatccgcttgtgtcatcagattgattgccgagaatcgcagcgggtgattcagcggacacttcaactggatgcgtttcgcatcatccatccgaaaatcaaaaccaaggaacgtgtttccgcctgtattgtcatgaggcaacagagctccaccagtccatagtttgttggctacgaagcagataccattctcatgccatctgctaccttccggcacttgggaaacccagaagttcagatggagatcaccggagaccggttcgcccagtaggatatcggcactaggattgacagcgccgctgttcggcgtaacgagtatgccatcagggtcaacatgctgcacggtcgcctcgtatgtcaagatggcactgttcgggagcatgaggagtggatctggaatcagattcgttatccggctcatgccaccacccccgtgagggtcaggcgagcggcatcgtatccccggtgaaatatccgatgctgtcgagcagggtcttgttcgcctgatattcgtcccacgtgcag

SEQ ID NO: 3263 - DNA, 19911 bp, Unknown
  R53_2m  MAG No. k141_9459
atacccctatatgattcaactggttggctaccatatctgggatgccgcagacatgcgggactcggataccatcatcgacgctgatgttacggcaggtatcgaggaagcacgtattgaccttgataacgccgtgtgcatcccggagttgcaaggcttatccaaaaacgaccgtgagtatctcgaagccatggcagcgtcagatggtccctctcccaccgtgaatgttgcacagcgcatgggcaaaacgcctaactatgccgccacctaccgcaaacgcctccttgacgccttcgttatccgcgaaacagaacgaggcgaagtcgattttgccgtgcccttcctgcgcgaatacttgcgtcggaatcagtaatcggcacaatgcacagtatcgatatattccgttccatataatgacttttcgcattcagatacacaatggacggcctgttgagtagcactcagcaggccgtccattctatttagctattcagttatcggagacacacctcaggccttggcctgagcgccagcgacctgctgggaggccatcacgccgaacaggtagccgtcttcggagaagtattcgaaggtacgaccggcgaagtcgcggcattcgaatctgatatcgttatcgattcgatcagcggctcacgatactgcccttgcatcgctgtgccactgttgaatgtgcccggctggctcacctttgggtcaccgccgacacatccttgatgccgatggttatagagtcgcaaattcacgactggcgcacctgcccacgcacctatcctgtcatttcgagcgcataatttgctaccacatccggtcagggcaatcgaccttaatggcgtaaacggcacttctcaatacgtaaacggcatttattcttggctcccctctcagagaggggagccaagaaatatcaagctcggcctcccaggagagagccagaataatgcaccggcaaggcattaggatggagggcatgagcgatttgaacgcgttgaatcttgagcccggcgaagtggttggtgggtatacgctgatctcccggctcggctcaggagctatggggtcggtgtggcgggtgcgcgacgacggcggcaccacctatgccatgaagattctgcgcgactccctgaccgacgagtcagtggcaggctccggctctgtgtccacggccctgcacgaccccgacctcaagcccgatgtcacgccgcgcgagcgcctgcggcgcgaggccatggccttgaagaagatcaatcatccgggtgtgtgcggcatcgtggatatggaactcgacgatacgttggcgttcatcgtcactgaactcatcgagggcaagaatcttaaggatgatgtggccgccaatggccggtatgtgggcgacgatctggaacgcttggcccgcaagctcatcgaagccaccaaagccgtacatgcggccggcatcgtccatcgcgacatcaaacccaccaatgtgatggtgtcggccgccggaccggtattggtcgatttcggtatcgcgatgggcgagggcgaaagtcacgtgacccgcaccggcctagtgatgggtacacccggattcatcgcacccgagattattgacggtgccgaatccgacgacgccaccgattggtggtcggtggcgtccgtgctcgcttttgccgcaaccggcgcgcctgtgttcggcaccaagccgatgatggcggtacttgagcgcgaggcctcgggcaacgcgaatctttccggactaccggccggcacattggctgccttccgttctgcactggacccggatcgcagggatcgttgcacgccggatcaattgctgaatgccatcgccttggatgcgttgaatcccaacgcttggcagggcgagcaggcgggaccgttcgccgcgggagccgtggctggacaaccggctgcgatcgttgccgaagccgcggaggcgatgcccccttttggcgcggccggcggcgttgaccgcaataatccccgaaccatctggcgcgcggccgaggaagccgctgaggctcccaccatggccgtgttctccggcaataagggcgataacggcgatggcgaaaccgccgtattctcgccggctggcgccgctaccgccacgctgcccttagccgatatgccgccacgtccgccggccggtgtggagccggccacgcaactgttgcccgacgctgctgccgatttcaccgacgacgccggcacacaggtactcaccggcgcgaccacaccgatgccggaccaaaccacaccaatggccggcgccaccacaccaatgaccaacaccgattcgactccggccccgaccacgccgctggccgagcgcaccaccgtactccccacgccgcagccgtcatcattccccccgtccggcaccgcccagagcagctggaatcccgcaagcaaccagcccacagcggtggaccccgccattcgcccggcattgcagcgcatcatcgaccaaaccgcccaagcggcccccaccgaaaccatggtccaaaatcctcccatgcccaatccggtggacgtgaagcgaggggaatatctgcagcgcggcaccctgccattgatcctgctggcggcgccgctggcggcactggcggcaaatgctccgctcgtggccatcatcgcggccactgcgttgttgtggctactgctcaccctggcctataacaccgaaccccagcttgagcgcgagggcaaacgcggcggcgagcgcaaaaactccgattcgtggattcgcatggcgacttttccctggcatctggtcaaagccctgctgctggccattccccgcatactgctgctagtcatcatctatatggcgggaaccgccgtggccaccgcggctctggcactgcccgttcacaccatctcctggtatttcaccgcggattggggtattccggtgccgttgctcaatgatgtgccgttctccgcttccgggctggcgctgggcggtttcatggccatcggctggctggtcactgtgttcgccccacagtcgatgatgattcggctggggggcggcgtactgcgcgggctcaaacacagtcgcccggcgggcgcggcaccgtgctgttcaccatatgggccatcatcaccatggccttgtgcgcgatgccgattctgggcatgccgatcaactggatgccgttcgcctagagcggggcggaatctcacacatcagccatccgcacacatggccgttgtgtatccgatacgttcgttccgtcacacttttacagggaattcacctcagatcagctctgggcgcagtcctcctcaggcccggtcattatgatggggcccaaacattgaagcgattgcaaggggatagctatgtcagattcgaagcgtcaggccaagcgtgccacacgcgctgagcgccgagcggccgaggaggccgcccagcaggcacgggccgagcaggcggctaaggaacgtaagcagcagaccatcatcggctgcattgtggtggccattattgtggtgctggtggccatcgctggattcgccgtatacaaggctatgcggccgtccaacaccagcagcagtagccagcaaagcaacatgaccgtggacgaggcctatagcaagctcaagaaagtcagtacccagccggccaacgccgatgacaaggccggcttcgtgatctcgagcaaggggtacggtcagaaggccgaaggggcgcccaccgtttccatctacatggagccgctgtgccccggctgcgcctcggtgaaccgccagcttgacccgacgctcgtcaagctgatgaacgccggccagctcaacatcgatttgcacttcctcaattttcaggacaacaagagctccgacaactactccaaccgcgcgttcaacggtgccatctacattgccgagcatgatgacaatcccgatcacctcatgagctacctctccaacatctacgctgaggatttccagccgggcgaattgtccaattacgagccggtaagcaacgccaagctggagaagcaggccgtcaatgccggcgtgagcgaggatgtggccaccgcggcattcagtggtaagaacgaatacgtcaagtggctcaccgcctccaacaactacacgatcctacgccccgaactgttcaacagctccggcgcgttctcctcccccacgctcaccatcaatggcgaatactgggatctgaagcagctcacgctggcggacaccagcatggtggacggattcctcaagtccatcggcttggactccgatcaggtgggcgtggaaggccagatgccgtcgatcggcgccaacaagaagccgatttcgctggccgattaattaccggtgcggctcggcctgaattgaccactcgggaactgccggtatactagagatttgatcaaaacgatttacgcgttaagaacaatcgcctctttagctcagatggccagagcggccgccttgtaagcggcaggtcgtcggttcgatcccgacaagaggctcgtcgcgcagaaaaaatggcgtattatgtgatacgtaggcttttctacgcatataattcttaccttgggtaagtactccaggagccttcccccaactatgggcttcctggaatgagggcggagcgtcccccaaccagctccgcgccttcaggggggcgggaacatccccttctctcccgccccctttttcttttctttttttgagctcagaacaatctgacgagcaggaatggtgacggtggccggtgaaaccgcagtacgggccggaacaaccgttacgatgggtggcgtaatcgttcatccagcaggaagagtatggcaatggcacggcgttggaccccgcagcggtttgttacactgcgtcgcatccgcgtaatcgcctgtatcgcggcgaccagtatcgcgctggctggatcattcgcgttcaccgcgcgtaaatccgtagccctgaacatcaacgggcaaaccacccaagtcaccacatatgcgatgacggccacccgtcttctggaggaacaaggggtggatatcaagacccacgatatcgtcactacctcgtccggcgaccaactcgccaatcatgccgtggtcaccgtacagtccgcctaccagaccactatcaacatcgacggcacgtccgttcccttctggaccgtggccaccagagccgaccagttgctgggatttttcgaggaaaaccagaacaacgccacaaaaatcaccgtcgacatcgacaatgtgtacaaccagctcaccggcggactggtcatcaatcaggatggcccggtcaccgtcattgcggacggcaagacttccgtggcccccaacggcaaactgcctgcggcctccattcttgactccaaaggcatcgtgctgaacaaagaggaccgtgtgagcgtcgaaaaggacggcgataccactatcctgcgcgtacggcgcgtgacgcatggcgaggaaacgcgcacagccgtagtgccatactccacacaaaccatcatcgactccaatctgcctgaaggccagtcggagatccgccagcaaggcgtcaatggcgagaaaacccaggtgtataacgtcatgtatgtcgatggcgtggccgaatcggagacgctgaaatccgaaaccgtcaccacgatggccatcgaccagatcatcgccgtaggcgccgccaagtctgataccgataaaggttccgacaaaaaatccgactccgccgataacggcaaggccgattccggtttcaacaatcagcacgagtcgtccggtaacaatgccaacaacacaggcgacaagaacaacagcagctctggcaacaacacgaacaccgataccaacaacaatgccggcaacaccggcggcaacaactccggcaacaccggtaacaccggcaacaccggcaacaccggcaacaccggcaattccggtaacaccggcaattccggtaacactggtaattccggtaacaccggcggcggtacgaacaacaattccggctcttccggctccgattcaggaacaaccaccacgccctccggccgactctggcacgccaccgtagcccaggctcaggcctatgccgctggtgccgccgcgcagcgcgggtggacaggcaacgactgggattgcctggtcaaactatggaaccgcgagtccaggtggctgtggtatgccgaaaacgcgagctccggtgcctacggcattcctcagtcgcgaccagcagacaaaatggctgcgttcggcgccaattaccgtgacgatgccgccgtacagatcgattggggtctgtggtacatcgcacaaacctacggcagcccgtccaaggcatggcaacattccgaacaaatcggttggtactgatcggttacgaagcccacaaggaacacacgcttatgaacgacaccattcccgccaccggtcacctgttaggtgccgccgatatccgtcgtatcgcggccgatgccggcatcagccccaccaagaaattcgggcagaacttcgtcatcgaccccggcacggtccgtcgtatcgtacgagaggcgggagtgaccgctgccgatcatgtcatggaagtcggccccggcctgggatcgttgacattggcgattctggaaaccggcgccaccatgaccgcagttgaaatcgatccgccgttggccgaacgactgccgggcacagtcgccgaattcatgcccgaagccacgtcacgactcaccgtcgtcaatcgggatgccttaaccgtcaccccggagaacgtgcctgatttcagcgatgacgcatcgtttacgctggtcgccaatctgccgtacaacgtggccacgccgattctgctcacgctgttggagcgtttcgacaacctcggctcgttcttggtgatggtgcaaaaagaggtggccgacagactcgccgccaagcccggttccaagatctacggcacgccgagcgtgaagctcgcctggtatggcaccgccgaacgggtgggcaccatcggccgcaatgtgttctggccggctcccaatgtggattccgcgctcgtcagattcacccggtatcaggccgatgacccggccgccccgggagcctcgaacagcacggccgacggcggcgcacaacgggaactcgtatttcgtctgattgatgcggcgttcggtcagcgtcgcaagaccctgcacgcggcattgaagaccattgcgccctccgaggcattccccatcgccggcatcgagccgacccgtcgaggagagacgctcaccatcgccgaattcaccgctctggccaaggccatcgaatcgtgtggagatggagatgaggcacaatgagtccggtaatctcacatccacgcccagccgctgcccgacatcagttcgatgagctctcccccatcaccattacggtggattgcccggcgaaaaccaatctcaccttggaagtgggacctgctcacgacgaatggggcggacgccacgaactggacaccacctactgtgcaatcggcgtatacgacaccgtcaccgcaaccgccaagcaacccggagcgggattctctctggagctcgaaggcgcttatttgggcgacttggcctcctcacgcagcgacatgcgccgcaaccatgcggtactggccctcttcgccatggcccaggcggccgagcgcgagccggatgtggcgttgaccatcaccaagcgcattcccgtgggtgccggactaggcggcggttcagccgacgccgcggcgaccatgctggcggtcaatcgtctctgggagctgaactggcctatagagcgtctgcgcaccattgccgccacgttgggcgcggatatgccgttctgcctgaccggtggccttgcatacggcaccggtttcggcgaacgcatcacggatatcgcccccggcagccgcgatgagctggcgctgatagaacagggattcagcggcgaagtattggtcggcgcgtaccagtcgcaactcagcactcctgaggtctaccacacctttgacctcgtgggagccgcagaaggcgaccgcaatcatctgcaggctgcggcaatcagcctgcatccccgcagcgggcaggccatcgacgccgccacgcaggcgggtgccagccatgcattcgtctccggatccggcccctcagtggtcgctttcgccgccgacgaggcagcggcacaacgcattatcgatgtgtggcgcgatacggctgtggtcgatcgcattattcgagccaaatctcccgcacaccccaatatcggcgtcagacagtgacgctaaggtagcaaccagccacccgacccatgaaagaagtccaccgatgacgtatcaggttgatgaacgtgaagcccgcaaggcgtacgtgcgccaccgccagaccatcgtcttttccatcagcggcgcggtattggcagtagtgctggtcatagccctactgttcaatttccacgttttcggcctcggcgaagtggagactccggcccgccagccgaattacggcaacgcggcgccgtgcgcggtcaaggacagcagcggcaaagcgcaatacgtgtccaacgcttcggtcggcatccgcgtgatgaacggcacctctcacggccaattcgccaaggccgtgggtgaggctttggccaatcgtggattcagcgtgcagaaaatcgataactattccagcaccggcgttgaacgcaccaccatctacttcggcaagaacgccattaatcaggcgtatacgctgatcggcaatttcaccgacgccaccatgatcatgacggctcgcgaggatcaactcatcgatgtggtcatcggcgccacgttcaacgatctgcaggacaccaaatcctccccacaatccggtaagaccatcaccaatatcgagggttgcaaggccgccgatagcatgaccaagctgcccgccgacaccaaacacgacgcatacacggcggagtaaggcgcatacagcttcatcttcgcgaaaaaccgtacgctgacacgtattcagcgtacggttttttggtatcggactagtatcggactactgaatctcggcgtaccagcgcttgagttcttcgacggccacatcgtggtccaccggaccgttatccaagcggtattccagcatgtgcttgtaggcgcggccgatcatcgggccgggctccaggcccagcaactccataatttcgttgccgtccagatccgggcggatcgcgtcgaagtcctctttcttcttgagttcgcggacgcgctcctccatctcatccatggcctgggagaagatcatcgccttgcgcttgttttgtgtggtggcgtccgcgcgcgtgagcctgttcagccgctcgtacaggtgcccggcatccttgacataccggcgtacggccgagtcggtccacggctcgtccacatagccgtggaagcgcaggtgcatattcaccagttccgagacgtcctcgaccagatggtggtcaaaacgcagcgccttcaaacgcttgcgggtcattttggcacccaccgcgtcatggtggtggaagctcactttgccgcccggctcgaaccggcgggtcttcggcttgccgatatcgtgcatcacggcggccaagcgcagcgtcaggtcgggggcgggcaccgggccgtccgggccggtttccagggcgatcgcgcgttcgagcacaatcatcgtgtgctcgaagacgtccttgtggcggtggtgttcgtcgatctgcaattgcagggccggaatctccgggaagacgatgtccgcaagaccggattcgaccaacgcctcaaggccggcgcgcggacggtcggagagcagcagcttggtcagttcgtcgcgcacgcgctcggcggatacgatgtcgatgcggtcgcgcatcgaggtaatcgcctcggccgcgtccggcgcgatacggaagcccagctgggccacgaatcgcacggcgcgcatcatacgcaacggatcgtcgtcaaaggactgtcgcgggtccaccggcgtgcgcaacacacccttggacagatcgctggcaccaccaaacgggtccatgaattgcaggtcgggcacgcgcagggccatcgcgttgacggtgaagtcgcggcgggacaggtcgccctcaagcgtgtcgccataattgacctcgggcttacgcgagtccggatcgtacatgtcggagcgataggtggtgacctccaccttgacctcggtgccgtccgggcggcggcgcatggcacccagcgtgccgaacttgcgccccatgtcccagaagccgtcatgcccccaccggcgcagtatcggctcgaactgctcaggccgtgcggatgagcagaagtccaaatcgtggctctttctatggagcagcaaatccctgaccgggccgccgaccaatgccagctcgtaaccctgttcggcgaacagtcgaccaagttcgatggcttcgggccatacttcgaaattcaatgggcaccttcccgcgtgcgacgtttttctgccctaccagcataccgttaccccacctgcacacggggttgagtaaggtggagaatatgattacgcccgccgaccttgcccgcatactggggcaaacaccagattcggcggatagccatacccaagaccacctgctgtatacgtccgaaactccgcatcattccgccgattcgggcgattctcccgatgccggcggcaccgcgagccactccaccaatcaggccgttcatcaagacgaagtagacgcagtaccgactgcgcaacattccggtgtacccggcacacccgcaacgcccggcacacccgcaccatccgaatccgaaatatcggacgccgccagcgacatgcccacaccgaagccgatgatgcccacaccggccaccgtcttcggcatgcatgccaccgtcaccatcgccactaccagcggcactatcgaggggcaggccgatggtatcgccggcgaggccggtgccgagacgattgccaaggtcgagccgattatcgccacggcacaaacgtccgtaaccatcgtcacgaacgattccgtggcgaccgcccacgcggccgtagatactgccgttgcggtcgccaaggccgccgccgcgcataccgcagcgataccgactccgcgcgacgtgctgatgccgcctgcggcacgtaccgcaccggccgcaacgccggtcaccatgccggtctcagcgccgtctgcaacaccagtgaggcccgcaacgtcagcgcatcccacgccggccacggtcttcggccggcatccgtccgcggatgttgcctcgccggaaccggcagtgccagtagaaccggtgacgccatccagcccgactccggccatgatgccgcaacgccgtacgtcggacggtccgaccacattcgcttcactggatgcccaggaactgccggtcgtacgcgaatattcggcaggcggtctgattttcgatgaccagaatcgcgtggccattatcgcccgtcattcccgctccggccatctcgaatggtgcttgccgaaggggcatatcgaaaaaggtgagaccccgcagcagaccgctgtgcgcgaagtgcatgaagagaccggcatcctgggcgaggtgatcgattccatcgccaccatcgactactggttcaccggcaccacgcagcgcgtgcataagctggtccatcacttcgcgctcaaacagaccggaggcgaactgacggtggaaggagacccggatcatgaggcggaagacgccctctgggtacgttttgaagatttggatgacgtgttgagctatcccaacgaacgcaaaatcgcgtggctctacgccaggaagaagaacaggcaggcaaacgagtgaacctacccggagtcttacgacattgcacacgtctggcacacgcactggcggctggcgtcgccgttgtggcgatgctggccgctccattgaccgtctacgcgaacgatacgacggacacgactgattcatccgatacgacggacgcaacgggcaatcagaccgagaatcagcccaagcagagcattgccatcacgcaaagcacccccatcgtcacctccaaatcgggctatcatgtcaccgcggtcatcagcaatacggacagcacggccacgtcaagcggcacactgcacctgaccaccaatacgctgttcacctttgtctcgcgcaccgatattcagaattgggccgagaacaacgcccccatccccacccccaacgagttgggttccgttgacgtgccatcgattcccgccggcggcactgccaccgtcaccatcgaggtgaacgccaatcagcagacccttgcctccatagggagctgggggccgaagccgctgatgctgtcgtatatcgtcggcaatcagatactcgccgatttgccgagttttctgacccgatcttcggatgggctcaacaccgcgacgacaccggccatgaacctgaccgtggccatgccctacaccgccagcggctggcaggtcgataacaaggccatcagcaatcgcattgccgaaaccaccacttcctcgacatcaacatcgtccaagtccaacggcacggacaaggccgacaagtccgataacgccgacgccggcaacgcggccaaagccactgatacgcaagccatatccttatccgggcaggatgccgataccgcgcgatcccttgggcagacattcgccaagcaccgctcgctgcaagtgatcgcggatcctctgtattggcgtcagtccgcagtgcaaccgtccattgccggcatcatgcagcccgccgactttgacatcaccgcctataccgcgctgggtgataccgcggcctacgaaaaggcaggcatcaccactgagcagtggaacgccaagcaggcggccgcatggtatgccgacggaggcgactccgaaacaccctccgcgtacgcatggcagggcaacaactgttggacgttggatgcgctgaccgcggcacgcgagcagggctatgacacggtgattgccgatgcctctttcgatgccgaccagactgaagccgtacacacaggcacctacgtggtggatacgcctgccggcgatgtcaccgtgctgaaggagcaatcgaccttgggcacgctggccaagggccaacccaccagcacggacgcgcaggccgagtccagcgatgccggtcggttggcccgactggtcgctcagagcgcgttctaccagatggaacagccctatacatcccgatacctgcttatgacgttctcccgcaccacggaggccggctggatcgatcaggtgatgagcgccttcgagcaggcgtcctggttgaatctgacggacctgaagaccatggccgaggccgatccgtacaatgtcagcgattcggtcaatcccgacaaggccgatgatgccaacaccgccaatacccggtcggcattgagacagttggccgacagccggcatgacatcatgcgcatggccacctccatattgaagaacgagattgattccgacgaggtctcgtcgttggccccgcaggccctggcccggcaggatgccaatgacaccgtctcgcacagcaacgatccgacgcaatggattggctctttgctggtgctgcatgacgatatggcgctgcgatccatgtctggctccccccagccgacagccacgcgaaaagccatggtcagagccgcgaaaacactggccagcgatcttctgaacggcgtacgcatcaacccatcggaatcaatatccgtgttcagcgaatccgcgaaaatgccaatcaccgtcagcaatgaccttccttatgccgtcagcgtgcaggtcaactcgctgactgactccatgcagatcgtcacctcgcgaaccactgacatcgatattcccgcgcatagcgacgctcaggtgaccttcaccatccgcgtttccacttccggctcatcgacggcccatgtgtcgctgagcgaccgggaaggcaacagcttcggcaacacgcaggataccgcgatcaccagtgtgatgcgcgtcagtgatgccagcggtttcattatcatcggcttcgccgtgctactgtgcattatcggcctgtggcggcagttccatcggaagaaggaccccgacgaatgagttcaaccgtaggtcgtaattccctgatcatggccacgggaaccgctgcttcccgtgtgaccggtcagctccgcacgattcttctcgctgcggccatcggcaccactggattggcggccaacgcctatcaggccggttccatgattccccaatccgtgttcacgctggtgtccggcggcatcttcaacgccgtgctggtgccccagatcgtgcgcacgttgaaagaaaaagacgcccaagaacgactgaatcgtctggttacgttggccatcggcatcctgttggccatgaccgtggtgatggcggcggccagccctctgcttgcccgcctgtacgtgggtagcgacgatcaccagatgatagccctgaccacctcgttcaccctgtggtgtatgcctcaggtgttcttctacggcctgtatacggtattggggcagatcctggccgccaaagaccatttcctcacgtatgcgtggagctcaaccggtgccaacattattagttgcgccggttttactggttttattctgctgttcagcaaggccaatgaacagcccctcgaattctggaccgccgacaaaatcgcgcttaccgcaggcacctggactttgggcgtggccttccaagcgctgatactgttcctgccactggcccgtatcgggttcaagtacaaacccagcttcgggcttggcggctttggactcaggtctatgggtcccgtggcgttaggctctttgggtgtggtggtcaccagcgagatctgcggcattatccttacccgtatcgccacatccgcaccacagcgcgcccacgaactgacgggtgccagcctgttcagcgtggcaggcaacgcgacctatcagaatgcgtacaccctgttcatcctgccctattcgctcatcgccgtatcggtatccacggctatgttccccaagatctcccgttccatcgcagctgcgaatctggatgaggcacggcacgatctggtgagcgcgctgaacaacgtagggctgctgatcatattcttcgccgccgccatggtcgtgttccccgaaccgatcatccgcgcattgcttccgtccgtctcgatggacgagaccatgctgatttcctacgcgcttatcgccctatctgtgggcactcctttgggatcggcgttcctgttgatccagcgcacgttctacgcctttgaggacggccttcaccccttcctgtccgcggtgatgcagtatggattcacctcggtattcatgatgattggcatgatggtacttcctcctgagcattgggtactcggcatcgcctgctcggtgacactcggcggattactggcgttgccgctgacgttgatgatgttgcgccgcaagttcgaaggcaatcttggcggtcgggagatcacgaggacatatgccaaggccattgtggcggcactggcttccggagttgtggtctggctgatcaaacgaccggtagtcgcactgttcggcgcggatattcgatcggtaggcgggcacatgagctggtggtctgcgctggccatctgcgtggtgctcaccatcgtgctggccgtagtatatgtggctgtgttgtgggtggtacgcaccccggaactcatcagcgcctatcactcgatactggcccgtctacacaagactccggccagtgaggacgttgctgtgacagcccagccggaaaaagtcgacgatacgcaaatcaatcctgagacggagcccgtcaaggatagccccacacgtagaatatctaagaccagtctcgaacaccaatcacacggagccgaacgcactatgaaaccgcaactcggagacacgattctcaaccgatacaccttggtatcatcgttgcgtgaggagcctggcattcaggcatggaaagccaacgaccgtgtgttggcaaaggattgccagctgttcatcattaccaatcgcagcgctttcgccgcaatcgatgagctcgctggtcgcatcgccgccactcgccctgatcgtgtgattcccgtactgaaataccgtatggaatccgacgtacttctcattgtcatgccggtggacagcggccaatgcctgactgactacatggtggataccgacaagccgctcagctacagcgccatccggtcgattatcggagaatgcgccaacgtgctgcgcgaggtcattgcggatactcccagcagcatcgtcatcacaaccgacaccgttcgagtgactacctccggtgtgcagattgccgatgcaccatgtgccacgatgctggccgacacgtccgctaccgatctgcgtacggacggtcctgaacggtatgcgattcgccagcttgcggcattgctctatgccctgctgacacgcacgccaagccaagcgacacccacattcaatctgcgcgccttgccgcaagacacccctggcgaattccgcgtgatttgcaagcgtggattggccttaagcaagcccgacgagcacacgttgccgatggctgcccttgtagaactcgacgccttgttgggtaattggaagccgctctctgaactgagcgatgctgatatcgctttgccgagcgtggaaagcgattgctcgattaccaaggcgatactgaagcccgccaacgagaccgatatcgtgcctattcccagcacgttgattaacagcagcagtcttccggaattgtctattaccccttccctgccggttcagccggccgccgtccccgctccgcacgcgatgtcaccggctcctctgcctgatgggtccagtactgctgacggcaaccagtctcaatctgacgcccgccgtctgtttgacttcaacctttctgacgcctgggagcacgagaatctttccggtgaagacaccggtgactggtacagcgaaatgaatccggcccccatcggcggtccgggtgataatactcggttgacggtgcctattgttaccggcggtatttccgatgccaccgtgggagagacgaccagtcgtattcccgtgttcgatgtcagcggccgtgctgtggcccccggtgaggaatcgctgcgtgccttggaagaggagcaggcccgcattgccgaagtaagcgccattcctccgagcttcacaccgaaggatgtgccggatgacgaggatgacagcaagctgcccgatgaacatctgttcggcaaactgtcgaccaaggtcgttgccatcattgtggctctgatattggtagtggcagcggctgtttgggcagtgcatgcgttccgatcctccggagacaatcctgccgatgcttccagcaactccagtgaaggtgactggcccgatatcaatgctgacgctgtgccattcggtggcagcaagaacgcgacgaacggtggcgccactgacgattcctcaaagtcgagtgatgccactcagagcgaatccagggactcggcatcagacaagtccaagaagtccgagactgctgattcgtcgtccaagaagaccaaggccaagaagtccggcgataaggattccagcgctgctccgcaaccgcgccatgagaacaacacggcgtttacgatttccagcgccaacttcctgtcgaatcctggcggccaatccgggtacgcatactacatgcaccttgaccagccgcaggatgcgtaccgcatggttatcaccatccgcacatccggtggtaagggctatattcgcgcaaataccactggagaccccactcagggcgagcaggtggccgaattcacctttgctgaaggtggcactactgaggtgaagttcaccaaagccgtcaatacgcaggatctgctgctgtgggtgccatcgggtagcctgccgcagaaccagttgtacatcgagaaggtggaggtcttctaatcggcatctataccgataactgacccaagaagggcggtaccgttcgcatacattcgacggtgccgccctttcttcgcgtctggctgaatgacatggaatatcgtatgggggtgtgacaatgtttcacgtgaaacataacgtcatcattatcggttctggtcccgctggctacacggccgccatctatcttggccgtgcaggtcttaatcctgttatggtcactggtgcgttgtcgccaggtggacagttggtcaacaccactgaggtggagaacttccccggattcccggaaggtattcttggcccggatcttatggatcgcatgaaggaacaggccaagcgcttcggtacaacctatatcgcagacgatgtctcttctattgaggcgtgtgagagtgattcggtcaagccgacctatcgtgtaacgctctccgatgactcccagttggaggcatcagcactcatcatcgccacagggtcgtcattccgtaagcttggggtgcccggcgaacaggagctgtccggacatggcgtctcgtactgcgccacctgcgatggcttcttcttcaggaacaagcctatcgtggtcgtaggcggtggcgattcggcttttgaagaggcattattcctgacccggttcggttcttcggtcaccttgattcaccgacgcgatagcttccgtgcctcgcagatcatggtggaccgagccaaagccaatccgaccatcaccctgctgaccaacacagtggtgacctccattaccggcacctcctcccccacacagaacaccggtgcacctattgccattcctggcttgacaatcaaacgaccggctgtggcaccggccagtgtcagcagcattgccgtacgtaacgtggtgaccggagaagaaagcacgctggacaccaacgccgtattcgtggctatcggccatacgccagccactgattttgcagctggtgttgtggaccgtgacaatgatgggtatgtcgtggtgcagggtgccagcacggtgaccagtgcgccaggcatctttgctgcaggcgattgcgtggatcgtacttatcgtcaggcaatcagcgcagcgggcatgggctgccgtgcagcgctggatgcgcaggcctatcttacggactgattgcggcgacctgatgatggcttgctgttctgactgctgcctgtgacatagaagcagcgctaggtcagtgttacagcatgccgcccttggatagtacgcaccggtcaaaggcatagaaaggcccctcaggcgacggagaatcacgatgtgtgatttgtcatcctccagcctgaggggttttctattgcgacaggggctacaacgcaggcatacgcctctgccaggaatcacgcagaggctataacgtcttgcgcgtacaacgcactgcacagcaataatgccggcgacaacacgaatgttcttatcgtgttacacccatttggaatcggcatcgccttggctcggcaccagcagctgcaggatgcgatccatatcctctggtgacgagaagacgatttcgatgcgaccatgcttggtgctgcccttaatcgacaccttggtgtcgaaatgattttccaaactctgctggatggcggaaccaacccaaggattggtcttggacgtcttgggcttcttcggctgctcccccgacgcaatcttcatggcgacgatttcttcggtgctgcgtacagaaagaccttccgcaataatacgagaagccagcttgtccatttcctccggatcgctcaggcccaatagcgcacgtgcatgaccggacgatagcacaccggcagccactctcttttgcacagaggccggcaggttcagcagtcgcaaggtattggcgatttgcgggcgagacttggacaccgacttggacagttgtacttgtgtcaacccgaactcttcaatcatctgctggtaggcagcc

SEQ ID NO: 3264 - DNA, 6183 bp, Unknown
  R53_2m  MAG No. k141_9477
cgtcacggaagtactctgccatggtcagtgcggtcagcggcacgcgcagacgggtacccggctgctcatccatctggccaaagaccagtgcggtcttctcaagcacgccggcctcggccatttcgccgatcagatcgttaccctcacgggtacgctcgccgacgccagcgaacacggacacaccaccgtggttctgggccacgcgctgaatcatttcctgaatcagcacggtcttgcccacacctgcaccaccgaacagaccgatcttgccgccctgcacgtacggggtcagcaggtcgatgaccttgatgcccgtttcgaacatctgggtcttggactccagctgatcgaaggccggcgggttgcggtggattggccaacgctcggagacggtgatggtctcatccggcttcttgttgaggatgttaccggacacatcgaagacgtggcccttggtcacgtcgccgacaggcacggagatcgggacgccggtgtcggagacggaggcaccacggaccaggccgtcggtgggcttcagagcgacgcaacggaccgtggaatcaccgaggtgctgttcgacctcgagggtgatctcggtctccttcgcctcgccttcttccttggcgccggtgttgacgatcgttactttcagggcgttgtagatgtcgggcagatgacccaccgggaattcaacgtcgataaccgagccctggacgcgggtgacgcgaccgttggtaggctcggccgcagtggtctggttgtcagccatatgcgttcctactcttccttcttggtcagcgcgtcagcgctgccgatgatttcggtaagttcctgggtgatcgaggcctggcgggaagcgttgagcttgcgcgtaaggtcgtcgatcaggtttcgtgcgttgtcggttgccgtgtgcatggcgttctggcggcttgcggtttccgacgcggccgcggtcagcaggcactcgtggatgcgggactgaatgtacttcggcagaatcgcgtccagtaccttttcgaggctgggctcgaaagtgtacagcggagcgacatccgcagtagccggtgcctcttcatcaggatcgggcaccttggtctcgtttttcacgatttcgaccggcagcatgcgcagcacgcgcaccttttgcaccaccatgttgatgaactcggtgtagacgatgtagagttcggaaactccacctttctcagccggcttcatgtaggcgtccatcaaagtgttggagatcgtttcagcaatttccacgccgggctggtcggtgtcgccttcccacgtcgccgcgatgtcacgattgcggtactggtagtacgtcgaaccgcgacgcccgtacacgaacagctccggctgcttgcctgccgcatcaaggcgggacagcagcgactccgtttcacggataatcgaagaggtgtacgggccggccatgccacgatccgaggtgagggcgagaacggccacacgcgggttgttctcgtccttcaccgcaatcggatgcgtgatatgggtgtgggccaccaacgcttgcacggcatcgaaaatcgcatcggtgtacggcttcgcgttcagggccacatcacgggccttggcgatatgcgaagacgcgatcatctcctgagcgttgaagatcttcgccaacgactcggtggagtggatgcgtgatttcaatgcgagttgcgagcccatggcttacttttctcccgccacgatcttttcctgatcaaccggcgcggccttgtcaacgtccggcttcttctcgaccagcggcttgccggcggaagagacgaacgtcgaacggaactcgtccacggccttatcgagggcagcctcggtgtcggcggtgaattcctcggtctcgcgaatggtcttgaggatatcggtgttgtggtcgatgtagtccagcagtccctgctcgaacggaaggacgtccttcaggtcgaggtcgtcgagcttgccgtgggtgccggtccatacggacacgacttcctgttccggcgagtacgggtggaactgcggctgcttcaacagctcggtcaggtgggcaccacgggtcagctgggccttggaagccgcatccagatcggaggcgaacatggcgaaggattccagcgaacggtactgtgccagggagatcttcagcgtaccggagaccttcttcagagccttggtctgtgcggcgccaccgactcgagagacggagataccgacgtccacggcggggcgctggttggcgttgaacagatcggactgcaggaagatctggccgtcagtgatggagatcacgttggtcgggatgtaggcggacacatcgttcgccttggtctcaacgatcggcagacccgtcatcgaaccgccgcccaggtcatcggagaccttggcgcaacgttcgagcaggcgggagtgcaggtagaacacatcacccgggtaggcttcacgccccggcgggcggcgcagcagcagggaaatcgaacgataggcctctgcctgcttggacaagtcatcgaagacgatgagcacatgcttgccgttgtacatccagtgctggccgatggccgagccggtgtacggggcgatgtacttgaagccagcggaatcggctgccggggaggccacgatggtggtgtactccatggcgccggcgtcttccaggctctgcttcaccgaggcgatggtggagcccttctggccgatggccacgtagatgcagcggacctgcttcttcgggtcgccggattcccagttggccttctggttgatgatggtatcgatcgcgatggcggtcttaccggtctggcggtcaccgatgatgagctggcgctggccgcggccgatcggggtcatcgcgtcgatggccttgaggccggtggacagcggctcgtcgaccgggtggcggtgcatcacgtcgggggcctgggcttcgaggatacgacgaccctcaatgccctggatctcgccgaggccgtcgatcggcttgcccagcgggtccacgacacggccgagatagccgtcgccgacgggcacggagagcacttcgccggtgcgtcgcacttcctggccttcctcaattcctgcgaaatcgccgaggaccaccacgccgatctcacgggcgtcaaggttgaacgccaggccgagcgtgccgtcttcgaacgtcagcagctcattggccatgcaaccaggcaatcccgtcacgtgtgcaatgccgtcaccggccgtggcgacatagcccacttcctgggtgggggtgtcgctcggcttgtacgacgacacgaagtcgtcgagggccttgcgaatcgaggcgggatcgatggtcagttctgccatgatcactccttctattggttattgttcagtcaagtctttgcttgtgtgtggtgttggacggattggctcggccggtcaggccggagtcgcctccgtctgcaccttgcgatgcaggttctgcagctgtgcgaccacggtgttgtccgtgacttcgtcgcccacctgaatgcgcatgccacccagtacggtcggatcgaccaccgagttgatgtgcacctggcggcccaccttggcggagtagacctcgaccagtcgctcaatctgctccttcttcagcggggtggcggtggtcacggtgaccatcgactcgcccatgtggcgggagaacttgttgatcagccactggatggtctccaagtagcggcggcggcgcaggttgcaggtggcgtgttcggcgagcctcatggtgaccttgttcagggtcttgccggagaacacctcgcggaacagcttcacacgggcctcgctggtggcctggcagtcgtacagcttggagcggacgaccggcaggttcagcagtgcggaatgcagctcggacagctcgatggatacctgcagcgtggcgtcggtggcgtcagcgtagtacatcatggcgtccacgccgaagtcctccaccgcgttggcgatgtcgcgcgcacggctccaacggcgggagaccaagtcggtcatgatctccatggtcataggatgcgcgttgtcaccgagcagtcccttcaggacggccaccttgtcggcgaccgggcgggacgggtcggtcagtgcgcgttccagctgaatgctgtcatcgagcaccttggtgatcgtgaacagttcgttgccgatccgccacgcgtcctcacgggtgtcgcgcagtttcggggccagcgaatcacgcgactcgcggtctgcaatacgtgatgcctctcctcgcatggtcacctccctttctggttacggatggtcacggtcacttcttggcgcccaggtcgtcgatcatcgaatcgatcatcgaggactgcacgtcgttgtcttccagcttggcaccgagaatcttgccggcaagcgcggtggcaagagcaccgacctcgcccttgagcgagacgatggcctgctgctgctgggattcgatcgagcgctgtgcggatgcggtgatttgagccgcatcggactcggcgcgggaacgagcgtcggcgatgatgtgggacgcttccgcacgggcgtcgtcgcgaatcttggcggcgtccacacgggcggtgctcagctgggcctcatacttggccttggcctcgtcggcgtccttcttagcctgctccgccttggcgatgttgccctgaatcttggcggcgcgctcgtcgaagatcgcattgaacttcggcatgaagaacttgtagaagaacaccgcaacgatgacaagaatgatcagggaccacacaatgtcataggtctcgggaatgaacagatcaattccgccttctgcgagcgtcattatgaagtcctcctttcactggtggattcgttttgccttctgtattcgactgagaaaacgttcgatcagtggaacatcagggcggtaacgaagccgatcagtgccagcacctcgaccagagccaggccgatgaacatgatggtctgaatcttgccggacatctcaggctgacgagcggtggattccatggccttgccgaagaggatgcccagaccgatgccagggccaaccgcaccgagaccgtaaccgatgacggacaggttgccggcgaccgctgcgagggtgatgatatccattgtgtttcctttctaacgtacttggcgacgttataaatcttatttcgttcggtcctgcctacctaggcgaggccgggttccgaaagagggggttgaacctcactcctccgggaagcttaggttgatgtacacggtggaaagaatggcgaagacgtaagcctgcaggaaggcgacgaacgcctcgaagcacgtcatggcaagaccgctgacgaaccacatcgcgccgactgggatgccttgcagcttgttggctgcatcgacgatccagtactgtgcgaatgccaggcaggtggcgaccatcaggtggccggaaatcatgttggcgaacagacggatggtcagggaggccggacggatgaccagcaactcaaggatgttaatcggggtcaacaggatgtagaccggccacggcacaccgggggtgaacagctcgtgacgcagataatggccaagaccttgcgaacgtgcggcggcgatccaatactggaccatggtccagatggcgaacaccagcggcatgaccacagtggcggtggccgccatgttcatacccgggatgatgccacacaggttgaagatgaaaatcgtgaagaagatggtggtgatcatcggcacgtagcgcttgccgcgaacctcgcccatcacgtcatagacgaccttgtcacgcacgaagtcaagaccgtattccaccacgccctgccaacggccggggatgagcttggcgcgctttgcggtcacgccgagcaccaccaacagcacgatggttgccacgatacgaatcaaaataatgcggttgatagcaaacggagttccctggaacagaatctccgggggaaggaagtcaccaaccgagggcagatgagcgcctgcctcgtcagccaacagcaatcctgcgctgagcgaaccgaccatatcacgcctcctgcttcttcaatgtcaggtgtcagtttaaacccaccgggcaggcaaatgtgacgtgctcgttactttcgtctcctcggtgtggagtctgccgggcgcggacacggagtctgcgctgggcattcggctccgaatgactgaagagtgattatttgcctgcgtcta

SEQ ID NO: 3265 - DNA, 4619 bp, Unknown
  R53_2m  MAG No. k141_9555
acattctggccgacctcgagttccccgcccatacaactcgaacaggaggaacgcccaccgccacaaaggaacacaagccaaaacggacacacattttggcctataacccttcatgcccgatcgatcggcagacaaaggcgaaccatcggtatggtcatgttccgtattctggcaatcggagtatggatattcgccctgctgattttcgttggcggattgagcaccgatttcctgacatgcacaatagtcgcgctgatcatcgcattgaataccctgattccgtcaagccaaagccccggcgcccgcagagagcgatcggggcgattccgtatatacggcggtagaatctaatcaagccgcatcgagacggccgagagaacaacgaggttgggggcatgatgccggaacgagagaacggaaaaatgggcaaaatcgtgaaatgggtcaaagacaatggtctggccttcgcacgcgaaatggccggtcggcatgacgccgatatgagcaacgaaggggcgagtcgccaatttcgccgtgatatggaacgagccaccgcggcattcgccgagcttggcgcagacaagcagaaaatgtacgaactgctccgtaaatggttcggagtggacagcatggaagaagcggactcctacatcagggacggagcccagttcgaataccccatgacactgctcgaagaatacctgaaacatgaaggatacgagacaatggacataatcagattcaagagagaccacaacgtagcggagagactcagacgagacccgtcactgtcaagcctcaccccagaacaactcaaacaacgaatggagcagaacaaataaaaacgtctccagcgctcgcctgtcgaacggtagaatctaaatatgtcgcatagaggcgggtgagagaacgaggggcgttgagctcggcagccatctggtggagttcaccgtcatacatgcgttactcatggtgccacatccgtatcattttgcgacacgcgcgggcgacctgaatgagccgaacttatgcacattttggccgaaaatgtgcataagttcatcaaaagtgtgtaaattgagcatacggagacgtgatgacaagccgaaaggagactgacatgactgcagtggcggtggctccaaaggcccataaaatcggcaggccggtcatgctggacagcgaggaaatccgaaagcgcaggaatgtcctcgaaggcaagtacggcactcgtgaacagctttctcagaagcgcgacctcatcggacttactctcgaggagcgcatcgcattgtacgacctcgaggatctcgacttcctagagggccgatgagcacggaatccgaccagaccgaggaacaggccatcgatttcgcccagagactcgagaacatgctcactgaggttctcggccaaccgtcggacgggcaatacaccgccgacccgcagggcgcacgcaaaaaacgcagcgccagctatctgatcaagacgcgggatccgcaaggcatttctctcaccgtgggcggcagcaccatactccgcctctcgtaccgttaccaatgctcctgccgcgactcgaattcatacctccaagtggatgagtctgcgatcacgctgcgagccgaaagcgaccccgcacccatcatccactacgatttcgtgcgcgacccccatagcgccattcccgcggcccacatcaacattcacgccagcaacgacagcgccacgaaagcgatgctcgcatgcggcagcaaaagccagggcaagaacagacgaaaagcgttccttgaaaaaggaacctttcccacattctcctccctccacttcccggtaggaggagaccgattccgccccggactcgaagacgtcctacaaatggcaatctacgaattcggcatcgacgcacagccgcaatggcagcaagccatcgaacagagccgggccgaataccgcacccgccaaatcagcgcccttgtatgcgaattcccggacatcgcataccaagccctctcgcaaaacggatacctcgacagcggcacaccgccacaacgacccgaacgagaagacaccaaaagtcgactcaccaaatactgacgccaaaccgccccggcgctcgcaaagagcggccggggcgattccgtatatacggcgcttgaacctaatcaagccgcatcgagtcggccgaacgaacaacgaggttggaggcatgatacccagagaacacaaaggggccagcgtactggccgacagaaaagattacgtagccttggacctcgaaaccacgggatatgacccacgattggacgaaataatcgaaatcggtgccatcaaagtccgaaacgggcaacccatcgaccggtacggacaactcatcaaccctggtcgccatatcccgaatatcgttaccgaaatccatggaatcgacgacggcatggtaaaaaaacgcgccaacgctcgccgacgtgctctccgaattccttgactggatgggcgacggcctgattctcggccacaacgtcaacttcgacatcaatttcctctatgacaacgccgaagatatctgtggcaagtatgtcggcaacgacttcatcgacaccctccggctcgccagatacctctaccccgaagaacgtcacaaccgactgcaagacctcatcgtcagattcgatatcgccgaagaccaagagcatagagcgctcgccgatgtggaacagaccatcgcgtgctatcggtggatgattcggcacatgaatgagaacggtattcccttcccggccggagatggccgcagccgcagaggcttatcttcgctattccgtggcggagatcaactgctgcagatagccccacaggacgaagtcacccctgatcccgcattcgaaaacctcacattcgtattcaccggcgcactcaagaaaatgacccgcgccaacgcacaacaggccgtcaccaacctcggtggcatcaacggtaaaaccgtcaccaaagacaccaactacctcatcaccggcagcaccgactacaatgccgccctcaaaggctccaaaagcagcaaatggctcaaggccgaaaaactccaactcgccggacaagacctcaacatcatcagcgaagacgtgttctacgacatgctgggggacagcatcgcccaagcaccaacgcaaagccaactgaaattcaaaatcacgcaaccagcttgcaaaaagattctggaaatacccagcggaaacctagatgcggaagaagtcagcgtattggccgtcgatgacagaactaagcccagcatcgttttgaaaactcaggacggcgaaattctcgcagaattcagctccagaatgaaagcgtatgaaaccatcgccgccctgaacggtagaacaatagaattaaccgcaaccaagcacgatgaattcgggtctgccccatacttcaacgcaaaagcaaaaatcattcgatagggcaaacagtcacaaacgccccggcgctcgcagatgagcgaccggggtgttttttgtttattcttacaagaattctagtttctgatatgaaaagccctggcgctcgcagatgtgtggcaggagacgccacggttacggccaaggcggcggcgtgcgtcgctggcgtcatcaggatttcggctgctggcgggtcggactggtcgcctcgatgccgcgcgtggattgtccggaatgcggcgtcgtggtcgcccgggtgccgtgggcggaaccgggcagccggttcacgagggatttcgaggcggagtgcgcgtggctgatgggcgtcgcgaaccggaagaccgtcagcgggttcctgcacgtggcgtggcgcgccgcgggcgacatcgcccgcagggtcgctgatcggctcaggacggcgatgccgtcgccgttcgacgggctgacggcgatcggcgtggacgggaccagccaccgcaaaggccatacgtacatcacggtggtcgtcggccacgagcgtcaccgcgtggtctgggcgcacgacgggtacggcggggacgtgttcgacctgttcttccggcggctcgccgaggagcggaaggcgtccatccgcgtggtcgccggcgacggggcccgctggatcgactcatgcgtcgccgcgcactgcccgaacgccgaacgcgtgctcgacgggttccacatcgtctcctggatgaccggcgcgctcgaccaggtccgcagacgcctgtggaaccaggcgagacgcgccggcaacgaggaggtgaccaagcgcatgcgcggcgtcaagcacgccgtcctgaagaacccggacgacccgaccgaccggcagaacgacgcgctcggcgccatcaggaacacggacccgaagggccggctctaccgcgcctggcagctcaaggaactcctgcgcaccctgctcagacacccccctcgaccaggcgcgcggcgaactcgaccactgggtgttccgggcctcgcgcagccgcatacccgagatcgtcgaactctacgaaaagatccgacgccgacgccccgacatcctcaggaccatccggccgggctaccccaacgccagactcgaagcatccgacaaccggatcaaggccgtcatccgcatggcctacggcttccaccacgtcgacaacc

SEQ ID NO: 3266 - DNA, 21762 bp, Unknown
  R53_2m  MAG No. k141_9670
ccatgtatctgcaggcacgcaacgcctcagaaaccgaaatggacaagcgtttgggcgttgcttctcaccggaataaggatgatgttgcgaagtagccgattctctgcggcgaggctaatccgcagctagatactactggttcggctaaaatcaccacatactattaaccgataatgtacgttatgtcagattagttatccttgacgaggattcagtcgcctgtatcaactagtccacgcataccaggccgacagccaaaggagcaccggagcgaccaccgcaattgcaagaatcgccgtgcctttcagccaatccttgtcatttcgtttccagtggaatgctcgccaaatgaaccatatcagcatgggaatctcatacagcgacagcaatggcaaaccgatgaaaaccaggtcgaagcccgcggcgcaggctccatcgcatcccatcatgaagaagtcctcgccgttgtgtttcagtgcgtttggaaataacggtttacggcttcttcgatctgctcgggcttctcgaggatctcgtacgcgccgtgttcctccatctcaccggccggagcgtagccccagcggcagccgatggcgtccaaattgcaggcgtgggcgccgtcaatgtcggtgtagcggtcgccgatcatcacggccctgtcccccgctgcagcatcaaaaccgatttcgtcgaagcagtaccgaatcacctgatctttgtccagacgggaattgtctttggaagcaccatagatgccgtccaacagttcggtcaggtggaaatggtcgcagataggcatgcactggtattcgggcttgcagctggccagtgccaggtagtaaccgtcggcatgcagtttgagcagctgttcacggatgcctgggaatacgacgttcaccagtcgtccgggcaccttgttgccgggctcgttcggatcgtcgaacacggcacggtctccgtagtagctgcggtagatgtccacggcccgatccagatcttccgcaggcacatgattgcggcgcagagattcaataatcgccggtccgatgaagcgtcgcagttcggcggcgtccggaaccggtcgaccgatctcttcgaaggtcttgatgacggagccgataatgccgccgtcggacttggtaagcgtgccgtcgagatccaacaggaccactttcatcggatgctgtgccattgagattccactcccccttgttcatgtcgactgctttgaatggtcgtcaaacaatgcgacttgttccaacaatgattatgcccagtcgggatgactgggcatcaagttcacgtgttgttcagtaggagatcactcgtagtcgggaatccaaccgtcacggtgcatttgcaggcgcttttcgagcagggtggccagttcctcttcgctacggcgttccagcagcatgtcccagtgggtgcgggtgggtttgctgatttcgtcgccctcacggtcggcgtcgccctcacggtgggccacggaaccacaacggcactcccactcgtccgggatttcggcaccctcggcaaacggcaggatggtgcggtggcccttcgggcatacatacgccacatcgtttcgtgcggcgaaatcgacgttgtcgtcggactccagcgatttcgctccgatgctcatgcccctgaggctacgttctgccatatcggcatcctccttgaaagatctttaaccctactaatttacgcaaccgttcggacttggccgctattccaagcttccgacgtcggctgacaaactcccgtcaaacagccccgtcagtccacgccggagtaggccaccacgccacgattgatctggtcggccgcttcgtgggcgaggccggccagccgctctcccccgtcgaacggcagcggctgggcgacagcgatctgctgcagcacgtcagccagtcgtttggcagtgcgtacgaagtcgccgccggtcatgtcggtgccgtacaggcacgatcccagcgaaccgccatccgcccattcatacatgatgtcgagaatgccgaaatccggccgctgcatctcgtccagaccgtgatcctcgcacaggatatcgatgtcttcacaaatgcccttgagcttggacgaagcgatggcgatgggcccggagatgccgcccgggtagtgcctcggttcgccgtctcccccgcgtctggcctcgtataccagtgaagagagcacagcggccagtccgttggcgtcgagcttgtcgaacgtgccggcgagcagcgcctcgcacagttccaggtcatgttcactgtagatgcggcgcagcagcagacctttttcagtcaacgtcatgtcaatgtggccggccgcattgacatgacgttcgaggtaaccaagcccggtgagaatatcgcagatgcaatcgaactggcgtgccacggacccggtgcgggagtcgtagcgatcggtgacgcgctgcagttctcgagtctcgcgggcccagcggtggccccatttgaggtgttgctggaggtccgggcagttgcggcatggatgctcgtgttccgccttgcgcaaatcgcgaatgcgctggtcgaggttctggaaagcgcgtgaacgctcctgatcggtcaggaacacttcgtgcttcagtttgcggcggccttccttttcgatgtcgctcagctccatacgcagggtcatgaactgtttgaagtcgccgtgttcgcatgcgaacgcctgttcgtatccggccagcgcgttcttcagtgtgttaatctgcgattccagctgccaggccgattcgttggcctcccactgggcaaacgactggtccagggtgacgcgcgcggtctcgtagtcgctggagttgagcaggttcacggccatgttgaacgtgggtcggaagctcgagtgcagcgggtagacacgcttggatgacagcgaggcggccgtggcgggcacaaaaccgtgatggtcgaccacgatggcgtggccgatggtgtcgatgccgcgccgaccggcacgaccggtgagctgcgtgaattcgccgggcgtcaggcccacatgaccggtaccgtcgaacttttcgagtttctctaccaccacgcagcgggccggcatattgatgcccaatgccagtgtttccgtggcgaacaccattttgaccagaccttcttcgaacaatcgttcgactatctgacggaacagggcaatcatgccggcatgatgcgaagcgaagccttcttccaatgcaaagcggaacttggagaactgcagggctttcaggtcttcctgagtgagttgcccctccaccatctcatccacgatgcggcgaatcctggtcacttcctcatcggtggtgagctccagtccagcgttgatacactgttccacggcctggtcacagccgttgcgcgagaagatgaagtagatgccgggcaacattcccaggaagttaagctcgtccaccacggcccagcggcgcggggtgtggcgttccgctttcggggcacggtctttggcgcctttgccgccgcggcctctgccgaagcccttgcgcttatcggggcgttcctcgccgcgccggcgtgcggccttgcggtccaactggtcgagccggttgatgagttcggcgttgagtttggtggtctgctcgccgttgccgtcgcggcgatagaggtccagcacctcgggctcggtgtgttcgtccgcctgcacgatgacgtgctgttccaaaggcacggggcggtgttcgctgatcaccagttttgtgtcgcctcgcaccgaggcaatccagttggagaaatcctccacgttggacacggtggcggacaggccgacgatcttgaccgtcttgggcaggtggatgatgacttcctcccacacgggcccgcggaatcggtcggccagatagtgcacttcgtcgagaatcacgtagcgcagtgcgttcagcgtggtggaacgctcgtagagcatgttgcgcagcacttcggtggtcatgaccacgatgtccgcctcggaattgatcgaggtgtcgccggtgagcaggcctaccttgtccgggccgtacacgtcgaccagatcatggtatttctgattgctcaacgccttgatcggtgtggtgtagaaggctttgacgttgcgttcctgggcgaggtaaatggcaaaatccgccactacggttttgccggcaccggttggggccgcgaccagtacgttgctgccggcttcgagcgcgtcattggcttcggtctggaagtcgtccagttcgaaaggcagggattcggcgaatcgcgctgctgcggacgcccgatggcgttggaccttttggaatgatgcgtaccgctgcgaagggctcagcgtctgggaatcggcattgcccttatggtgttggtgacgtgccattgctgctttccgttagttgttgaatcgcttccagcgggcccatgcctgggtgtggcgttcgcgcttggcggccttgctgcgaatcacgttcgcatgggcctcggcataacgattctgtgccacgctgagcggctgagtgaacagaggcggctcgctggtgtcggcagaggtgccgggctcccccatcgcggccacgcgttcaccgagttggccgccgatgccggacatgtctttcaaggcacggagtccatgaagggctgcatagatgagtccggcaacaatcatggccagcatgaacagggccagaatcagccatatccaccaaggcatgaaaggctccttacttgttctcgctgatgctcagttcgcgttcggcgcgtgccacgatcatggtgcgcaacgtttccggggcgaccgccgtgatatgacgcgcgtgggcgatgcagaaggccacgaaccaggaatcggaggaaacggtcagatgcaccttttcaccggcaccgcattgttcgacggtagcgcccggcaatgtcttgatgaatgccagatcgcgctgatcggtgatgaacaccgcgtcggtaccgttgtcgaaactccacttgcgcagttcgctcaccggcatgttcgggatgttgatctgcttggtgggcttgaccagttccgccttttcgatacgggccaatcgcagtacctgccagatgcgcggcttgccgttggccttgtcgagggtcttgtctttggagacgtaggcctttttgtccttgggtgcggcggaaccaacgtccgtgtagacggcggcataatacacgccttcgtcaatgaagatcttggcgggggccaccagcttgcggcgggtacgacctgtaccgtcggtgtactccatgtccaacagcgaatcggtgttgatcgcacgcttgacgatggagaagcttcggggctccagctcatagccggtcaggctcagccacggggtctgaccgggactgacatgacggcgcaaacgctcatacagggattcggcctgcccacgctgcttgtccggcagcaacggcgaatgcgccaggtagctgaccgaggcggtgagcatgctgaggtattgcggcgaaatgccggcaagacgttcaaggcccagcgaattggtggcggaaacaataccctcggcatccagcagcggccagtcaatatcgaagaactggctgccggccatctcaccatcgtcggaaacggtggtcagggtgttgatgtccttatggatgatgttgacgaatttcttgagttcatcatcgttctttggcttgccgataaagcgttcgcccagctcgctcatcgagaattcctcacccagatgagcggagaggaacagcatcagacgcaggcgacgatcaacctcactgcccgtttggaaagcggagccgttcttcttgttctgagccttgatagactcgggatcacccggctctcgcacatcgcgactaatcgacggggaaaccaccgaagcgctcacaggactggcggattcgtcggccagagtgaaccggctggcggcgtgcaaacggcgatgataagcgtccacagcctcttgcgggctgacaatcgtggcccccggatgctcaagcacaaacatggccaaatcgtcggaatcggtgtatgccacgttcaggtgttcgccatccacgtcaacggtggcggcgaaacgacgcgaatcaataaccttgaccagtgaatccggaatgggctgcgtccccaagccaggcgcaatcgaatccaagccaagcccgggaatcggggtctgcggcacacgcggcgtagtgcgcgacacatgctgggtgagctgggactgatccggctcggaagaaatcgacatcgaacgagccagatagttggcggcggcaagcaccggcatatcttccggctcgaacatcaggcggatgcgcggttcgtcgcccaactgcagacgataggacgcgaagtcctggccttccgacttggacgagtactcaggctgccgtgattcgatggcaatgcccatcgcagcgagcttggcgcgatcacgctggaactgcttggcgaacgcggccttggcggcctgatctgccagctctccatacgagtcggcgtaagccttgacgcgctgcgcaatttggcgggatgtgagccattgcgggaacgcggatgacaacacagccagtacgtccagctcgtgcttgccccatttgtcggaaaaacgccgacgtccgcttgtgccctctgccattagtcctcacgtatagttattgtttcgttataagtgcgtatgagtttcctcacactcactctatcttagaggctttttccgcacttgagcgccatttcacaaaaataatatcttttttatcgttcgaccgtgttgtaaatcacacccaatcgtccggttcgatgccttgcgggccaacgtattcgccgttcggcacgtagcttggctcacccttatcttcaagtttggcgtcggcgaacatcatgacgtcacgtccgaatgtccagtcgccctgaatggaaaccgagttggctgcggccaaagatggcacggcgtaggggaaccgttcgtcgaaatcgcggatgttcttgtagtatcgcggatcaagttcgacgttcgggaagatgtaattgccgtcttccatctcatacgtgtccgtcaggtggaagcgatcggaacgcataatgaacaaatcattggtggttttcaccggaaggaagcgcatacgatccacttggacgcagatagaaccgttgaacagaccgattgcggcacccatggcggtttccagctgaatcacctgttcggagttcgggtccgtgggattcacggtctttttgttacgaatcaccggcaacggcaacacaccatcgcattcggcgagcttgtctttcaaagcgtcgatgcgaatccagatcgagttggtgttgaagtaaggatgcttggcgatgtcttgggccgcttccttatcatccggatggacctggctcatttcacgcagtatcaggcgaccagtggccttgtctcgcacgatatggcctcccttgcgatcggccttggtgcggatagccacttcggccatgaacggggcacctgtgttttcgaagtgctgggccaacgtacgcgaggggcgtgcaccgagattgtcggaattggagatgaacaggtacttgaagccgcgctcctccaatacgtcaagcaggccggactcccagatggtggagaacaggtcgccgtggccgggcgggcaccattccagctccgggttcatggggtagctcaccggttcgccggtggcggccacgagtttgggttcctgatgctggatgatttccatcggcacgtcatgctggctgaacttgcgatgatgcttgagcgccttcatcgtgtccgccgaagtgcggaaggaattcatgaacgtcagcggcagttcgacgttcaggcgggtgcgagcggtaagcacctgaccgatgatgatgtcgatgaagcgcatctgcttggccttgtgcctacgcaccggcaacagcgacttggccttgtccaatcccatggaggtgcccagaccgccattgagcttgaggaatgcggtcttggcgaaggcgtccacggccttgtcgtggttgatggtctcatagacgtcgtggaagctgggcacgtggccaagcggctcgatgtcgtcctcacgaatccagctggaggcttcttcatggcgccatacgtcatacaaatggcggaactggttgatggcggtttcgctcatgccgtgctcgcgcatcttggcggccgaaagctcgaaagtctcatccacttcgggggtgtttacggtttcttcggggatatccgaggtgacggcgtcggtgtcgtcagcggcggcgatatccagttgggccttatcgtttatttcggtcaattcgggtccctttcatcaaatcaataggaaccagtctatcccctgtttggggcaaacacatacgatggggggcggaggcggtgaattgtcggtgataattccaataacacgccaagatgaagtccgtgtttaatccattacgaatggcttacaaaggtaagtccgtcgtcatgttgtctcatgttgtctgaaaacggaaaagccccggaaagcaaccactcagaagtggcggaattccggggctaatcggtcgggccggcgggatttgaacccgcgaccccttgacccccagtcaagtgcgctaccaaactgcgctacggcccgatggtgcaaaagcaccgagtagataatctaccagatatatgaaatctggcaaattacgcgcgtgtcacttccgcttcttcttctcacggatgttcacggagatctgaatcggcgtgccttcgaagccgaattcctcgcgcagggagcgttcgatgtagcggcggtagccgtgctcgaggaagccggtggcgaagatcacgaaacgcggcgggcgcgtggacgcctgcgtggcgaagaggattcgcggctgcttgccaccacgcaacgggtgcgggtgggcggcctggatcttgccgaggaaggcgttgagcttgcctgtaggaatacgctgatcccaggattccaaggccttatccatggctcgcgtcagacggttggtgtgccagccggtcttggcggacaggttcacacgctcggcccacatcacacggtcgaattcggtgttccacaggcgttcgagacgctgcttgtcgaactcgtccatcgcatcccacttgttgaatacgagcacgattgcacggcccgcatccacggcggtggacatgaccttcaaatcctgatcggataccggctgcgaggcatcaaacagaatcagcgccaattcacagcgctcgatggcggcctgcgtgcgcagagaggaataatattccgcgcctgtgagcttgtgctggcgtcgcttgatgccggcggtgtcgatgaacagccagtcctcgccatcgatgttgacgatttcgtcgacggggtcgcgcgtggtgccggccaaatcgttgacgacggcacgttcttcgcgcgccagctgattgagcagagacgacttgcccacgttcgggcggcccaccagagccacgcggcgcaggccggaaggcgtgaggtagccggaagtcttctcggcctgcttgagcttgtcgagcgcgacgtccagcaggtcgcccactcctctgccgtgcatggcggaaatcgagtatggttcgccgaggccgagtttccagaattcggcggcaaggtattcgctggcctggtcgtcgatcttgttgacggccagcacgacaggctttccggcggcacgcagcatcttgacgatgcgctcatcggtggtggtcatgcccacttgcccatcgaccacgaataccacggcatcggccaaggtcacggcaatctgtgcctgtgaggcgatggcggattcaatgccttccacgtcggcttcccagcctcctgtgtccaccagcttgaagtcggtgccggcccattccgcgtcatagctcacacggtctcgtgtaacgcccggcgtgtcttccacaacggcggcacggcggccgaggatacggttgaccagggatgatttgcccacgttcggacggcctacaacagccagcacgcccaccggcttgggaccggccttgcgcgcgccttccgtgaaaccacggccggaaatcagatcctcatcgccttcgtccagctcatagccttcgagattggcggcatactgctcgtattcttggttctcgatggcgtcctcgaccacaccgatgagcagatcgagcgtgtgggcgaagtccagatcggaattgtcgatggtggtaacgccatcggcggcggtcaggaagctggtgaccttggaatcggccttgtcgcgcgcggccacatcctcagcgcccacgcccttgacggcctggccggtgcgacgggcctgacggacctcctcacgggcggtcagcagcacgcgcacctcggcgtccggggacaccacggtggtgatatcgcggccctcggccacgatgcccaaccccccggagaaggagtcggccgacgcctcgcgggcgatgtagacgcgctgggcggcgatgagcacgttgcgcaccgggatgacgttcgacaccttggagacatggctggagacttcggaggaacgaatggcctcggagatgtcctcgtcgtcggcgaatacgcaggggttgtccgggtccacggagatatcgaaatggtcgccggtgaagaactcgcccaccgcttcggtgatgacacgctcatccacggtttcggcgtccagatcgatgccctgcttcaggcaccaccaagcgcaggcacgatacatcgcgcccgtgtcaaggtaggcgtatccgaaatacttggccagcgccttggacgtggacgacttgcccacgccggcggggccgtcgatggcaacgcgaatcacaggccaacctccttggacagcgaacggacttccgtctgggacagcacgcggtaggaaccgggcttcagatcaccgagtttgatcgggccgatctgggtgcgcaccaagcgcttgaccgggaagccgattgagccgaagatacggcgcacgatgcggttcttgccggagtgcagcacgaccttgaccatcgtgtggtcgcgtgaggagtcgatgatcgcgcagtggtcgagcttgatccagccgtcgtcgagctgtacgccggtggtcacgagtcgacggcatacggtgccggagatcttgccttccagtgtggcgacgtaggtcttttcgacctcgtacttggggtgcatgacgtgctgcgagagttcgccgtcgttcgtcatgaggataagaccctcggaatcgtagtcgagacggcccatgtggaagatgcgctcgtacttgtcgcccacgatgtcgcgcaacgtgtagcggcccttcgggtcgtccatggcggagagcaccttgcggggcttgttcagtgccagagtgacgtggttcggattgacgcgtacgcgcgaaccgtctacgcgcacctgctgcttatgggggtcgacgcgagttccgagctcggtgaccagttcaccgtcgacctcgacacggccttcggtgatcatgtcctcgcacttgcggcgggaaccgaatcccgcttgggcaagcagcttctggagtcgaatggaattggaatcgtcttgcgctttcgcagcgcgggaatatgcgtttggcatcgttctcccaacgtggccggacagactctgtcatcgcagagactgtcgatttgtatacatacttcagagttggcggactggaatcccagccaattccaacctatatatcataccgcaacgtaggactgctgctagactggcaaccgtttgtgcgggttcgcccgtcttccaacagatgaaaaggaatgaacaatcatggaagaaaccaagcaacagccgctggccctgcgcgtgtgcgccgaattggccggcagcttcctgctgtgctttgccatttacgccttctccacatggggttcggccgtgtatggcatcaatatcgtgttcttcgcgttggctaccggcttggcatatgccgcagtcaccgccatcttctcccgcgtgtccggtggccagctgaatccggccatcaccgtagcctccgtgctggtttccaagacgaaaatcctggatggcatcctctatgtgatcgctcaggtcatcggtgccatcgccgccggcttcgccgtggtcaagctgctgcccacatccgagcaggtagctgccaaagtgtggctgactccggccgttaacggtttcgagaacggctccgtgtcttactcgctgctgacccagtatggcattacgttctcgattacgctggcgattgtcgtcgaggtcgttgcctctctgattgtcgttgccaccgccatgtcttctctgggtgatcacggcaagtcctcggaccgtcatgtcattgccatgggtcttgcctatggtctggccgccgccatcagctacccggttaccggtgccggtctcaatcccgcccgttccaccggtatcgcactggccgcgatgaatgagggtcttacgcaaaatccgctgcaacagctgtgggtgttctggattagcccggtcttggccgccgctgtggtggcgttggtcatgatcatcgcgcagatgatgaccactcccaaagtgccggctgccgccgatcttccacagacggatgccgatgcgaacgcggacacgctcgacgatggcgaattcttcgatcaggccgcctcgtctgatggcgattcagcggaaaaagatgttgccgaagagtccaaagaagctgaagtaggtaatcagcaggccgattcccaaggcgatgccgatgaaggagtcgaacgccactgagcgcactttccatgggcttttgtcctgaagaatcaggcgaacaagcccggtgatgatggccgtcacggcaagtatgaccgtggcggccatcgtatatccgaaagcaaccagcagtgtgatgacggcgacgacgccgagtacgcaccattcaaaccatggcttgccctcatgcgcttcggatacatagggatggttgtgcatgttgcgattccttctgtcgaacggttacgtgaccacaatagcaggcgaatagcaaaggtgggattccgcttggacccgttgacgggtcaggcggaatcccacctttgtgcgttttggctgagctgctcccctcagagagtcccgatcagtggaagaagtggcgggtgccggtgaggtacatggtcacgccggccttcttggccgcttcgatgacctcctcatcgcggatggatccgccgggctgcacgatggccttgacgcccgcgtcgataagcacctgggcaccatcggcgaacgggaagaacgcatcggatgccgcgaccgcaccggtggcgcgatcggcaccatcggccagcgtgttggcgcgctcgacggccagatggcaggagtccacgcggttgacttggcccatgccgatgccaaccgtggcctggtcgtgggccagcaggatggcgttggacttcacgcagcggattgcacgccatgcgaacacgaggtccttcagcgtgtcggcgtcggcggcatcgccggccacgagcttccaggcgtccggatcgtcgccgacggcgttgatcagatcggtgtcctgcacaagcaggccgccatcgatctggcggatggcctcgtggcccttcggtggctcggccaccttgaggatgcgcaggttcttcttcttggtctgcagcagttcgagcgcggccggctcatagtcgggggcgacgatgacttcggtgaaaatcgggcgcacgctttcggccatctcaagagtgaccttggagttgcaggcgatcacaccgccgtaggcgctcatcgggtcgcaggcgtgagccttcttgtgggcctcggccgcggtcgcgccgatggccagaccgcacggattgttgtgcttgactacggccacggcaatggcgggagccatatcccatacggtgcgccaggcggcgtccgcgtccacgtagttgttgtagctcatcggcttgccgccgagctgctcggcgtgggcgaaaccggtctggttgagcgggtcaatgtagagggcggcctgctggtgggagttctcaccgtagcgcagggtgtgcgcacgatcccaggtgcgggtgaactgggccgggaacttggcggaatcgacttcagtgccctgatcgtccttgtccacctcgacggcgtccagagaggccggcttgggccagtgcttggcggtccactcgttgatggtggcgtcataggcggcggtgtgcgcgaaggccttggctgcaagccacttgcgctcgtccagagagaagccggtgccatcggccacgcgggaggcgaccaatgcataatcggccgggtcggtgacgatggccacggtggcgtggttcttggccgcgccgcgcaccatggaggggccgccgatgtcgatcttctcgatggtatcggcctcgttggcgccggagcgaacggtgtcggcgaacgggtacaggttgacgaccaccagatcaaacggcttgatgccgaagccgtcaagctgcttggcgtgttcggggttggtcatatcagccagaatgccggcgtgaatgtacgggtgcagcgtcttgacgcggccgtcgaggcattcggggaatccggtgacatcggacacctcggttaccttgacgcccagctcggcgagcttcctggcggtcgaaccggtggaaacgacttcggtgccggccttcacgaacgcttccgcgagtacttcgatgccttccttatgaaagaccgagaccagtgctcgacggatcggtcggttcgtgtttgtcatcctgttcctccttggattcttgtggttgtgacgccaggaaccgcgcctgacggacgatgacggtcttcggggtcgcggcggtggtgcgggaatccttgatcctcccaaccaaccagcctatcgaaaaaacgagcgctgtgccaatcagcgcgagcagccatgccgcggtaaatcccaatgcggtcgaatgaccgacgactctggtggaggccatgacgtcgacgccaatgtgagcgagacgatgatcgccaagcgatccattggacagagcgaacagcaatgtggatgccagtgagatcagcatcgcgctcaggcagaatgacccggcggagtagatcagcgaaaccagtactgggccgcgggtggacgcattccgtatattcaacggtctgcaggcgaatccttgcggtaggaatacagccagcagacccacgagcgcagcgatggcgagaggcgcgttcaaggcaacggtacgccatagttcgctgctgaccggttcgggcagaataccgaatgccggtattgcaggaagctctttggattggccgagccataacgtgaaactggccaaatcaccgatggcgaatccgccgccgaagagccaggaaacagcccagagcatgacgttgggtagccagatcagcatggcgacggtggtgagaattcgtgaaccggtttccatcccggacaatccgaacaacgatacgacagcggcatggttacgtaccgaccatacgatgacggtaatcaatccaattgccaggtatatgcccagtatcgcgacggccaagacgacgccgattttcaggcagtggcgtatgtccgccggcacctgcttgcgagtccagtccctgaatgctcgcatcttggctgattccggtacggctgcgcataggaaaccgatcgagaatacgatggctgctttcagcaacaccagccactggtcatcgacaagacctaggtgtacggattgccggaatgcctcgttcaacccgagccaaacaaccaatccggcaacatacgcatgcggcccgtaagctttgattcgcatggtgagtgcattgatcagccatatcagcagtatggtcaacatcaatggcgtgatggtgagggtgaacgaatcggttctaaagcctgatccctcactcagaagcacaacggcctgtgtcagcgaggttgtgccgacggtgagattgtcgccgccctcttccatggagacaaccaataacatcagcgctgtatagcaacctaatgcaacggcatagatggccatggatgcgagggcgactatggctccccgcacccattggcgaatcacggctttcatcacgatcggtggacgtcgctcagtcgatgttggccttggcgagtatgtcgcgcatgatttcagcggcctggcccggggtcttgcccacggggatacccgccgcttcgagcgcgttcttcttgtcctgggcggtgcccttgcctccggagacgatggcgccggcgtggcccatctgcttgccttcgggggcggtgaaaccggcgatgtaggcgacaaccggcttggtcatgtgctccttggcccatgcggcggcgtcctgttcggcgaagccgccgatctcgccgatcatcatgacagccttggtgtcggggtcggcttcgaatgcctgcagggcttccagcagcgtcgtgccgacgatcggatcgccgccggcgccgagacatgcggtgaagccgatatcggacagttcgcccatgagctggtaggtgagggtgccggatttggagaccagtccgagcgggccgcggccgacgatgccgtcggggatgatgcccaagttgacgccagggttgccgagcgtgatgaaaccggggcagttcggtccgatgatgcgcacgcccttcttgagcgccagttcgacgaagtatgcggaatcggccaccggaatgccttcagtgatgaccacgatgagttcgatgccggcttcgacggcttcgaccacggcggacttggcgaacttcggcggcacgaacaccacgctggccttggcgccggtggcttcacgtgcttcgccgcaggtggcgaacacggggatgtccacgtcggcaccgttcttggcaccggggaaggtgacggatgtgccggccttgcgcgggttcacgccgccgacgatattggtgccggccttgagcatgcgagccgtgtgggtcatgccctgatggccggtcatgccctggacgataacgggagcgccgtcttcgatgaacagcatcagcgaacctccttggactgggtcgcctcaccggcgagctgcgcggccttggctgccgcgccttccatggtttcggacacatggatattcggattgttggcggaagcgaggatatgcagaccctcggcggcggcgttgccatcgaaacgcacgacgatcggcttggaaccgccgagcttggcgaccgcttcgaggatgccgttggcgacttccacgcaggaggtgatgccgccatagacattgatgaacacggattcgacctgagggtcggacagtacgatctccaggctttcggccatgacggctgcggaggcgccgccgccgatgtccaggaagttggcgggtttgatgttggtgccctgttcctcgccagcgccggagacggcatccagggaactcatgacgagtcctgcgccgttgccgatcacaccgacctcgccgtgcaggtgcacgtagtgcaggccgtgttcgcgggcgcgctgttcgaaggggtcgggaacgatgagatccacgaaacgcgcccagccatcatggcggaaggaggcgttgtcatccaaggagatcttggcgtccaaggcgctcagctgcttggtggattcgtcatccgggtcgccgatcttggcgagcggattgatttccacgagcgtggcatcgttgtctttgaaacagcgccacatcttgagcagaatctgtgcggcctgatcgacgtccgcgtggtagaagccgatgctctgtgccatttcggtggcagcggccaggtcgaagtcgccgagcgcatcgatgtgcaggcgcttgacggcctccggatgttccttggcgatttcctcgacttcggtgccgccgttggcggtggccagcacgtcgaagtcgcgcgaggtgcggtccacggagatggacacgtaatattcgtgcaggatgttcttggcttcggccacaagcacgccggaaaccttgtgcccgtggatggtcatcggcaggatggactcggattcaagaatcgcctcgtcgcggttatgggcgatcttgacgccgccggcctgaccacgatgaccgatcttgacctgcgccttgattacgcagggatagccgattttgtccgccgcttcggcgacttcatgggagttctgggcaaagatggcgtccggggtgggaatgtcctgttcctcgagcagctgacgcgcctggtattcgtaaagatccatcgatccttccctgactatgtaattggtccggcatataactgtacacagtacatgccggaccttgaaaactaactgtacgttgggtgagacggaatctcaggccggcatcgcgatcagcgagctgctgggcttgccgccgagcttatccagaccgtcgagaccatcgagccgcatcacaaaactgaagcccaccacagtgccgcccgccttttcgataaggtcggcgccggctttggcggtgccgcctgtggcgatgagatcatcgacaatgagcactcgctcccccgcctgtacggcgtcggtttcgatttcgacgctggccgtgccgtattcgaggtcataggattcaccgatggtttcgggcggcaatttaccggccttgcgcacggcgatgaaacccttgcccagatgggcggccatggccgggccgaacaggaacccgcgcgattcgagaccggcaatggagtcgaattcgctcggggacaccggcagagccgtttcaagcgccttgagcagaatcttcaagcccttggggtcggcgagcactggcatgaaatcacggaagataatgccttccttgggaaaccccggtatggaacgcaccaaggacaccagatattcggcgtcctgttgccctaccttgctcaatgcgtcgatggtgatgtccgactgtgccatagtgctcgccccttttatgcctttgcgatgcgatactcggatggtgctaccgaatcgaacagcttacttcgtcttggtttcattgtcgtcaccggtctcgtcagcggtgtcttcctcggacacgacggacgcctcgatcggaacctgaccagcctcatcgttagccggagcctcggtgtcttcgtcgggcagcgggttgccgttctcgtcgacctcatcatcggacacataggccgggcgggtgtactcacgggcgatggcgttgaagccgaaacgcagcttggagccttcggagtcgatgacgatctcctcatactgctcgtcgacttcgacgaccttgccgatcacctggccgatggtgatgacctcggtgccgggctgcaggttgcgacggaagtcctgcttctcctgctgctgctgcttggccttcttggactgccaccacatcatgccgccgaacacgacgacgatcacgatgagcataatgtactgttgttccacgaaacaactccttcaaacgagcgacattgacgaaacgccgccaagtgtgcaaacaggagaaagtctagaagagcttgctgacatcatctttgggcgtaattcccaaatgctgccatgccttctcggtagccacgcggcctttgggcgtgcgaatcataaaaccttcgcgcacgagatacggctcgcacacggtttccacggtttccgattcctcgcccaccatggccgccagattgttcaggcccacgggtccaccgttgaagttgcgcacgatggcattgagcacggcaatgtccagccggtcgaggccttcggagtcgatctggtacagggccagcgcctccttgacgtcgtccggccgcaccacgatcaggtcgtggacgatggcccagtcgcgtacacggcgtagcaatcggttggcgatacgcggcgtgccgcgcgaacgcaacgcaagctcatgagcggaacccgcatcaaggtttacgcccagtacgttggccgaacgttcgatgagcttttccaactcctcatgcggatagaagtcgagatgtgcggtgaagccaaagcgtgcgcgcaacgggcttggcagcataccttcgcgcgtggtggcaccgatgacggtgaatcgcggcagggtcagcgggatggagctggcgcccggacctttgccgaccatcacatcgacgcggaagtcctccatcgcgatatacagcagctcttcggcggcgcgcggcagacgatggatctcgtcgatgaacagcacttcgccgacgtcgagggagcttagaatcgaagcaagatcaccggcatgttgaaccgcagggccggaagtcacgcgaatcggcacttcaagctcattggcaacgatcatggccaacgtggttttgcccaagccaggagggccggcaagcagaatatggtccggtggcacatcgcgtttgcgggccgcgtccaggaacagttgcagctgggccttgagccgtggctgtccgataaagccttcgagaacatgggggcgcagctcctcgtcgctgaccggctcgttgccgatcggctgggaggagaccatgcgcaacgactcttcgttggcaccggtgtttgaggtaccgtaatccgttgtctcgctcatcagcggcccctatccatcagcgccaaagccagacgtagcacacgcggcacatcgtcggtggcaagcggcgtgggaatatcgttttcggcgcaagcctcggcaacggcctgctgggcgtcctgctgacgccagccaagtgaaatcagtccttcgacaacctgttccgtaccggtatccaccggagacttggatattgccgcctgagcggaagcaccctcgatctgactcaaatcaatagagcccttaagctcgaggatgattttctgtgcgcccttcttgcccagccccggagccttggccagcgcggtggcgtcgttgtcggcgatggcgtgggccagctgactcggcgtcagtgtggagagtaacgattgggccactttaggtccaatgccggagaccttgatgagttgcagaaaggttttcttggcgtcccgatccaggaatccatgcagggtaatggcatcctgagagaggttcatataggtgaagacgcgggtgtcttgcccggcgtgcagacggctcaggtcggtggcggacatgcgcacttcgtagcccactcccccaacatcaatcaatgcggtatcggtttcgaccgattcaacccgcccggtcagcatgccgatcatacaggtactccttcagggctccaggattcaagactcgaacaactgttcgaaagtatactacatgcctcggtcgtggttgatgcggcggcgcgtggatttctgtgcggcctcagcccactggcgttgcgcggcggtcagatgttgttcgcgttcgccgccctgcaatgcgcctgccgggcgcagcgcatggcaaatggccaaagccaaggcatcggcggcatcggcgggagtcggcattttggtgaggttcaaaatacgtgtcaccatacgctccacctgaatcttctgcgcctgcccgttaccggtgatagccagcttggcttcggtaggcgtatgcaacgccacgggaatattgcgttgcgcggcggcgagcatggcgaggccggcggcctgtgcggtaccgagtacggtgttgcggttggattgtgcgaacactcgttcgatggatacggcatcgggtgcgaagcgatccattttctcggacaggccgttgtagatggccagtagacgcagatcctgggtgatatccggtgaggaccgcaccacgtccacgtgaataaacgaaagccggcggtgctcgccggcttcgatcacgccgaccccgcaacgtgtgagcccggggtcgacgccaaggataa

SEQ ID NO: 3267 - DNA, 18237 bp, Unknown
  R53_2m  MAG No. k141_9697
accgtcgggtcggcccttaagcacagttgcgcgtaaccggcctggttgcctttggaataatccctgtaagtggacaggaaggcttcgccgattttggtggcgttgtccacagccttgtattcgcccaaacgcatgaacgaccccggatcggtgtctctcatgcggcctccgttgattacgatggtggagacttcgcctttagattgggtccgggattccgacgcgatgtaggcatcgcgaccgtcgcgcccgtgcatgaattcgatgcccgagccttcggtcttgtcatcgctgttgataagcgactgtcggaacgtcggtgagattctgattcgacggccggtgaggcccgtctggaacgtgccggtcagcagattcgacacgccctcgccgtccagatagacggtctgggcgtggttcgaatcccacatccgcaggcccgtcgaattgagtttcacgcccgtgttctcggcgtcggagctttggaatatcgcgccggtgaacacataaccatggaattggcctgccgccaccttatccgacgtgatcgtgccagccgcgatcttgacagcagtcaccgcgttggcggcgagcttgtccgtggtgatcgcgccggatactatcttgtcggcgttgaccgcgttggcggcgagcttgtcggcgttaacgctgttcgcggccagcttgtcggtcgtgaccgcgccggccacgatgtccccggcctgaatccgatgcgcgttgagcaacgcgaccgtcatatcctccgtgacgcggagtttcgcggtcgtcacgctgttggcagccaatttgtcggtcgtgatggcgagcgagacgatgttgcgcgcctgcacgctgtcggcggcgagcttcgcggcggtcaccgcgtcggacacaagcttttcagtggtcacgctgtttgcggcgagcttgtccaccgtgatcgcattggccttgaccttttcggcggtcacggaatccacggcgagatgcttcgcagccaccgtgccggcagccagaatgttattggccacaaggtcgaatggcgtgaagcgcgtgccatcccacgtcagcacttcgattacgcggtcggccaatggcacgagcacggaaggcgaattgttcggagtcccctgccagtacgtgtagaagtcggcaagcatggacggcgaattattcttctcgcctttccacctcgtccaatacttctgcgtgcgccaccacatgtcaccgggcttgagcccgtcgtgggacggttcgtccggcccacggtagatcaggttcttgccgtccgcggtggtctgcgcctttttcgcggcggcctgcgcctgattcgcctgtgacgcggcgttcgcggctgtgatctgggccttgtcagccgttgattgcgccgtctgcgcggcggcatgtgccttgacagccgcatcggccgcatcggtagccgccttgtcggtcacggccatccaaccgctgccgttccaccgtttcggcgtgttagcgccattcgtcgtgtcgatccacaaggtagtcggcttgcgcatcgacgtatccggagcagtggattggatgagcacgtcggccttgccgttcgccacgccagcggcggcggcagcagccgtattcgccttctgcgcggcattcgccgcatcggtggcggactgggccgcactgtcagcggtggctttcgcttgggtcgcgacactcgaagcattgactgctgtggacttggcggcattggcggactcattggccgtgttcgccagagtctgcgcattgccggccgtcttcttcgcgctttcggcggcggtctgcgcggcattggcggcatccttggcctgaccggcggtcgcggtcgcgctcttcgcggcggcagtagcagcattggcggtatcctgcgcggtcttggccgcaccattggccgtatcagccgtgccctgcgcgtttttcgctgcggcagccgcattctcggcagtcttcttcgcgtcggtggtcttcgccgcgttgtccgcgatatccgactttgcctgctcgatctgcttcgcgttgtcctccacgtcggcatagcccatgcggttccacttggagccgtcccacacgagcgtgtcgatcacgcgatcggccaatggcacgagcacgctaggcgaattattcggagtcccgagccagtacgtgtaaaagtccgcgagcagtgatgggctgttgttcttctccccctgccagcgcgtccaatacttctgcgtcttgagccacaggtcgccgacgatcagattgtccttcggcatgtcaggcccacggaaggtatggttcttcgagtgggcttcggcatacgcctgcgccgccgactccttcgccttcgatatctcgccgttcgccgtggtcaggtcgcttttggtctgcgcgatgtccttccgggcctgcgacagatcggccttggcctgcgtgagcgtctgattcgccgtgtcgagattcgacttgttggcttggatgtccttccgcgcctgatcgagcttggccgtattgtccttcaacgccgtcttgttgtcagccaaatcctgctggattcgtttgacctcttccggcgagaccgccgacgcgaccgtcaccgaggcgatggccgaccagccggaacggttgcccgcatgatccacggacctcagcgcataggagtgccgggaaccggcggccagaccggtcacaagataatcgcccggaccggactgggtggcgctgatgacggtcatgccgtccgcattgacgccctcgccgacctcgatatggtcgaagtccgattccatctgagcgccagtgcttgtcctgccatcccagtggacagtcaccacgccaagctcagacgcgaggacgggcttggatggtacggagcatggcgtcgtatccgactccacagttgccaccacgacggccgaccattcgccgagcttgtccgaatacgtcgggactgccctgacgcgcacctcgatttgcgtgccgcaatccaagccgccgaaaccgagctgagtcttatcggtggtgccggcggaatgccagggcgcgccgtccacgtgcttgcgccactcgacggcgtagctgccaatctcgatggccgtgtcattcgtggcctgcgtgaccgcgctccacatggccgtagccaatccgtgcgcgaaaccatccgaaccaatgtaggcgtcggtctgcacgatcaatccgagaggggccttcggcacgcgatggtcacggtcggacgaggtggtcgtgccgccctcactaccggccaacgcggcgccaccggtgatgcccttgatcttcttcgcctgtctgacggatgcatcgtatttgatgtcgttcaatgcgatgctggcggatagtccctcgccctgacgcatcgacaggtcgatttcctgcacgcgcaccttctcgccgtggctgacggtgggtgctgtaatccaatcgccagcgtgataatcgacgagcggcagactgtccacgtcggaaacgatgagatcgcgcgtgtactggccgcgtaccctagccgcatcatccaaagtgctctgcataaaggcctgagcggtgtccttgtcggacacgccgccctgcgagctgtaggattcccacttgccccaaggcgtcggcgcgctcggattgtccatgcggaaaagcaggttgttgtcgccctcgacgaggatcgtggacgcgaggtcgctgatgctttcctcatacggggcctcgccgatgtcacgggcaagctggagtatgacctgcttgcttagatcacggctcaatgcggtgctgtcggcgttccacagtttcaacatgcgcccggacgtgcgccagtcgcagccaccgccattgaccagcgagctgagaatggtctgcaggtcggtgcccaaggaatagtaaagcgtgtatttcctcgcccaagccacgccgcccgcgtccaccgccgtgtcgaagccgagcgtcagtccggtggccacgccgccacgctgacggttttcatcaagcagggttttgaggatcacacccggattagagctgtaaaaaggccttttgcccttgttgtcgccgtccgcgagcagatggctggaatcattgttctccgcctttgacagcagccagctgatcgactggccggaataggtgacggtctttgtacggtcgtccgtcttgccgctgcgcccagtgatgacatagcgggcgttatccgactcgcgatagccgtttccatccgacacctccacggccacctcgaggccatcggtaagctctcggtcgaacgcctgggcgtcgccggaaagcatcgagtactcgatcgaaatggcgccatcatcattgtgcagcatggacgcgttgaagctcaccggctccgccaatacgccgattcgctcgccgaaaggccggtatgccacgagtcgcgcatgaagggacttgctcattaatcactcccaggattgcaaaaaccggcatgtcaccttgtccgtgccgccggtctgtttgatggtgatgcgatagtcgccggaatcgatcgcgggccacacctgcaacggttcggtggtccagtcgacgccgccagtctcatccgtgccgcccgaccatgcgtcggcattggccgccgtccacgccttgcggttggccacatcgacgaagaggtaaggacgcgaggcgtcacgtttgccattccacaccagattcgtaccactcaccggatctgaaatggtcacaccagtggcggcaccgaagcgcaataccagcgtggtgatcggcgcgtccgacagccaaccgtccggcaggatgtcgaaaagcatggacggcgaagcattcggcaacccagtccagcgagtccaataccccttgccgctcggctttgaaaccccgcccggcagcagcctgccacccgacgcggccaacgtcacctcctgccactgcacgccacgccaaaacacatccggcaactggaatacggcggtcgctgccctgtggtcatcccacggaatctcgtcaccgtccggctgacaggacgtgcacaccgcgctagcggtcatgctccgcgtcaagccggagaacgtgtcacgctccacacgcgtcagcgacgaggccaagcgacacaagcggtagaagcggtgcatcagagtatccgcatcaggcccgtccgtgatgaatttgagcgtgatttccggcgcgtcgaaagccaccgggccagccggaagcatcacaccactcctgccattcacactgacggaattgatgcgcgggctgatgctcgtgaaatgggtggtgccgacgatcaaactcgaatgctcaccagtcagctgctgaccattgatgagataatccgcgagaatcattgcaccaccatttccgcttgtgtgtcaccattgcggcattgccgccgtctgcaatctttgctgcgtgctaatgctcgttggagcgatcgcggggtaattaaacgtctgcgtcacatacgtagcaccggcaccgccattgctgacattcgcccgaccagacttcgacgcatccacatcgaaaccgccattgatctgagcattcatgccattgaccgtgcgctgcacgtctttccagccagccttgaggctcttatcaaagccctgcatgatcgcttgaccagcaggcttcaacatgaccttgtcatagctgagcggacccttatgctggacaatccagtcaccgataccgctcacaaagctcttcacttttccgaaagccgccttcagaccatcaagcagaccattgatgatgctcgcgccagcgttccacagccacgtgccggcaccggcgaacacgcccatgatggcactgccgacgccgcccaaaaatccgagcacgccctgcacgacaccatgcacgatctgactgaaaccgttccacgcctgctgccaattgccgtgaatcaggccggtcaccagattgatgacaccctgaatgacattgacgatgccattgaccaccatcgcgatgccattgatgaccccctgaatgaatggcagcatcgcttggatggtcggcagcaatgtcgagttaatgaagccgacaatcgcggaaatgatggtggacaccaaaggcgcgagagcctgaatcaccggcatgagcgcctgaatcacagccatgacctcattgatcatggtaatgacgatcggctggatgccttggatggccggagtgatcgccgtgatcacggaggtcaccacggtcagaacgccctggatcaccggcaccaaaacgcccaccaaggtggagattatcggcgtcagcagcgggattatctgaccgatcacattcgtgatcaccggcatcacggctgccgtcaattggcccaaggccgtcatgagcgcctgaatcgacggctgcagcatctggaatgcctgctgcaggctggctaaaacgtttttcagcatctcgccgaattcgctgcgcaattgcgggctcgtggcgatcaatcctgccagagcgccaatcaccagcgtgataggaccgccaagaccggacagcacgccgccaaacttagacagcaggccgccaatcaccggcactccactcaagccgctcaaagcgccaccaagaccagccgcgccaagcaagccggtcactgcggcgatgggaccggacaacgagccaaggctattcgacaggccgctgaaatcaatcttgccgatcttgtcagcgaccacaccgaacaccttctccagcggcgggccgatcttctgcgccagctgagcaatcttgtcaaacagcgcggtgatgagtggttcgacggcctgcaccatcttgatgaccgcgccgccgacaccaccgaaagccgcgatgagatcattgccgacagaagtcttcaacccggcgatctcatgctgcagtatcgtcatcttgccctgcggggtctgcgccaaggccttgttgatgccgccgaagttggcttccagcacctgcgcggccatggctgccttctcggacgcactgccctcctggaggactttcttctgcgcgtcggtcatggtcacgccatacttcgacagtgccgtggcgttgccggtcatgaccttgccgagcaggtttgctatctgcacgccatcctgcgccgtggcgttgtatcccttgttgttggcgatcatgtcggccagtgccggcgtcaacgtcttgacctgatcggctgtcagcgcgaaggtgccgagctgcgcttgagcggccttgagagtgccggcggacacgacgccggtctgtccaagcgtcttgttcaacccgagcagtgacttctgctcttcgtccgcccaattgttgttcttggcgacctgctggaatttcgcggtcacctcttcggccttgagcgccgcatcgacggactggcgtccgaagttgacgaggtatgcggcagctgcggtggccgcgccggacacgacggtggccatgcccttcgctgcattgccgataccactcacggccttcgaagcgaaaccggaagccttgctcaaccccgaatgcaacgcgttaccggccttcgcggcagcattacgcgcaccctccggcaaagcattccaagcagccgaaaacttctccttgatgttggacgtgaccgcgccagccgtcgaactgatattccgcactgcggcattcacgcctggaatcttgccgacgatttgctgggcggttgaagcgaagccggaagccatacggtcgaaagcgttcttggacttgtccgactctgcggccaattgcgtttcgaggtccttgagacgtccttgtgcagccttgagattgtcggaagccgccttgagattgtcagccgccaccttctgccgaatctgcgcctgctcaagtttgatggccgcagcctgagcttgtgtgctgtccgctccatatttctgtgtggccgcgttcagcttctcctgcgcggcctgcacctgcactccggcagccttgaatttcagcagcgcgtcagtattcttctgcgacgcctgcgccacatccttcttaaaggactgcaaggcttgcgcgtcaagctccttcgcgccgcttttgaaaccatcaccgaaggcactgcccagcttcgacccttgcttgccagcgtcgaagcccttgccaaaggccgtcttcatgtcgccgacggctttgccggtttctttcgcaacgttctggcggaagcccttcatctgcgggaaaatgctcacatgcgcggaacccagctcgctaccgccagccatgacagcctcctctattcacttgtctttttgaatccgaagatgctgctcatcgactccaaagccgtccgacgctcctcatcggtcacttcgacgtgctttccaccagctctttcaggcgcgaggtcaccaagaatcgacgtgccaccagcctgaatcgcggtgatgatggccgtcgcatccatcggcagcaccatatgcacggcagacatgccgcaatacgtcgacggatcagccgaaaggctctcccacaaggcgatcgcgtccgcgaaacggagtctgccgcccaagtcggcctgcagactccatccacgcgccgcgaaatcagcccttattcgattgccgtcttcccctcggaggagctggcagaagccgacgattttcccaaatcagcgccctgcaccttggcaatgatttcgccataagcgttgaggatgttcatcggcaccatgaccggctccttcgccagctccttggcctcctcctcaccagcgaaagcagtcagcatgtccttcaacgtctggatctgctcaacatccgacttaatgtcggacagcttcacgaaatcatcaatcgacagcgccaagggcagcttgtaaatgtggccatgcggtgccaaaaaccatacggagccgtccttgatgagatgcttcacgtccatctgcgtggcgacagcctcaagcgccttgtcctcatcctctgcagtccatgcgtcgaagtcggcggcggagggcatcacattcttggtcatttcttccttctttcaaacgactgtaaaaattcctttactccactgaatgaagaggaagaatcccagcacatgcgaagaaaggaagaaagaaacacatgctaggaagaatcaatgtcagtcggcgaccggctgagactcggaatcatcagcctgatgatcgccggtatgaggaccgggtgaaacagtcggagtcacgaaggactccaaatacttgctggcgccggaatcacagacgggatcctggatccattcgatagtccaggcgtcgccggtgttcttgcctgcggtctcccccccaggctcattgccggtcagattcacgacacccagacggcggcggtgcgtgccgtttttgaaaacggtctccttgtagcagaaccacttgccgtcctgaatgatatcggtcacgtggtagacgccattggcgtccggcgtcccgatggtcatctggcgcgtgatgctgttatcctcggccacggtgaactgttcggtcagcgaagccttgccattaatgctgtagccgggctgatggaacttgatcgcatcatcggcagcacgattgtcctgcggtgcgccatcctcggtgataaggccgacgaaaccgcctttgctgaaaatagtgtccaagctggtcttcacgtcggccacggtcggcgcgatgagagcagcgttcagcgtcttagacgcgtcgtagggcgcaaaacggtaggcgcttgtaaccacgaccttcgcggcgctaaggtcattgccagctgaatcagcagccatatcttgtcctttcaaacaaaaaaagcgctgaaacacaacgtttcaacgccttgaaaattcagaaaaacttaaattattggaatgcaccaatagtggagaattcgagagtcagatagcatctggcgatattcgcgtcctcggccacgaaatacgggccattgcacccgtcctcttcgattgccgctatcggagaaccgtcaagctcgcagatggaggggtcggtgagcaaaccgtagattctggacgccaagtcacggcatggtttcggagcggcacgagccccgtagcgcacggtcacgccgacgctccggtcgaagagcacgcgattcgactgcgagccgccatcgtcacgcaccacgacgagcggccgtgagccgtcgtaatcgtccggctcgcgattcgaaacgatgatcgtcgggaaagacggcttaagcctggcacgtagaaaagagcagatccacaattcaatgtctggcggcaagaccatggtcatgttttgcctgccttcaacgccttgcggagattgcccgtcttcgactccacgagcagggtcttcttgtcggtgccgaccaccatgcatgtggttcgatgctcgtgcttgacctcctcgatctgcaagccatcacggtaatctccgctgtccaccggagcatgtgctttcgcatattcgagcgtcttctcggcggcacgacgtgtcatggccttgacgccagccgaatttaaaatctcgtcaaaatatctgtcgttgaatttgaccatcactcccaaaagccgtcaccccctgtattcggatagtggaatctcgatcgtcggctgccacgacgtgaaagcattcgcgtcacgactcggatagccgctgacctcccaacatcgcccgtcatccggcaacgcctgaatcctgtcacccggcatgatgtccaaggacgggtcaggagacgtgaggtaagccatgctcgtggtctgctcgcgcagaccgtcgggcgtgcgcgtgctgctggaactggcgagagcgccggtgaaatccaaagtctccggattagaccagtcctcgccggcctgctcgccggaatacgggtcatcgaccttcctcgcacgcagtcgccgccatttggtggcacccggcatgctgaaggacgagccacggccgagataatccaacgcggaagtcacggcttcaccccccacgacaagcggtaaggctgcaacgtgcgcttctcagaatcgaaaagcgccacgttaggcacgccaccatcggaacctgaccggtaggtaacgcttgagccattcgtggattgggaggataccgtgccgggcacctgcatcacacgagacgcgatgtccagcaggatcatctgcacttccggcacgtcctccaaatcccagccatcagtgatggtcgcttccacactccccggcagatcagggaaggtggcgccattgaccagcacaaggctcccagcctcgctgaaacgcgcatcctgcacgtgctccacgccatcaagcttcaggctcgaaagcgcggtcacatgcttggatggcaagagaagcgagtcaccgccatgaccatccaaacgaatcgtgcgggtgacggaaggcgcgacatgccagccgcaatgcttgcgaatcgcagcctgagcggccctcatcttgaaaccggcatcgacttggaaagagtcggcgcttggaatcagatcaccaatcacggcagtcatgccgcacccccaatcacttacttggctgccatcaggccagcggccaccagagaatcgataagcgcatcgaattcctgcttggtcggcgcggtagaagccgcctttggcacattcttcgccaccggaagagagacggcaccgccgatagtgaccggcttgcccttggcgtcaagcgccacaagctccgccacgtcctgcgtcttgtcgacgttcgcctctttcggagtggcgaagcgcacgtacttctgcgtcatgatcaggccgccttaccgagagtgaccttcacgaaggccttcggatacttgacctgcaggcccagacgctcggagacgcggcacttctgcttgaagtgcaggaaatcgtcagtgtcggagtcggtcatcttcacgaccagaccacccttgcgcagcaccttggcgcttttgaaggcaccgaccagcgcggtgccttcggtgatggcggcggtggccacggtcgggatgttccacagcttggccccatcggtcaggttgaggtagttgccgttcgcatccttggcgatggtcagcttccaaaagtcaagcggattcatcacgtaggcgtcggcttggaagttggtggtggtggtgatctgcagggcggccttggacaggcggtcggcgtcggacagttcatccttattcatcgtctgaatttcacggttgaacaggccggtcagattgttttcactgccattgccggacagcagctgcgtctcctcctgcagcttcaggtcatactgcgctgcgtcgttgatttcgccgatgacccaggacagatcatccatcatgtcctcgctgatgccgaagaagctggccaccttgccgatcttgtcctgcttccaagtcggatccttccaatggacctgcggggcggcgccggtctcctcgaccatcttggcgttgccttccagctcatcgaaaaccgggtactgcaggacggtgccggtgatagcgccggcagagaacaggtcggccacgaccagcggacgctgatacgggcgggcaggctcggtatcggtctgggtcagatacggcgtgtaaccggcagacggcgcaccctcgacattggtgtcggtgttcgccttgcactcgacctcgtaaccatgagcgatggcggacttcacgtcaaggcccgccgtctgcatggactggacgtaatattcgccgacgctcttggcatggatggcatcggagccaccgacatgccgcacaccagacttggcgttgagctggccgatctgcgtgagcagatcatcggcctgcttcataccgtccatctgacggtcgatgccctcgacctcagccagcgcatccttcacgaatgcgatggtgtcgccatccgccttgccagcggccagcagaccctgcttctcctcgagctgcttgacaagcgcggctcgcttttccttgagagatgccattacggtcactctcctttccgcccaacttgggcaatctttattgcgagttgcaacgcttccgcttcggaaaaaccgtccggctcctcggacttggccccttcaggctcctcgttcttggctgcaccggcatccgatgccttcgcatcgtcactctggtcattgtcattgttgttgtcggactgagtggtgttctcagccacgaaatccttgagtttcttcgcctgacctgtcaggtcatcggcgatctgcgagagaatgtctagattcttctgcgagagggggcgtccggtcttcaaccggctcagcgcgtccttcacgtcaacgatgccggtatcctgattcgcgccgatcggcacgaaggacgcctcatacaccttcaattcgcgcagttcgttcgctttggtgccgtcatcaagctcaacctcgccctcgtccaccacgtcgaacgcgaaggacagttgactcagacgcttttccttgatcaggtggtagacctgcgcggccttcggagagtccatgtcgaaatggcctttaatccaccagccgtgatcgtcctcgcccatcgaatcgacgccgccgatgttgtaatcggggtcatccatacgatgcccatacaacaccggcagcgtgttgccgctgtcctgccatgccttgatcgtcttgctgaacgcgccgttcgccaccacgtcaccgtagcagtcgggttcgcgggtgaaagtggaagggtaggcgatgaattcgccgtccttgagcgccgagtcctcgccgtcggccttgaatcggcaatcgaaatccttaaagtgcatcatgcacctccttgaaatgcgttcgcatgtcctccgtctcctgcaatgccctcacaccggcatcgaattgccccaaaccggccttgatggtcaggtcggcctgcagttcgttctgccatttgagccatttgatgtcatcgacgcccataccggcgccgaaacgtgatctgacgctcttctccaagcggtcgcgccaagcattgacgattgccgccgttttctcgccgtcgtccgattcaatggccgaaccgtcggctggacgcgacgggtcaccgccatcctgcgggcttgactggccgcccttggtgacattgagcggcacaaccagttcgtcaccgccatcgacgcgcggcagattctgactggcgcgcgcctcgttaggcgtaatccacggagctcccaccgaagtgctcatcacactggcctgctcctcgaaatcgccggaaagcttgctgcggatgtcgaattcgatgtaattcacgtccggcgcaccgaccttcggagcgaggaaagtgtttatcctgtcctcgatcatgcgcatggtcggaccaagcgtctcggaatacagcatcttgcggaattccttggtattcgagaaattcgcgttatcaaggatgccgaccatgaccggcgagacgtggtagacgcttgcgacggtggacagcgaaagcttcgtgacctcgctgaattcctcctcacgagcattgaagcccaaacgcttcaactccatgccatcctcaagcaatggcgtggcaccggcctgcgctcccctgtcggtgaattccttccacccgcgcatgaaacgctcacggtcggcgtcattccattccggcgcatccttcggacgcaccagcacgctgccgatacggccgccgcgcttccacacctgagtgcgatacgaccatgcctgaatctgctcgttgataatgtccttcaaggccctcacgggagtaacgccctgcgtcgggtcatcagggttccacccgtggaacacaagcatgtcatcggccggaacatcatagtatgacgtgcccaaatcaggataaacgcgataataggccggctggaacacactgccatcacgcttcgcctgcacccagcatggcggaatcggctgaatctgccagctaccgaacttgtcggcatcccgatcaggcgtctgcatgacaacccagtaagcgttatcgtaaagcgccaagtcagccacaagctgacgcatcaactcatagcccgtcatcgtgccgttcggctgcttcagcagatttatcagcacatcatcggtcacacgctgcctgtctgtgtcgctgacacgctcgaattccttcaaaccgacctgagcgacattccgcgccagaaaagtaatcacggtacgcaaatgcggctgcgtcttgaaaagctcggcctccgtctgaccctgaatcacggccatctggtcagacaaatcaaaggaaatgctgtagcgcggctggaaaacgttcctcaaggcgttccaaaggcccataagacacctccaatcgcttcaaaaaatcaaagaatcatcaatccatgtcccgaataggcggaagccttagccggttcggcatccacagcctgcatggtctccaacgcatacaatgcctgcgattcggcaaccaagccggaaatctgcaatgctgatttcgtcctgtcccacacctcgacctcgccgagccttcgggatacggccacactcacctgctgttcgatggcgggctgcggaaggtgccgcagcttgccctcacgtacacggtcgtggaaacggccgcagcacgcgcccaaccggaagccttcgatgagatgcaccgtccaacctttttcggtgagcgggtcgatgaagtccactgccggacagcccttgccctgcacggcgatctccgtgatatgcggccaacgctcctgcaaaaggtcgagataatgcggcacccacaacattccgtcacggcgagcgatcagctccacatgaggcaaaccgtccgcacgcattccggcagcggccacatacgtggtcttacggtcagccgacgtgtcaacggacagcaccacacgattctcattcggaatcgtggaacgcgagtcgatgccgctggcccacagtttcggactgatgaaaggaatgatgtccgccgtaacccactgacacaggacttccgtacggaacgcggcctcggtcatgccgtcaatatccgaacggacgctcatgacggtcatcggcccgtagccgagcgacggattcgcctgacggatagcgtcggcatcatccaccggacacttgtccggagcgctccattcgaaatagccgaacgatccgtcctgctcgccggacaggaacgcgtcggacggattgccaccgtcggcgctcaggcgcgtccactcgtcaacaagcttacggcccttgtccacctgcttgcgcaacgccacagaccgatagtcaccagcgttcgaaatgccccacaactggctcgaccaaaccgccttcgtggtctgactgacggcattccagccatcatccgtatgctgctcacgaagctcatcaaacaccacgcgcgcggcgctctttgctcgaatgttcttatcggcgcggacgatataccgggccttcgagcgggtgatgatcgcctcctcgccgttcgtgttgacgaatttctgcgtcatcgcggcgagatccggaatcaccagatccgcttcctcatcagtcgaaggctgaggattgcaccactccttgacctgattgtacgggcccttcgcattgtccaacgtctgcgcggcaccgaccacgaggaacttcaccggcggcaccctgtccggatgcttgttggagtccacgaacagccaccatgcggccaaaacgcccatcagcgtggtcttgccattctggcgggcaacaagcacgatgaccttgcggaaacgataactgccatcctccaacagttcgagcgcatgaacgagcagccactgctgccacgggtaaaggtggacatgcagcatgatctccgcgaacgcgatcaccgcgaaaccattgctcgtctcctttgttaacggccggagcggcggcgagaagatacgcggcaaggtcacgccatgcctcatatcgtcgatggcaccgaaaaccgtaagattctcagacgccatcgcaacctcctcagccgaaacgcttcataaactcgtccatctgcacgatcttcgaactggaagatgccgaagtattagacgtggcttgccgagcctcgccagccaaagcgttacgagaggaaggcgtggccccaagctgcgtgagcacattcatcaaatgcggcaccagatacagggccttcgtcacctccacgccggtaccatgcgccaccgcgtaatcgatctgcgcgcagatcatgcgaccggactgtacaagagccgtgtcagcatctccgatagactcccccagcccatcgatcgtcttctcatatgcctgcagcagaccattctcacgcttttccggagcatcaagcagacgcatacgctgctcgccgatggaaagacacttgtcaatcatcctcgcgtcgcccttaagagcacgcggatacgctgcgcgataaagattatccaaacggtcaagctccacctgccgctccgtatccacatccttacaacgctgattctccttcaaaacgcgacggatcgcgttctcagcagacttaacgtcgcgaaaccccagctcgtcacgaatctcggcaatgctcatggaagcggagaacagcttcagcgctttcctgtccttgtcagcaggcatcggacacctcactcagtggtaaaatcatgctccttgccgtcacagcgtggaatgatgccagtgtgctcctggaaacgtcggcagatgacatcgccatatcgagggtcaagctcgcagagcacggcgcgcatcttcaaatcatatgcggcaataagagtgcttcccgatcctccaaaaggatcgaaaacgatgccgccaggctggcatgagttgcttatcatcgcctcgataagaccaactggcttcatggtcggatgctccgcattgcgtgagggcttgtcaaactcaaacaccgtagcctgcttgttatcgccataccagtgggctccaccacggccaagccttccagcgccaccgggcgtgaaaccgtaaagaatcggctcatgcttccactggtagtcggaatggccaaggacgatggtgttctttacccagacaaggttctcgcggaacatgcagccggcggcctcgaacgcctcctggaagaacgtccttgccgtgtcggcgtgagccacatataccggagtgccaggcttggagcatcggactatctgaaggaatgcgtcagcgactacctcctggaaatccacgccggaatcattctgaatggtcagtttatccttcgtcttgccttcatacgagacgccatatggcggatcagtccagacgcaatccgcctgcccccccccaaacgctttgtccacgagagcgtcatcagtgcaggagccgacagcgagaccactgtcgcccagctcccaaatctgcccctccttggtgacc

SEQ ID NO: 3268 - DNA, 11308 bp, Unknown
  R53_2m  MAG No. k141_9780
ccaagtgcagatgtttgcgatggcgaacagcatgagcttttcagaaagcatgttcggcgcagtggccccgatcatagacgcaatctggccgacaaggccatacttgtcgccgtagatatatccccacatcagtgctgcgatgacgcctgggacggcataaggcaggaacagcaggattcgcggcactgcgatatggcggattctctgggaatccagaatgagcgccgccacaagggaaaggatcaaattgagaggaatctgaatcgccgcataaatcagcactcttctgaaaccgctccacagcgcttcatccttaaatgcagctatgaagttgtcgaagcctgcgaatgtggtgccgccaagaagggactgcttgaagaagctgagataaagcgcgtagaacatcgggatgatcatgccgaataggaagaccaccacgtatggaagacaatataacatgcctatgtactcgcgcttcggcttgcgcatcccggaagtatccggtttcgccgttgcatttgtcatagtttttctctttcttcttaacccgtctgaatgagcccgccaacaacatcgttgccattgccgtttcattcatcggtacgttcaatatacaaggttttacaaaaaagagcaaataaaacttcgttgcgcgtggcgaaattttctttatcttgttttttcgccttaaaagggctttattgcaacgatatgcacaaatcgtactcatcgaagaaacagcagttaatccatgtctacaacacccatttccgctatatagacagcaatacgccgataaaaaagctgttttagagtagcgaaaatttcgctactctatatataacgctttttttgcagcgtcgcatacgaaaagagaagagtcatggccacaatcaaaacaacaaacagaccgaaggtctccgacatcgcccaagcggcgggagtatcccccgctaccgtgtccaaggtcatcaacggccgtgatggagtctccgacgagacccgcgatagggtggaactgctcctcgaagaagccggattccgcaaaaaacttcccacaacaaaaaccatacggtcaatcgaactggtcgtcagcgaaatgaccaacaacggcaccgtggaaatggtcaaggagacagcttcatacgccagagattttggcctcggcatcaccgtaagctgcgccggaccggattccggagaatacgcaacaagaaacgaggccagcagctgcctccgtaacgccatcgaacgcaacccactaggcgtcatacttctcttatcgaatatctcatcggccgaggaatcgctgctgcagacgaggaacatcccatatgtaattgtcgatccggtcggccaggtctccgctgacgcattgggagtgggcattgataactggaccgggggaatgctcgccacgcaatatttcatatcattggggcatcgacgaatcgccgtcatcactggccctactaattcacagtcctcgcaggcgcgactgagcggatacatggcggcgctgcagaaaaacggcatcagcgcggatccacatctcatcaaggttggcgactacgtgtctgacaaggcatacaaggcggcatgcgatctcctggaaatgagggagcaggaccgaccgaccgccatcttcgcgttcaacgatctcggcgcgatcaacgtctatcgcgccgcccgacagcacggcatcagtctgcccgaacaattatcgatcatcggtttcgacgatgtctatcctgcggcaagcatgtgtccatccctgacgaccatcaggcagccattcgacctcatcgccagacaatgcatcaacctgattctcgaagcgcgggaaggaaaggtggaacagaattacttcatttttcccacgcagcttgtcgaacgcgaaagctgcgtatcgccagcacgtccgtaactcagcaacggaacacagaatcagcttccacgaagcacccatgcatatgcaatccgtctctggcacaagcatttacttctgtttaccagatgaaaatacaatatcgtgcgattacggggggcagccctagcctcagctggaggtcaggaaggtttcgttgcctcgggtgaagtcgaggacggcaccggcgagttggacctcgcctgccagttcggggtcggcggccagaagctgctcggcacgggtgcgggcgtcggcgatcatgtcggcgtccttgaccacgcgcaggagcttcaggctggacttgccgccggattgggcgtcgccgagcacatcgccggcaccgcggaattccaagtcggcttgggcgatttcggcaccgtcgagcgagtggtgaatcacttcgagccgttgctcggccggggagccgggttccgcacgggaaataaggaacgcccacgagttggtgccgccacgccccacgcggccgcgcagctgatgcaactgagagaggccgtatcggtcggcatcaaagatcacgatgcagctggcctgtttcacatccacaccgacttcgatcaccgtggtggacaccagaatcggagtctcgccgccggcaaaatcggccatgacctgggttttgacgtcatccttgtcgcggccggtcagagtcgcaaaccgaatgccttggaattgcgggagtttctgcaaccggtcggcgatttcggccaccgcatgcaatggcgggcgagccacggtttcgccgttttcgtcgaaggtttcgtaggggtcgtcgatgccgatggcgtcggccgccgcgcgcgttgcacggccgcccgcagctgtgcgggcactggaaccagatgctgcggcgcgtccgcgggcagaaccggctgctgccgaaacgccggaaccgccttcgttcccctcatcatccgcatcaatgcgcgggcacacgatataggcccgctcccccgcgtcgactcgcgcgcgaatgtgcgcgaacatacggcccatggtggcggcgtcggcctcattgaccaccacggtgcgaatcggtttgcggccgccaggcaattcggtgagccaggaaatatcgagatcgccaaaccaagtcatggcggcggtgcgcgggatgggcgtggcggtcatcaccagcagatgcggcgtggtgccgtcgtcggttttggagttgagactttcgcgctgctccacgccgaaccggtgctgctcgtcgattaccaccaaggccaagtgcggggcttggaaggtcttggaaaacgccgcgtgcgtggccacgataatgcccggctcgccactggcggccgcagcgagcgccttacgccgggcggtaagcttcataccaccggtcagcagggtgactggaatcgctggcttgagttgctccaccatccggccaatggtttcggcatgctgctcggccagcacctgagtcggggcaacaagcacggcctgatagccggcgtctacggcttggagcatagcagcgagcgccactacggttttgccggagcccacctcgccttgcagcagacgctgcattggccagtcatgagccaaatcggcggcaatatcatgaataacctgctgctgccctgcagtgagggagaacggcagggatgcgatgaactgatcgcgcagactgtcggttaccaacgggcaagagtgagccgcggatttatgggcgtgcgacctggctttaagcagcgaggtctgcgaaacgaaagcctcctcatagcgcagggtttcgatggcctccttgaaccgggtcgtggaggccggatcatgaatggccaggaacgcctcagcccgatgcatgaggttcttggccttgcgcaccgattcgggcagaacatctgggatggattgggagagcgcctcagcaccggattcggcggtcgtgccggaattctcttccccgttttggacggcgatggtgtcggtcgtgggagccacaatgccggctgacccagcgccagcgagttgcccgtcaggcgtggatgacgtgcgggcccccatcatccacagcaatcccagaatcgtctcatgaatatgttcggacgagatacgcgaactggcgtgatataccgggcggggccggcagacgcgggtaagcgcctcttgcacggtatcggcgtcgtatttcagcgcggccccggaagaggcagccgcggccggcggatacgcggactgcacactggcatacggatcggtacttcccgcaaacgcaccattgccggatgccgcaccccgagcgtaaccctcaagccccgctcctgctccggccgacccgggcgcgacagtgaggatttcggggtgcgtgaattgcagctgccccatgtattcgctgggcataccggagaccaccacagacgtgccggcgcgcagccgcatgctgacccaatccacatacgatttacgatacgaaaagaacgtaagccgggccgtgctgccgggtacgcgacgagaccgggcgaagtcggcgtcgtcaaccgtcgcctcgagtcggtagccgcggcgagcgttcatcggcaccacgcgcatgtctcgtatcacggcggcaaatgccatctgctggccgggtgcggcctcgcggatggcgcgaagcggcaccggttcggtgacgcggaagggatagtaggtcagggcgtcgccgacagtgacgattcccagcgatttgagcgcggacacgcgacgcttgttggtgaccagcgaagcgagagtggtgtccatagtgatgctcatattggcctattctattcgcacggcctctttaggccgcagaaacaacaaaacccgctgagccgaagctcaaacgggttttgctccacgttagtacgcgattcacgcggccacgcgctgaaccttgccggccttgaggcacttgacgcacacgcgcagacgagtgttctcgccatcaatcgtggtgcgtacagactgcaggttcgggcggaagctacgcttggtacgacggtgcgaatgggaaacggtgaaaccggtctgcggtcccttgccgcacactgcgcaacgagctgccatgatggactcccttaaccttgatgtgtcaagtctttcacgcattcgaccgccggtttcacccgacatgccgaacacacaacttcacaaatatatagcccaataccgacaaccgcaactcttgcgtgtatcatgggcgaacttcggcggttcacgcgcggttcgagcgtaacttgcgagtgggccatcagcggttcgcgagcggttcggcattggttcgccagcggtccgcaagtagttcgccagcagttcgccagtagttcgccagcggcgaattacgctgcaaatcgtagcgtttacccgataaaacacgccggactgcctattccgcatccaacaaactctcatataatctcggtataagagacggcaagggacgaaggggccctcgtgcaacttacgacgaaggaggctgtcatgttgaatctcaggcgaggtatcggcactcacgagcccagcgtgatttcactgggtcaagtctgggtggacattatgctcaatgtggacgaggtgccggcacagggcggattcgccgtggccgatcatccgaagccctccattggcggcagctatcgcgtgctgcaggcggccagccgcatgggcgtgccgaccgagcacgccggcattctgggcaacggcctgtgggcgcatttcatccgccagtcattccaggacaacggcattacgcatatcggccaggatcgtcttgatgaggattccggtttccgcgtggtgctgagctccggcgcgccgaagaagacgttcatcgcttcctatggcgccgaggctcatggcgacgcggacacgttcaacacgctggagccgcagcccaaagacgtggtgcacatcagcggcaacacactgatggaccacacggccaccggcgtggacggattcctactcaaggccggtaccgacccggctgcacgcgactacacgctggtgatcaatcccaccaatacgttgcgtctggtcaatgaccatatgcttgaggacctggtgctcgcacgcccggtctggtcctgcaaccgtcaggaggccatgacgctggccgagcgcctgggcgcgccgatcgacgacagcaaggtcaccatcggcggtggactcgacgacttcatgcaccagttgtgtgacggcttgggcactacactgcgcgcgccgctggtggtgcgtgtcggcgcccgcggcgcttggattcgtgagccaggtggcgagacgattcatatcgagggatacccgaccaaggccgtacacacccgttcggcgggcggttgccacaccggcgtgatgtgcgcgatgctggcaaagggccatagtctggccgaatcggtaaagatcgccaacgcggcggcatccatcgccatccagcgcagcctcaacggcgtgccgcaatgccccgattacgacgaggccatcgcgctgatcggcgaatagtttccggacgattgagtggatttcctcatctgggggaatccacgatcggctcccttcagtccgcttcgcggccagctcccctcagcgaggggagctatttttttgctctggctccccttagaaaggggcccggcattattcatccgccgttcaactttggcggttttctaccctagtccgcgcttctacgatagattgagttgaataccttcgaggagtgcatatgaccgatcccacgaatgtccacgaaccggtgccgcaaagcgccaaactgaccgcccgcgaaaagaagtggatcatctacgacgtcggcaactcggcattcgtgctgctgtccaccgccgtcatccccatttacgccaaatcgctgatgccggcggacggcaacatcgtgtccgcctggggctacgcgcaaaccattgcctccttggtcatcgcgctgctcatgccgctgctcggctccatcgccgacgtgcaaggcatgaaaatcaagttcttcctgggcttcttcggcaccggcgtggtcacctgctgcgcaatggccctgcccctgacctggctgccgttcctggtcgtctacattctggcgaccatcggcctcaacggctcgctgacgttctatgattcgatgctcatcgacaccacttcgaacgagcgcatggacaaggtctcctcgcacggctacggctggggctacatcggctccaccgtgccgttcatcttctgcatcgcgctgatcttcggcggcccgtcgctcttcgactggtccacggtggcttgcacgcgcgcctcgttcatcatcaccgccatctggtgggtggcgttcaccatcccgctgcttaccagctaccgccaggtgcactaccgtgccacccgcgaccagctgggctcggccgtgcgcggcacgttcagcgaactggcgggcacgttcggcaaaatcgtgaagaacaagccgttgtggatgttcatgatcgcgttcttcttctacatcgacgccgtgaacacggtgatttcgatgagtacctcctacggtgccgagcttggcatcgactccacccagctggtggtggcactgctcgtcacgcagttcgtggccttcccctgcgcgattctctacggccgtctggccggccggctcggctgcaaagtgatgatcactgcggcggtcgtggcatacatgtgcatcgtgctcttcgccgcgttcttcatgaaatcggccgtggagttctggattctggcgattctggtcggcatgttccaaggcggtatccaggcgctctcccgctcgtactacggcaagatcatccccaaggaccacgccaacgagtactacggcttctacgatatcttcggcaagaccgcctcgatcatcggcaccttcctggtggccaccaccacgtccctgaccggcaacgcctcgctcggcgtgctctccatcgccgtcctgctcgttgtggcgctcgtcttcctgctgctccagaaggacccgacgcgggagtgatttgccggccctcggcaactctgcgccgcgggcgacatctcgcaacccctgcaacgggccctaatagcaatggaccatcgccacttgatcacttacgctcgcgataatccttgatcagctgaatggcaacggccgcaacgccgcacagcacaccgccaatcggccacggcagccagaacatcgccccgtccgcggcgctcgacccgacggccgaccaatcgccgcgcaatgccgcagggttcaaaaacagcaggcacaagccagtcgccgtggctatcagcataatgatgccgcacaccgcgccggtcagtttggcgtagaaatcctgctcgcccgcatgctccttgcggtcgtcctcggccgctttgttgtatgcgttgatattgagcagactgtatctcatgccgcagtagacaaacccgaaaacaccgggcgcacagagcagcagaaaaattgcgttgggccagccatcggagacgccgagcatgtcatcggcatacaccgtcaccgcaatgccaatcagaatagccgagatgccaccgacgatgccgattaccagcagccgcaattctcggctgcggtcctccccggtgtagaaatcttctacgtatgggtgacgccgtttgaagtcaatacgcgacagacctcctggaatcagcatcgccagccccgcaatcacacccacacagacgcacagaaacgtcagaaaatcgttgagcggcgtcgctccgagaatggaattgctggaatcgaacaggttgccgatgccaaccccggcgacaatcgcagcaacaccgccggcaatcagcagcgcgaatcggcggcgatgttcatcgtagccagtgatatcctgcgcaagctccgcgataggagcgattatgcccgccgttttggaagaagcggctaaaggcgatgccgtctcagccgaggagtcaacattcgacgaaccggccgcagaagccgacgcggcaggccgactcacatcgccaagtaccagatcatcaagcgtgcagccgaacaggtcgcagatcataagcagcttgtccatctcgggataggccttttcggattcccatttcgaaatggcctgacgcgagacgccaagcaacatggccaatcgttcctgggtcaggttgcgttgcgcacgtaggtactgcaggttagcgcgaaaactcattggaatgtcccttcatacgtaatctttatcatgtcatgttcggccgatgggctcactatggcatgccgtccatgtcacccgccaccatctttgggttgcaatcgccggttattcgagcgcaaccacaagttgcatcggcggaattccgccattccgttgacctgagcagctttaacatcgcactccacgagaccgaagcttttccagccatgcgagggcagcttgtctcacctgccaccacgaatccgcttcgacccacgtacacatctgtgtacagcagcgctcgcaatcggttacctacgacccatatgatttgctgagcgaccgcaaaacacgcaatagccgagacaacaccgtcagcgttaaagcttaaggcgactacttgcccaatagtccggaaatctggctgatgatgtcagcgggcagtcctgcttgttcggcaatggatccgaggtccagattggcaccctgctcctgaattgcgccagcgacctgactgatctggtcggcggagatgttttcctccgccagcgcctgcagctcgtcaagtcggtcggcgttcaaatggtcgccaacgacctgttgatttcacccaactgatcggcattgaaatgctcaccgattaccgccggcaaatcaccaatcgagccgagattgaaatccccgccaagcacattgcctagattgtctgcggcaaaatttttcaggctatcgaacagtcccacatgtgccgctggtactgcttgttcagcaactgctgcagagcatcgcacagaccctgcatcaatcgccgctcttcggcagacaagtcccgcgtgaaaccaatctctgcctttgcgctcatcagctggggagctcacggtcacactcatgcgtcgcagaccacgagcctcacgcgcctcctcattccacatctgtgttaacaacatgtgttaatcgcatgcatcgccaccatgattccccaatgatttcaagggttccccggtctcactattgtttcttccctaaaacggcctcaatcatcggcaccttcctggtagccaccaccacgtccctgaccggcaacgcctcgctcggcgtgctgcccatcgccgtcctgctcgtcgcggcgctcgttttcctgctgctccagaaggatccgacgcgcgcaaacgtgctgagacatcgccggtgaaccaagttctgcctttttaccgacgccagctcgcataagcaggaatcaaacgtcggcgctgggacacagaacgggaatccgccgacgttcagagtatctgatgccggtgccgggccatgttttggacgccaccgacacaagtaccactcttggcgacggtggtggggcatccgctgtcccaccaccgtcgccaatcgttctcagcggcgttgacaatccattatctgtccctccaacgccgccaaacgtccacagcgtcggcgacggtccggattttgacgcaccaccaatgcaaaaccattgcaggctccgtacggaacatcagccgcgaccaccgaacgagcaccagatgcggcatcagccgcgacaccagccgcacttatcgacgcgcccttaccgcgtcatcacgtccatcaatacaatgactcatcggcatatccggctgcagcccaataatcgtcggccgatagcgagcgattgaaaccggtggcatgatcgcttccgaggtcgccctcgccaccgaaatcgacatcgaaatcagtaccagcatcggaagtaccgccggacataccggcaacggacctgacttcggttttcagcaggtatttctccgcgaaattcagcgtggtgcacaccatcgcaaacccctttccatgcgcgttgccctggcggaccaagacgtccttgtgtaagtaagtatggcggctccccttccacaccgccatatccactatggaagcgcgccgcggcacacgacacaagccccgggacatatgaagaagttatggccggttcaaagcacccgtattacagcccaaacggcaccgcgcgcagcgggattgcacgacggccggacgccactcataatcggaaaccgctcacagccaaatgccacccgaggccggacgccatataaggagccgtggcacggcagatatagaaaatgcccgccatcatagactgacgagcgtgatatcgggtgggcgatgtaggaatcgaacctacgaccccttcggtgtgaacgaagtgcgctagccg

SEQ ID NO: 3269 - DNA, 8842 bp, Unknown
  R53_2m  MAG No. k141_9885
acgaggttggacgggatggcgaagccgatgccgatcgagccggcggagtcggcggaagttgcggtagaggcaatcgaggagttgatgccgattacctggccggccgcgttgaaggtcgggccgccggagttgccggggttgatggccgcgtcgatctggacggcgttggtgacgatctcgttgttgttgtcgtcggtcacggtcaccgggcggttcagggcggagacgataccggtggtggcggtgtcgtcgtagccgagcgggttgccgatggccatcacgttctcgccgacggcgagcttgtcggaatcggcgaatttcacggccttgaggtcgctcggcgggttgtcgagcttgatgaccgcaagatcggtggtggtgtcggtgccgacgagcgtggcggaatacatgttgccgttggcaagcgtcacctgaatctgctgggcaccggagatcacgtggttgttggtgatgatgtggccttcggtgtcgatgatggcgccggagcccttggcggtgccgttgctcaacgcggtctggatggagaccacggagccggagacatcgctggcgacagtctgccagtcgggggcttcgccgctcttggcggtggcggacccggagccggacttattcgagctgacgttggacagcgaattgctggtcggcaaggtgatcaggccgctggtgagggcgccgtaaccgaggcccaggcagaggcccgcagccagaacggcggcgaccacggcgatgaggatgttgctcgccgtcttggacatgccctgcttggcggggccgggctgaccgggctgtcccggctgggccgggccttgaccgttcggcgtaccggtaccgggagtgccgaaaccgaacagaccgccctgctggggctgctggccattccggccattctgaccggactggctggcaaacgggttgccgttgttctgctgcggctgcgtgggcggattgaacggattgccgttgccctgcggctgcgggttattggtgtagtagggattgcggttgccctgctggccctgtggggtttgctgtgcaggctgaccgaacgggaattgctgcgtgggctgggcattgctgccggcctggccgccctgctggccctgtgcctgagtcggggtcggaccataagcgccatattccggggccggacgatacagcggagttgtggccgaggtctggcctgcggccggtgctgccggagaagccggcgaggaggagaccaccgtgctctcgcccttggcggaggcgtagtccgggatgggctcggtggcggcagtgtcggtagcggcttgcgtaggctgctgatcggcagcgagggcggccgaggaaaccggggcttgctgctcgctggaatcgctggcgttgccggcatcaaccgagtcgccacccacaaacgggttcttcggctcggcgttgccggtatcggcagtactattggggttttcgttattccgcggggtctggtcgacgccctgcgggttaaattcgtcagccattgctgctccttttcctaaattcctatcacgtctgttcggcggctattcgggcacttgcccattgccacttctcgtgtgctacctcagtagtaaaggcagtcaatctggaggttttctgaacgttgattgaaagtctatgcgtaatcatcgcagagtcttatgggcatctcggcttcgaggggctgatttcctgtttcgggaacatctacttgcacttcaaggggctgttcgcgcggtcaattccgagtatcaagggccctatttaacgccattccgccatttttgcagccggcctacttgaccgggagccccttgaagcggaagtagacgttcgggagcggcgaaatccgcccctcgaaaccgagttcttcacaatttccggcccttttctggcccttctgcctaaagtgaacatatgacgatcagccttcttgaacatccgttgggcgcacagcccggacagcccggcgaccgcagcgccttccatttcgaaacgatcacccgcctgccatccacggccagcgggcttgggcgagacggtgcccgatacggccgcaccggcatcattcacacgccccacggcgatattcgcacgcctgccttcgtgccggtgggcacgcaagccgcgatgaaggccgtgttgcccgagcagatgaaggatctaggcgcacagtgcctgctggccaacgccttccacctgttcgagcgcccgggcgaggacgtgctggacgcggccggcggcttggcgcgtttcatgaactgggatgggcccacgttcaccgattctggcggtttccaagtgatgtcgctgggcgtcggcttcaagaagacgctggcaatggacgtgaccggcatgaagtcggacgacatcatcgccaagggcaaggagcgcatggcctgggtggatgaggacggcgtgacgttcaagtcgcctttgaatggtgacgcacatcgtttctccgctgagatttcgatgggcatccagcacaaaatcggcgcagacatcatgttcgcgttcgacgaactcaccacgctgatgaacacccgctcctaccaggaggactcggtggagcgcaccttccgctgggcccgccgatgcgtggacgagcaccagcggctgacggctgagcggctgggcaagccctatcaggcgctgtatggcgtggtgcagggcgcgaattacgaggatctacgccggcgcgcggcctcgcagatcgcctcgctggacttcgacggcgtgggaatcggcggcgcaatcgagaagcgcatcattggagacacctgcgcgtggatctgcgacgcgatgccggagaaccgcccgcgccatgtgctgggcatcgcctccgtggacgatatcttcgcgtgcgtggagaacggcggcgacaccttcgactgcgtggcccccgcgcgctgcgcccgcaacggcgcgatctacacgcgcgccggccggtacaacatcaagcgcgcccagcataagttcgatttcgggccgctggaggagggatgcgactgctacacatgccagcattattcgcgcgcgtacgtcgaccacctgctgcgcgcccgcgagttcaacgggtttacgttggccacgatccataacgagcatttcttcgtgaagctgctagacgacatccgcgcctcgatcgacggcggatactttgatgagttccgcgacgacacgatggctcacttctacggcaacggcgagcgccggccagggttgtgagtttttctccttcgttgcggcttgtgccgaacttctctctgctcccctcgctgaggctgagacgttaagcaaacagcccagtgggctgtttgtagtcgaaggtgagacgatagtcgaaccagcaggttgcaggcaaggcccgtccttaattgcggacgagctgtcacgaagtgactgaggggagtgccgccaccctcaaagatcacggcgcccgcaggagacccacaagcgatatatccctgcctcccatgcgacacgccgaagattgcatgattacccagccgggtgtaagttagtcgattgtctgcgagtgtggcggaatggtagacgcgctgtcttcaggtggcagtgagtgtatgctcgtgggggttcaactccccccactcgcaccagcaactaaagggctggaatcggaaggttccagcccttttgctttgtccgggcaagcgccgtttttcaggggggctttaggacttgagacttatggcccaactttcgtggcggaaaatgtcccggtacctgcatcaatcgtttgacgttcaagccaggccagaatccgctgtcccggttcgcgatttcgggcgatctttgcaaaccgggacaatttttgttgccccggtataaatgtcaatcgatttatgcgaaaaccgggacaacgtgccaattccagaatcggccttattccgccgattccgtctgccagacgatatgagttgaggaaaccggagtgtcccggttcacgaaaacaagccgaaatcgccgaccgggacagcggattctgccccggtcgacaggtcaaacgattgacatatgaaccgggacaaatacagatcagagagaagcccatgaagcagatttaactttcctcaactttccatccgccataaactagcattacataacatcatgaaccgagacgaaaccaacaaagtatctggagtcaccgacgaccagctcggccgaacggccgagccgtacgaatccggcaactggcggggcggcgttgggagcatcattcgcagcaatccgaaatcaggaaccgacacaagtcggacccagcagacacgcataatacgagttcacagactcggcgatgtattccgcaaccgcaccaccgaataccgcaccacggaagaactgtaagcattacgaaatcaaccttgattattgcgcgggcctatactaggttacggtagcgtaggttagtggtcgggagagcgtcgccggccatagcgaggtgatcagtatgagcgtttccatcagcacgccatctggacgaaccatggcttccgccgcaacagttgcgccttccgcaaccgcgagtcaaaaatccagcgcaaacgccaaccccaccgcactggaccgtgcatcggcccgatacagggccgcgcaatcgcgctaccgccaagccaaggccgcactgaaggcgatcaagcgccagatcgtccccgtggatgcattcggcaatcgcaagccgcgactgcgcggatggcttcacctcgccaccctgccgctgtgcatcgcggcgtccatcgtactcatctgcatcgcgccggccggctcggtcaaagcggcctgcgcggtgtacggcgcctcggccatgctgctgttcggcaacagcgcgctgctgcacgtcgtgccatggcgcagcgcgaaggtgactcgcgtgctgtgcggcatcgattattcgaacatcttcctcatcatcgccggcaccaacacacccgtgctgttcgcgctcagcccggcgattcgccggccatatctcacggtaatctggacgaccgcggcgattggcacgatactgcatatcgtctggctgcggacgccgaactgggtgttcaccaccgtatacgtcgtgttgggactggccccggtaacgcttattccgcagctctggacggctcccgcagtaggcccggcgccgaccgtgctcatcgcgtgcggaggcgccgcgtacatcgccggcgctgtatgcttcgcgctgcgcaagccgaaccccgtccccggctggttcgagtttcacgaggtgtttcacttgggcacggtcatcgggtatgtctgccacgtcgtggcgatttatctgattgtctgtgcgctgtaggttcgctcgcccagcaccgaggcgggccttcatacgttacgagataggttcttgaccagccagccgtgacggccgccttcatagacttcatcggtgagtcgatagccgcactgctcatagaacttgtagtggtcgttttccgagtgcacggcggccatggctccgccggcttgcgcgatgcggcgttcggcgtcggccagcagccgcgagccgatgtgcctgccttgcgcctcgggcagcaccgccagtcgcgcgatgatgtatcgcccgggttggtcgggatggtcgggatccgcatagaaccggcaagtcgccacggggcgattctggtcgggctgaatgggctggctgcgtgaggccaattgcgcggacgagccggggcgattgggcgcatcattatccgaatcgaacaccagcagatgtacggacgcggcatcccattcatcgaattccggccgccagtcgcgttcgcggatgaacacctgctcgcggatggcgcgggccgcgtcgggcaactggtcgtatgcttcgattcgatggtcatgagcgccagtgtaatgcgtcacgataaccgacaaagcccggcgcgccgggcgggcccgggccccggctgcgctcgatgagctcaggccgtacgcgcgatctgcacggcggtgccggacgcggtgaccatcagcatgccgttgtcggcgccgagcacctcatagtcgatgtccacgccgaccacggcgtgcgcgcccatcgcctccgcacgctgctgcatctcggcgatggcctcgttgcgggcacgcatcagctcttcctcatagccctggctgcgaccgccgaacatgttacgcaggcccgcgccaagatccttgaacatgttcacaccggataccacttcgccgaagacgatgccttggtagttggtgatggtgtatccgtcgacggacggggtggtggtgacgagaatcatggcgaggctcctttggcttgtctgcgtggatgaatcactgccgagagtcggatcgctcccgaatctcacctcggaaacggatcgcttctcttggctaccacaatagtcgagagcgccttccccgacattttcaatccacgcgattgcgtaatcaaatgcgtattttgctgccacaaaaatgcagacaaaatcattaatatcatgggaggagtgcgccacagcgaatacgcatacgatttcatagcaagcagcacgtacactagtaccagtgaatgtcagaaatcggaaaggaacagggcatgactggtgcatccagcggggctacccgtatcggctcaaccgcaccacaagcgcttgagttctttgccggcatagggcttgcccgcctaggcctcgaagaggctggcttccacgtggcgtggtcgaacgatatagatcacgccaaatgccagatgtataggaaccagttcggcaacaatgagcaggaacataccctgatcgagggggatatgggtgagctacatggctctgacttgcctcacgatatctccattgcttggggctcctccccttgtaccgatatatctctggctggaacccgtacagggttgaacggcaaacagtccagcgcgttttggcagtatatccgtcttctggaagagatgggcaataataggccacctgtagccgtacttgagaatgtcacaggtcttgccacgtctcactcaggcgaggatatagcggcagcggtaagcgcattcaatcaactgggatattcagttgacgcactgtcgatcgatgctcggcgttttgttccccagtcccgccccagactgttcttggtcggcctaaccaatcctcctgagggctcgcaagccaattccccactacggccagattggttgcaacaggtgtttgccgatacctccctgcgtatgcacagggcagttctgccggaaccgccggaaccacttatggcgggctttggcatgtacgccgaagagatgtcagacgatgattcccgatggtggcctaagggcaagctaacggcatttcttgactcactgtccgctgtgcaatcagagagagtgacgaaactgaaggataatccgttcatctcttatcgaacggcatacaggcgcactcggaacgggaagcccacgtgggaagtccgagcggatgacatttcgggatgtctgcggacagctcgcgggggttcttcaaggcaagccgtggtgaggctcggtgaggggtcgacggcagtgcgttggatgactccgaaggaatacgctgcacttatgggtgcatcacattacaaccttgatgggctgcgcaccaaccaagctttgttcggctttggtgacgcagtggctgtgcctgtagtcgaatggctcggcgagcactacttcatgccagcacttcgcggtacattggacaagacgaagcagcaacatgagctacggtcagcctgatagtcatcgaaggagagcaggcatgggtatcgacgccatcgaagagtttcgaaagagccacggcattaacaccaaaggcaacctagccggcatactgcagctcaaccgcgccttctcgaaagatacattgccgatcaatcccgatgattatctcacgggtaaagaaggacaggtcaaaggactgagtggtgcgaactgccaaagcattttagaggagtagcacatcacgagggtacttgcgtccgaaggcggtcgaacaagccgtggtcttatgggcataatgaaggattatgcaacgctcattaatgaagagcggccgtccagcaaagatttcagcgagatagagcgtttttggattgatcgtatacgcaagttcttcaatagcaagccattcaggctagaggccgatgagtcactctcaatcaccgcagcagtaggcaatctgttagagcaggccaagaagcggcagaaagaaaaccccggcaccatgtatgagggtacggtgttgcagcagctcgtggcagcgaagctgtccattatcatgccggaagtggaaatcaatggagcttcagtagcagatgatcccacagggcgaggcggcgacttcaatatcggagataccgccatacactgcactaccgccccagccacgttgcttatggagaaatgccagcgcaacatcaagaatggttttcacccgatcattatcacggtaaaagatcgagtgaaaaccgcttgggatttggcagcggatatgggcttcgctgaacgattggaagtctgggatattcaatcgttcctgtcaaccaatgtccatgagcatggtcatttcagccaagatgcacgcaaagcaatgctcactgatttggtcaccgcttacaacaagattattgacacatacgagacagatcccagcttgcgtattgagtacagtaattaagaaagtgcttatactagccgccaatcttaattgattattcgaaaaccgttcttaacgtacattacactagagttttgcaagcaactttaggcacgtcgaggtatcaccatgagagaacg

SEQ ID NO: 3270 - DNA, 19236 bp, Unknown
  R53_2m  MAG No. k141_10044
ccggtgtgcggctacaactacggtgccggcctgttcgcgcgcgtcaaagaagggtactggttctgcgtgcggctcgccacctgcgtgctcgtggcgttggcggtgttgctgtggattttcgcgctgcaactggtcgagatcttccgctccgacccggccgtggtggcggtgggcgtggccgcgctgcacatccaatgctgcacggtgattctcaacggcttcaacatgatgggcaatatgatgacccagaccatgggccgcaccggcatcgcctcattcctggccctgtgccgacaaggtctgtttttggcaccgatcgtactgattctgccgatgatgttcggcgtgctcggcgtggaaatggcgcaatcggtgtccgacgtgctgacattcctagtcactatcccgttcatgcggcgaatcctgcacgaattgcggtagatgtcatcaagattttcgacttccagaccaggtggaccgagcatatctcgctgaatctctgtagtttttccttaccgttgcgttcattaggtcgattatgcgttcattaggtcggtgccctgcttagcatgagataatgagcattggaatgaagccattcttgaaggcagtgttcatcacaagtgacctaatgaacgcataatcgacctaataaatgaatggcggatggctaatacggagcctgaatgcagaatatgaaacgtatgaaagccaaccaggcacacaagtggcctgtgccggagcgcatcgaattgctgtaccgcaccatggctgacgcactcggcccgaccggatggtggccggcggagaccacgttcgagattatggtgggcgcggtgctgacgcagaatacggcgtggggcaatgtgaatcgttcgcttgcggcgttgaacgcggagggtgtgctcgaaccccataagctggcgattatggggccagcgcatctacaggaacttattcgcccgtccggcttttatgtcaacaaatccaagacggtacagtcactgagccgatggtatgtggagcgttgcggagcctcacctgagggagcggcagatattcccgacgccgaattgcggaccgagttgcttggattatttggtattggcggcgagacggccgacgatctgatgctgtacgtgttctcgcgccgcacattcgtggccgatacctacgcgcggcggctgttcgccttccttggattcgacgtgccggccggctatccggcattccacagggcctattcgcccgtggtgctggatacgaacctcagtgtcaaggatttgcaggaattccatgggctcattgacgagttcggcaaggcctaccgcgacgacgcggccaaaagcgagtcctttttgggtggatggagggcttgactgcacggcgaatcgttctcaataagaaaagtgtgaggcccgcacggtgccaatcgcacatctgaatccttgactggctgcgctcgatgctgggtgtcgaaaacgagtctgtgacagaatagttcgaccgacacaatcgccaaaacgccgaacaggagccaatgatgaccgaagacaagccgatcgccaagccgattatcgatgatgcgacgcgcgagaaaatggcgcttatgttctctggcgaggtctacctgccggatgatgtggacggcttttttgatctgcaggccgcccagcgtgatctccagctcgaactcaacgccacgccgctgaccaacccgaagcgccgtaccgaactcatgcaggcgttcttcggcgcggcgggggagggtctgtacctcgaatgcccggtgtatgcgaactggggctgcaatacttattggggcgagcgctgttacgccaacttcaacctgacgctggtggacgatggtgagatcttcatcggatcccacaccatgatcggccccaacgtcacgcttgtagccaccggccatcccgtgcgtccggacctgcgctatcagggtgcccagtattcgttgccagtccacatcggcgagaacgtctggatcggcgcgaatgtcaccgtgctgcccggggtcaccatcggggacaacgcggtcattggcgccaactcgctggtcaccaaggacatccccgccaacacggtcgcctatggcagcccgtgcaaggtaattcgcgaaatcaacgaacgcgacgacgtctactactggcgcgaccgccaattcagtgagcgttttaagctcaaagagcagtagcgcgaaagctcactcccacacgtcgagcttgcgatttttgtagaaatactcgcggtccttgtcgccgatttcacgcacgacctcgcagggcgcgccgtaggtgacggagttggcggggatggaatgtgtcacgaccggaccggcgccaatcacgcaattgtcgccgatggtcactcccggcagaatcgacacgttcgcgccgacccacacgttgcgcccgagggccaccggaatgcaatacacgtagcggtgctcgcgcagcaccggcaacacggggtggcaggcggctcattagcacggggaacggttgaacgagaagtggattggcatgtggtggtatcgaacatactgatgcgtgtgccgccgagcctgtccagatggctgcctatatgaaccagtgacaggaaatcgcgggagagcaaacgagaggagtgtgcatggggcagttcggtgtcatgattggccagttggtcggatttctgatcatgctgatggtcgggtatggatgtgtgaggcttcgattctacggtcagacggcgttggacggcatgtgctcgttgctgctcaacgtgctcatccccgtgcttgtgttttcgaacgccgtcgatggtgcggaccgcgcgcagcttgcctctaactggggcgtgatgctgctgaccgccgtgatgtacgcgctgctcatcctggtgttctggctggtcgccgaactgttgcggctcaaaggttcgcgtagccatgtatttcaggcgtcgcttattttcggcaacgccggattcatcggcattccgttgattatggcactttggccgcagaacggcgcgatttacgtggcgctgatgtcgatcatcgaccagacgctgctctggacgtacggcgtatggctgtgcgagccggtcgacgaagcgactgacggcaacgcgattggcgcgcgaggtgcggtcgtgaacggttcggtgaacggcgccggttcggtgggcaatgctggttcggcgagcaatgccgcaaacggtggttctccggccgtcgtccgcccctcgccaggcacccgcgtcctcggcctgcttaaacgattcgtcaatcccgccttcgtcggcgtgatgctcgccctgattctgattctgctcggcgtcaaggtgccggacatcatcctgaagccgctgcacaccatcggcaatatggccacgccgatgtcgctaatctacttgggcggcctgttcgcgctgaccaagtggtggggcgtcctcaaacgctacgaactctatgctggcctagtcgccaagatgatcgcattcccgctcgccttctacgcgctactgaccgcgctgaccggcgcattgccgcaactgccgatcacccatgacatggtgctgatgatcacggtcatcgccggactgccgaccatgaccaccattgccatgttcaccggtcgcaagaacaacatgcccgagtatgcggtcggcttcgtgctcgtaagcacgctgttctcgctggcctccctgacgattgtgtcggcagttgtgttctgaattgtccccttcgacgaaaagaatgccgggggcctccgacgcttggaatctcatcgacgccgccaacgactcggcatccgaggcggccgtgccgtatttcaaggagatattcgattacgcgcgcacgctcgatccgcaacatcgtccgctgacctacaccaatctgatgatggccgccgcaggcaaagacaagtgccatcaattcgcggatgtcatctgcctgaactggtattacggctggtatatgcaaggcgggtatcagctcatcggagccaagaaggccttcatcgacgagatgaaccaatggatgaacaccgaacccaacaagccattcctgttcaccgaatacggtgcggacaccgatgccggtgcgcacaagctgccaagcgtgcagtggagtgaggaataccagtgtgagtacctcaccatgcagcacgaagtgttcgacatgttcgaggcagtggtgggcgagcaggtatggaacctctgcgacttccaaaccggtgaaggtatcatgcgcgtcgacggcaacaagaagggcgtcttcactcgcgaccgtcagcccaaagccgccgcctatgtactcaaggagcgttgggagactaagtagcggcccgcccctggaatattccaggagcaacacacatcgcataacacacaacgcaacatacaaaaaagaacctcgtgaaacgaatttcacgaggttctttctagttacgctgaatgactcccattagactcccacaagagaagagcaatggcgaaatcccaacgttgctaagctctcaaactcagatgtggaagtagagctcgtactcgagcggggtcggggccaggcgagcctggtcgatctcgtcgcgcttgagaccaatccaggtctcaagcaggtcgtcggtgaacacgtcgccggcggtgaggaagtcgtggtcctcttccagggcgtccatagcctcggccagggagcttggcacctgcttgatgccagcgtgctcttccggcggcagctcgtagagatccttgtcgaccggctccggaggctcgatgtggttcaggatgccgtccaggccagccatcagctgagcggagaaggccaggaacgggttgcaggacggatccggagcgcggaactcgatgcgcttggcagccggggaggtgccggccagcggaatacggatggcggcagaacggttacgagcggagtacaccaggttgaccggagcctcgaagcccgggaccagacgatggtaggagttcagggacgggttggtgaaggccagcacggaggaggagtgcttgatcagaccgccgatgtaccagcgagccagatcggacagaccagcgtagcccttctcgtcgtagaacagcggcttgccgtccttccacagggactggtggcagtgcataccagtgccgttgtcgtcggcgatcggcttcggcatgaaggtcgcagccttgccggccagagcggcggtctcgtggacgacgtacttgtacttcatcaggtcatcgcctgcgtgctgcagggtgttgaagcggtagttgatctcctgctggccagcgccggcgacctcgtggtgggaacgctcgaggatcagaccgaccttctgcaggttggcgaccatatcgtcgcgcagatcctgggtgtggtcaatcggcggaaccgggaagtagcccttcttgacgcgattcttgaaaccgatgttcggggtgccgtcctcttcggagtcaacgccggagttccacggagcttcgatggagtcgacctcgtagaaggagcgctgcatggagttctcgaaacgcaccttgtcgaagatgaagaactcggcctcaggggcgaaggatgcggtgtcggcgatgccggtggacttcaggtaggcctcggccttgccggcgacctgacgcgggtcgcgggagtacggctcgtcggtcagcgggtcgacgatggagaaggccacgtcaagggtcttgtgcttgcggaacgggtcaacgaaagaggtctcaacgtccgggaccagcttcatgtcggactcgttgatggcctggaagccctgaacggaggaaccatcgaacggcatgccgtcggtgaaagcgtccttcaggaattcgctagccggcacggtgaagtgctgctgaacgccgataagatcggtgaaacggacggagacatactcgatgccttccttgttgataagggcctcgacgtcttccttggacttgagttcggtcacgggaccgctcctttcgtatgagatataacggtatatatcgtaaaatagcgcgtttcgccggctcgaaacttgggttacgagaatgtttcgtgactgtggccgacaatcgcgcaggcgcgttatttcaacgaaacatcattacagaatggaaacggagactatcgggggagtaggtagagatgtccgcaacgtggacagtgggtattgacaggtgacgtaggtggatgtaagtggacgtgattatgagacatatgacgaagccccggaaccgattgaacggattccggggcttctgtgcgatttggttgtgtgctgccgatcagcgaccgcgcatcgcgcggcgggagatcttctgcgggcggttcggatccatgcccttggggatggcatagcccttcttggcctgcagcgtgcgcagacgatcgttcagcgtttccatctcggccttggtcagcaggaagcgacggcgcggatgaatcttggcgatcagtgcgttcttgtggtccgtgggctcatagctcttggacttgatcaccgtgctacgcagcttggtcagcggcacctgcttggggccgtggcccacggcgatgcggtacaccggaatggaggagccggcggtgacgcccttgatatcgcgttcctgacgatccatcgccttcatgacgcgaccgtattcgccttcgccgatcaggtagatgccgttcatcgaagtgccgcgccagatggcatccttggtcttcgggtcgatccacaccggttcctgcgggaagtcaaagccggctttctgcatgttgctcagcacgccgatggcggcaccaggcttgccatcaatctgcttgtagccgactgcatccgcgcggcgggtgagcatcatggtggccagcagaatgccgagcatgatggcggtaatcatggtgaagatccaggtcagccaggtccacttgacaatcagaccgatgatgatcatcacgactacaggcagcaggaaagcaccggcctcaagccacggcagggccttgtcttccttagccgtgtacttgtagatctggatgatctgcttgattgtgctctgcttcttcggcttcgcgtccttttccgccatcacttcttcctttgttgggacgaaacacactgggcaatatcttatcaggtgcgctggtccgaacttgcttgtgctggttggtctcagcgtgtgtgcaacggtcgtccgtcggccttgagcagcgcctcgccgagcgtttcactgaatgtgggatgcgggtgaacgaggcgggctgcgtcggcgagcggcacatggttgccgaccagctgttcggcttcggcgatgatgtcggaggccatcggggagaccatgtgcacgccgagcacgcgcggggtgtccgggttggccgcgtcgcagccggagacgatggtcaatgagccggtcgtgccgctcatcagcatgcgcgcgttcgccagcatcggatagttggtctccttgatttcgacgaggtcctctctcgcctgcgcctgttcgacggtgagcccgaccgacgccgcttcggggaaggagaacacgatctgcggcacagcggcttcgtccaccggcttgggattgagtccggcgatggtctccgcgatgacgatgccttgctcaaaagcacgatgcgccagtgcgtgaccggccgtcacgtcgcccaccgcccatacgcccggtttgtcggtgcgaccgtacgcatccgtggcgacatgtccgtggtcatcaatcgtcacgccccatgctgggtcggtgatcgggtcacgcccgatggcgacaagggcgatttcgccccaaacgctctgttcgccgtcctggccttcgcgcgtgtagtgcacggtggcaccaaggttcgcgccggtgtccacatgggtgacgctggcgcgggtgatgatgttcacgccatgacgtttgagctcacgggtcagcgtggtgccggctctccggtcccaggctgagagcacgcggtccttgcgaatcagcagggtcaccttcgaaccggcggcgttccacatcgaggcgaattcaagggcgatggccccggcgccgataatcaccgccgaagagggaaattcgttgacttccagcgcctgtgtggagtcgatgagggcgccggcgaacgggttaccgggcaatgggtgtggcttggcaccggtggcgatgacgatgttcgtggccgtgaggtccatcgtggggccgctgggtacggggacatcggccttgtgataggtgaggatgtcgctttggtcgggggagggaacgaggtggacgatgtggttggaagttgctggagcgatctcatccgcatggaacgcggcattggctcggaacacggtgatgccgcgatgggccagcagtccggccagtcctcccaccatcgtcttgaccacgcgcaggcgatagtcgcgcagcgtgccgaagtcgatgccattcaccgaggcgttgacgccgagttcggccgcacggtgcacggtgtcgatggtgtgggtggcggtgatgagcgccttggaggggatgcagccacggttgagacaggtgccgcccacggtggcgtcacgctcgacgagtgccactttcatgccgagttcggcggcgcgcagggctgtggaatagccgccggggccggccccgatgatgaccagatcaaactgttcgctcatgattgcctccttggtgcatataagtatggctcccatgctagggagccatatgcggctatcgccgccacttcgcctaaaaacagtccactggactgttttctttacggctcagcccctcaacgaggggagccagagtatatatggacatcagtctgccggccagtgaccgcgcttcgggtaacgcggcttgggaagcctccaacgacgcatctgaatcgaacggctccaagcgtaggagaaggagcgggagcccttggacacggactgttcgccgtacttggcgatgagcttggccttgagcttgcgccacatcagccatacgtcgatgatcacggcaatcaggtaaccgtacataagcgccatcatgatgatggaagcccactggttctgcatcaaagaagtgacgaacatggagacgatcagaatcgcgaaggccactgggatgaaccattcgccaaggttgaaacgggcatccacataatcacggatgtagatacgccaaggcaggcgttccgacttgggcatgtggttgatgtcgcccttctgcatcgcctcgtactcggcgttctccctctcgcgcagacgggctttggcggccttggcgctggccttgcggtccaccggaaccagcggacggataccggcggcctgagcctgcttcatcttcggggtaggacggccttttttctcagaaggatcggcggccttcttcggggcctgctcaacgggaacttgggcctcttcttttttcctaaacggattccatgtcatgctttgaggttacggtgacgttcagacacttgtacactggcgcagtcattgcaatgacgccgctcacgcacatatatacgcacatatataaaggaggatcatcatggcaacgctcaccgctgacgagattcgttcgcgcgtcgaaaccgattggaaccgcatcgtcaaggtgctggccgaaaaggtcgcgctgcagtcgatctccgccaagggcatcaccgccgaacatatgaagcgctccgctgaattcgtggcagacgaactgcgcctcgtgggtgtggatgccaaggtggtccaggcttccaatgccgacggcactccgggcgcatgggaggtcatcggctcgcatatcgtttctccggacgcccccaccgtgctgctctacgcccatcacgatgtgcagcctgttccggacccggccgagtggaacaccgacccgttcgtggccaccgaaatcgacggccgtctttacggccgtggctccgccgatgacggcggcggcatcgccatccactccggtgcgctgaaggctttgggcgacgacctcaacgtcaatatcaaagtgttcatcgaaggcgaagaggagatgggctcgccaagcttcattcccttcatcgaggctcaccgcgacgaattcgccgccgacgtgattatcgtggccgattccggcaactggtcggcggacattccttctttgaccacctcgctgcgcggcaacacctgcgtggacgtgaccgtgcagggccttgagcacccggtgcactccggtcagtacggcggcccgattcttgactccaacacgttggccgccatgctcatcgcttccatgtacgacgagaacggcgatctggccgtgcccggcgtggccgcggaagagccaatcggcggtttgcaacgcgaccttgacgaaaccaccgtgcgcgaggattccggcgtggtggccggttacgagttcgccggcaccggttcgctggcctcacgcctgtggaccaagccgtccgtgaccgtgatcggcttcgacgcccacccggtcgagggatccttcaacgtgatcgccccggagacccgcttccgtctgtcgctgcgcaccgcgcccacccagcgccctgaagaagcgcaggaagcactggctgcattcctcgaatcccacgcgccgttcggtgccaaggtcactgtcgaacgcggcgaaaacggcatgggctgggccatggacccgaccgccgtggccaccaaagacgcgctggaagccatgaccgaggccttcggcgttgagcccatcaacaagggcgagggcggctccattccgttcatccccgaactgcagcgcattttccccaacgctcaggtgctggtcaccggccccgaagacccgaaggccaacgcccacagccccaatgagtccatctccctgcccggcctcaagaacaacgtgatcaccgaggctttgctgctggacaagctcggcaagtaaccgaaccgcatcggtaatggtggcgagccgccgtcaggtaggtcacggatgtggctattgcctttgacggcggcttgctttatagtcggggagttgacacgggagctgccgttaggcggctgagaggagattcatagtctcgaccgatggaacgtgaccggataatgccggcgcacggaaatgtcgctcttacccacccgtgcctgaaccaacccgcgcgtggccacgaacatgtgcatcatgtgcgtacatatatccatgtatgttcggcctgcgtacgagcagaagaaaggcacattcatgactgaagctgtggccaaagccaattacaagtggcgcgtcgtcgatatcgtcgtcgccgcaatcatcgccgtcgcatccggcgtcattttctggggctgggacattgtctgctccgccccgctggccctgttcgaaggcgtgacccccggtttcgagggtctgctcaacggattctggctgttcgccggcccgctcgccgcaatcatcgtgcgcaagcccggtgccgcactgtttgccgaaaccctcgccgccttcctcgagcttacgctgggcaaccagtggggcgtcggcggctcgctgatcgtcggcatcctccagggtctgggtgccgaaatcgccttcgccgtcttcgcctggaagaagtggaacatcggcaccaccatcctgtccggtgcgctcgccggcgtgggctgctgggcctactactgggccaccaacccgggctggaacggcctgcgcgtcacttggtatctggttggctccatcatctccggcgtcgtgatcgccggcgtggtggtctggtacttgtctcgtgcgctcgccgccaccggcgctctggaacgctttgaatccggccgcagcaaggcgcgcgtctgatgcaggttaatccggctgcggtagaggccagcggctggggatggcggcacgccacgcgtaaggacttcgcgttgcgtgccgtcgatttcaccatccggccaggtgaacgtgtgttgctgctcggtgcttcgggggcgggcaaaagcacgatgatggccggtctcgcaggcgtacttggcggcgatgaggaaggcgagcaggagggctcgctcaccatcgatggcgtcgatgcgcgcgaggcgcgaggccgcgtgggactggtgcttcaggacccggactcgcagatcattcttgaacgactgggcgatgacgcggccttcggctgcgaaaacctcaacgtgccgcgcgaggagattcggcagcgagtgcgcgaatcattggatatggtgggactcggcggactcgaactggatcggtccacccgccatctgtccggcggtcagcgccaacgtctcgcgttggccggcgtgctggctatgaagcccggtctgctgttgttggacgaaccgaccgccaacctcgaccccgaaggcgtggtcgaagtgcatgacgcggtcaaaaaggtcatcgaggccaccggacagaccatggttgtggtcgaacatcatatcgatgtatggctcgatctggtcgatcgcgtgatcgtgctcggccgacccgatgcaagttcgcccacgggtgcggtcatcgccgacggcaagccggacgaggtgttcgccgagatgggcgacgtattggccgccggtggcgcgtgggtgccgggccgtgcgattcccgattactcaccgaagcaggagcctgcgcacgatgcgccggtgctcagcactgagaacttaagctttggccgtgggaccgctcttggcgttggcatcaatctgaatttctatcccggcgaagtaacggctctgatgggtccgaacggcgcgggcaaatcgaccttggccctgaccttggccgggctgctcaagcctatcgccggcaaggtgctcatcgccgacaacctcaagcccgcgcatgccgggcgtgagccgattgactggaaaagcaaggaactgctgggccgtatcggcatggtgttccaggagcccgaacaccagttcgctgccaatttcgtgcgtgacgaagtcgccatcggccccaagtcgatggggcagagccaagacgaggcttatcggaccgccgaccgcatgcttgagcagatgaatctcacgcgcttcgccaaagccaacccgtataccttgtctggcggggagaagcggcgactgtccgtggcctccatgctggccgccgcacccaaagtgttggtgatggacgaaccgacattcggacaggatttcagtacgtggaatgaaatggtcaagctgatcgccgccatccgcgaccaaggctcgtgcgtggtcatggtgacgcacgatgaggcgctggtggatgcgctgggcgcacgacgcgtgatgttcgaggaggcgaggcatgagtgacgtggtaaccgtcagcccgcaggaaacgcgcgtggagccggtcaaagcctcatcgccctcatggttcatagcgcgcatcaacgcggtcagtcgcatcatcggtgcgctgttgctgtgcgttccgatgttcatcagtctggatgtggtatccgcatccacggcgctcggcatcgaattcgtgctgctgtggattggtggcgtggctccgtggaccgtatgccgtaagacctggccggtatggatcgccgccgccggcagttttatctccgtgtttctctacggccgtacctcgggcgagatcctgtggcagggtggctggattgtgatcagtgagggatccattaatctggccatcgccacggctatcagggtggcggccattgccgtacccggcgtgatcctggccctgggcctcgatcccactgatttggcggacggtttggttgagattctgcacttctcaccgcgattcgtatacggcgggttggctggattgcgcatgtttacgctgctgcaggaagattggcgcgcacttggcttgtcccaacgttcgcgcggccttggcgacggtaacgccatcgcccgtgccctctcccaagcgttcggactgctggtgctctccatccggcgcgccaccaaacttgccaccgccatggaagcgcgcggcttcggctccagcgccccacgctcccaagcccgtatctcgcgtctgaagcctatcgactggatcttctacgtcatctgtctggctgtcccgctggcctccataggcgtagccatcggcaccgggaattggcacttcgcctttcaaggtgtctgaaaggcgacagactggcacagtgcctttcaaggtgtctgaaaggcttacgatgcctccgccagcgggagcgagccacgactgacgtaatgacccggcagtagggtagtggctatgcccatcaacgcccagattcttgataatccgaaatccgaccgcgttcgccgcatcgccgatctgacccgcgccaaaggccgcgaacgttcgggccgttttcttatcgaaggcccgcaatccgtgcgcgaggccgtcacttggcggccggacgtggtgcaggacctctatgtggaggtttcgcaggcgttggaacatccgtgtatcatctcctccacgttggagaagatcgtcgaaacctcgcaggatgccacgatttatgtgcactactgcaccggcgacgtgatgcaccgcatcagtccggacgcccagggcatcgtggccgtcggcaatgccgagtccatgcacgccggtgccgatgacgtcgaacttggcaagaacggccggggcccgcagatcgccgccttctggcaggtgcgcgacccgggcaacgccggcaccgtgatccgtgcggccgatgcggccggctgcgacgccgtaatcttcgtggacgactgcgtggacgtgctgaaccccaaggtcatccgctccaccgcaggctccctgttccatctgccggtactcgccatgagcaccgacgaattcttcacctggacaggcgaccataatatgggcgtctgggccgccgacgtatacggcaccgaagaacgcaagccggaaagcctgcccgcagtactggcggacaaggcggcggtcgaggctccgaaagccgtgctgttcggcaatgaggcgcgtggcttggaaccggacatcctcacacgctgcggccgcatcgtctccatcccgctgtacggcaaggccgaatcgctgaacctcggcacctcggccgcggtgatgttgatgtcgctgtctatgtcgggtcatgttgaaagaatgtgaaaccggtaaaaacgctgtgaaacgctgagaaaacatcagacgaaagggttctcgtggcagaacaaatggtgttcgacgccgaccaggtgaccgctgaggttgccaagggcatcgagaaaatccagaacgcctccaacctggaggagctcaaggccatcaagacaacgtacgcaggtgccgattcggcgatgaccaaggccagcaaggccattggctccctgcccgtcgaccagaagaaggaagccggcaagctcatgggcaagctgcgcgccgacttcggccgtgcctatggccccaaggaggtcgagctcaaggaagccgccgagaaggccgcactcgccgctgaaaccgtggacatgacgctgccggtgaaccgcaagcctctgggcgcccgtcacccgctgcccaagctgatggaagacgtcgaggacttcttcatctccatgggctggcagatctcctccggtccggaaatcgaagccgaatggtacaacttcgactccctgaacttcggcccggaccatccggcccgccagatgcaggacaccttctacgtcaagggcaatcaagccaaggacgccgccggtttcgtcggctccaacatggtggtgcgtacgcagacctcctccgatcaggtccgtgccctcctgacccgtggcgtgccgctgtacatcgcgtcccccggccgtgtgttccgcaccgatgagctggacgccacccatactccggtcttccaccagtgcgaagccctcgccgtcgacaagcacctgaccatggccgacctgaagggcgtgctggacaagctcgccgtcgccatgttcggccctgaagccaagacgcgcctgcgcccgagctacttcccgttcaccgagccgagcgccgagctcgacctgtggttccccgacaagaagggcggccccggctggctcgagtggggcggctgcggcatggtgaacccgaacgtgctgaagtccgccggcatcgacccggacgtctacaccggtttcgccttcggcgtcggcatggagcgcacgctcctgctgcgcagcgacatcaacgacatgcacgacctggtcgaaggtgacgtgcgtttcgccgaacagtttgtgatgggggagtgattcagccatgcctatgatcgatatcgattggctcaaggaccatgtcgaggttcccgaaagcctgacctacgaacagctcgccaaggaccttgtcaaggtgggtcttgaggaagaggagatccactcctcccaggtgaccggcccgattgtggtcggctacgtggtcgacgccacccccgaaccgcagaagaacggcaagaccatcaactggtgccacgtggactgcggcgacgaatggaacgagaccgacgaagacggcaacaaggtgccgcgcggcatcatctgcggcgcgcccaacatgaaggccggcgaaaaggtcgtcgtcaccctgcccggtgccgtgctgcccggcgacttcaagatcgagccgcgcaagacctacggccacatctccaacggcatgtgtgcctccgaacgtgagctgggtctgggcgacaaccacaatggcatcattctgctgcgtcagtacggcttctccgaggctgaatatgaggctctgaagcctggtcaggacgccatgcacctgctgcacctcgaccagcctctgcttgagatcaacatcaccccggaccgtggctacacgctgtcctaccgtggcgtggcccgcgaataccaccactccaccggtgccgcctacaccgatccggccgtggcactgaacgagaaggccccggaacctgctgactaccagcccggcaccccggtggacatcgatgttgaaatcgacgataacaatccgattcacggcgtgcccggttgcgaccgctactacgcgcgtatcgtcaaggacttcaatcccaacgcccacacgcccaactggatgcgccgccgcctgattcgcgccggcatgcgctccatctccttggccgtggacgtgaccaactacgtgatgcttgacctcggccagccgatgcacgcctacgacctcgacaagctcgaaggcccgattgtcgtgcgccgcgccaacgagggtgagaaactcaccaccctggacggcaaggaacatgacctgagcgtcgaagatctgcttatcaccgattcgccgaacggcgaacgcggctcgcgcatcctcggccttgccggtgtgatgggcggcctgtatggcgaagtgaccgctgacaccaagaacattcttctggaggcagcgcacttcgatcaggtgaccatcgcccgttcggcccgtcgccacaagattccatccgaggcctcccgccgcttcgaacgtggcgtcgacaccgcgctgcagcccgccgccacccagatggccgccgagctcatggccaagtacggcaacggcgagcccagcgaacacccgaacgacgtgaacaacacgccgcgcgccaaggtcatccacttcaaggcctccgaagtggcccgcgtggccggcctcgacgtggacatcaaccgcatctccgacatcctgaccgacattggctgcacggtggccggcggcggcaacggcgagttcgccgtaaccgcgccgagctggcgtccggacttgaacgagccgtgcgacctggtcgaggaaatcgcccgactggtcggctacgaccagattccgatcaccgtgccgccggcaccggtcgagggtctggtgggcctgaccccggaccagcagcgtcgccgtcgcgtggcagacgagctcgccgagttcggcatggtcgaatcgctgagctacccgttcgtgggcgacgacgattacaaggccttcggcttcgacccggaagccaccaagaaggtcagcgtcgagatcgccaacccgctctacggcgaccgtccgtacctgcgtcgcgagattctgccgaccctggccaccaccgtgcagcgcaacatccgccgcggcatcgaaaacgtgtccctgtatgagctcggccacgtctacctgtgggatccgaacgcgcccgccatcccggcactgcccggcggcgtgcgccccaccgacgaacagctcgccgcgcttgacgccggtctgcccgaacagcccgaccatgtggccggcatcctgaccggtctggccgaggacgatggctggatgggcggcaagcgcccggtcgactggtccgacgccgtcgaggccgtgcgccgcatcgccggccgtatcggtgccgcaatcgaactcgaccagcccgccgccgacgatgtgcccgtccaatggcaccccggccgcgtcgcccgcgtcatggtgggcgacgtcttcaccggctgggttggtgaactgcacccgcgcgtcaacgaggcgctcggcttcccggcccattccgcggccttcgagctgaacctcaccgcgctgttcgccacgctgaccggcaagcccgtccaggccaagccgatctccacgttcccgccggtcaagcaggatttggccttcaccgtggacgagaccgtgaccgcaggccagcttgagaacgtgattcgcaaggccgccggcgcgaacctcgaatccatcgaactgttcgacgtgttcaccggcgaacaggtgggcgagggcaagaagtctctggcctatgcggtggtgttccgttcaccgagcaagacgctgtccgccgaagacagcgacgccatccgcaaggccatcgtggctgaggccgccgaaatcggcgcccagctgcgcgcctgacccaaccgatcatccgaatcgaggagcgtcatgagccaaccggagcaggacaagccgaaatacgggcagtaccagcagcctgaatatggtgctatgtctggccaatacggaccgaattacaacccgtatatttatggcgctcccgagccggataccaagaaggattccgccgcagccgctggcatcaacggtggcgcggcgcaatcccagcaggccggccagccgtacggtcagcagccggcgtggcccggcaatcagcaggcgggcggctggccgtatgctcaaggcggccaacagtccggtccgggcgcatatccgggcgggtacccgggcatgcaggggcagtcgtatggtcaacagccgaacggtcagcctcaccagccgcattattaccacggcatcgacctgaacgatccaaaccag

SEQ ID NO: 3271 - DNA, 6312 bp, Unknown
  R53_2m  MAG No. k141_10206
agctgactgtcaggccggccttctcctcgccttcagtgccaatataaatcggcagcacgcccatgtcctcgtcaggtacgttctgatccttgatctgcgagtaaccccacgtgccgttctgcaggaacacggcctcgccaagcgcgaattccgaattggcgtcatccatggtggcgctcgaaagctggctggccggcgtggtcgaatcagtgatatacaggtcgaagatcttcttgaaattcggaatgtatgtgtcggagattgtggccggaagttgcgtcacgccttgatcgcgatactcgtaatacaccggcacgtgggcgagctgatcgccgaaccgattgatcgaactcgtatcgaagcccgctgacgtaaacgcgcccttgataccgaggtcatctttatgcgcctgaatctcgtcagccacggtcctcagcgtatcgaagttgttgatcgtctcaacgtccttcacgcttgaccagttggcatcaaaatacttctgcagcaaggccttgttgtagatgatgccgtaccgctccatcacgtaaggcacagcgccaatttcatcgccattcttcatggcgtagtcctgcttggtgagatccttgtacatgttcgtatcggacatgtctgcgtagtaatcggtccaattgaggaagtcgttgttgtccacatcgaacacggttggcgctccggatttggcgagctcgctcttcagcgtctgttcgtatgtgccagacgatgctgtggcgacatctacttcgatgccggtctctgcggtgaaattatctgcaagctcacgaatctgatcagcctgctctcctttcatgctcaggaagtagacatgacccttatctgcattggagtcgccggaaccgcacccggcgatcaaccccagagacagacctgccgctgccattgcggccgttgctttgataatcttcttcatggtttccctcctatggaatgccataacttcgttgttgttgcaatacagggcgggggagcggacatcgtcattgcacaagtcgtgcccgctggccgcgcgtaggttggaggcccgccgccggttgcgcccggcggcgttcatatggtgtacggatgaatcacaggcgaacgtatcggttcgcaaacatacggtggtgactgtggctcacacctccttgagtccacgactgatggtcgcattcgtgacggtgagcgtgccgtcggtgacgaacatgcttaatgcgtcgcctgggtgctggtacatacgcgcgttgagtgcgacgccattgacgtacagagtggcgatggtgtcgtccacgatgagctgaatgtgatattcacgcccggcaaccagttcgattggccgctctagcccgatattcatacagttgaaccacgggaagttcgggctgccttcgaatacgtagcgatgctcaccaatcgggaagatgaactgatagccacgctcgcttgcctcatcgcggtagacgcggagaccgaaggatcgcgttccctcgctgaacatgacgtccgcttcaaacgaatacaggtctccgcagccctcggccagcacggcgttacggcgagcgtcagtaccgtcgattaccgcattcgtcacgatttgctcgcgttcgttgaacgcatcccagaccgtgtcgggaatgcgcacgccaagtgtgccgtcggtacgctggtagacctcgtgagggacgaaggtgccagcccattcgaagttctttacgtcatcgcagtcttccttggtggcaacccagccgaagaggattcgccgtccacctagttcgaaggtccgtccggcataataggcgctgccgtcaaacgcgtcatcatcgggtgcgatccacgggccttctagactcttggccatgcgatacaccatcttgtgccgatcgctgtattccgtaacgatgtgataccaccactcgcccatcttgaacagatcaggcatctcatgcatcgtgtataggttcggagcccagaagtcaccttcgaacgtccagttcttgaggtctttagacgtgaacttcaccgtgcggccggtctgctgcgttttcgggccgatcttacgggctccaaggattagcagatactggtcatgttcgtcgtcgcgaatgacccacgggtcgcgccaatcgtctggatcgtagccttcttgcggagtgaaggtgatggcgttctgggttttcgtccagtggtacaaatcatcgctgactgcgtgcatcagcacctgcgccggcttgtcccgctgggggtaatcgcggttgtacccggtgtagaagatatggtattgcccttccccttcaaacaccgatcccgcgaatatgaactgatcctgctcgtcgtccctgccgcgcggcacggctacaccgcaatccttgtaatgcacgaaatcagaggttgtggccagatcccagccgaacggttcgccgaatggttccggattgcgattgtctcgctggtgatacagaaagaactcgttgcccttgccgaacggcatgcaatcgccgaaccacgtgccagggaattggtagtacagctttggcatgattatcactcctatatggtcggttgacgaccgctcgccaattgctctgtggtcgggctaccggacttgtgtgcagtttcgcggcgaacggtatcctggctgtttctactgcgcagctccgcgcattagaaacatgctttattgtattgtcctgatttgatttaatcgcttaagtatttaagcgattaagcaatatgataaacattcaaactatacctgtcaagccatgacgcacacctctaggaatggcgcgtgtctcgcgctgccgactacccgcgataggcgcggatagaatcgcgcatcactgaaggacagcccaccagcaatggctcgaagcggtgcgttttgctatcttcgatgcgatcggtttcgctgctgtcgtagtcggcgtcgggcgtcttattcagcgtcagcaacgagcgtacgcctaatacaccaaggtcatattgcggcagtccgaccgtcgtgagtgcaggatgcaggtgtgcggaaatgacctcctggttatcgaatccgacaatcgacaaatcgtcgggcacacgcaagcctcgctcgcgaagcgcgtcgtacaaacccatggcagtgcggtcgttatgacagaacactgccgtggcgccggtcttcagcactgcgtcggccgctccgtaaccgccttcctggtcggctgttgcgtcaacgaccattgcggggtcgtatgccaatccgtgtgcggcaagtgcctgacgatacccttcgaggcggccgaccgacgcaggcgatgcggttggctcgttcacgaatgcaacatgacgatgccccgcctgcagcaacaactcggtagcggactgtccgccctgcacttcattggggaccacagcggggaatcgacccgattcgtcaaagcagttcaccaatacggacatagtgcgttccagctcgtcaggtggcgtaatggagcgatgcacccagcttgaatagatgattccctcaacctgatgctcaagcatgaacgaaaaggcctttcgctcaatggtcgcattgccgtcggtgtcgaccaccaacaggattttgccgttgcgccatgcttcgtcctgcgcgccttgaatgactcgtccggcgaatggagatgtggcgacaccgtcgctgatgaaaccgattagatcggatttgccgcgcgcaagacttcgggcaaacgcgttggaatggtatccgagacgttcggcgacgttgcggactttgcggcgcgtgttttcgggaatacgtacgttcttgttgtcgttgatcgcccatgatgcggtggcggtggagactccagccgccttggcgacgtcctgcagtgtgactttgcccatgtgctattgcctttgcggggacgtggtgtcggacgtgtcggacggggcggatgcgtcggacgtgccggacagggcgacgcatgcggcgaatacgcgctcgagaattggcacatgcagcatgagcaccgatccgtagcccaggactatcagcaggaacaggccctgcggcatgtagacccatgaggcgacgagcaggccgaggaagatagcgtcgatcgtgaccaataccaatgtggcaccaatgcgcgagacgccgaagatgaacgcgttcgccagtactccgccaaaggagttctcgaagcgcgcctgcaacgcccacacccattcgaatccgatgatccacaccaaggtcagaccgattttggggatgagcagcggcgtgatctgcaacaccacccatgaatacacgagaccagttcccgtggcgccgaaaataatccatagtcccgtagccttgaggaaattcgcgcggaatgccttgaaatagttcgcggtgacgtgaccttccgcgattgctacgcgccgcgcggcatcgtgtccagccgtgagcgccgcgccgatggtgatcagtggaatgctggtgatgatcatgagcaggttgatccagatggcatctacggtattgctcagtccgcgcatgaatgcggaatccggagacataaagcccatgattcatctccttgaggggcgggcggatggatacacgtcattgtaacgggcgtggcccacggggaatcgcctgtttgccgattcatgcacagtaccttggcaacgtattcaccagagctgcaatcagagggtgtgagaaaacacttgaaatatcaagtaatcccccgacaacacgccgattatgtacataatcgcatcgcgtgatgtcgttgtcatcaacgcttacggtaacgagtcgctgagcatagttcagcggccccctttgagaagaacagatcgccggacacagatgttcggtatatgcggaaggagcataacgccgatgagcaccatgaacatgaagagaatcctcgccgcgggcgttgcggccgtcaccatgttcagcctcgccgcctgcggaagcactgcggctgatccgaataagggtcatgtttatttcttgaacggcaagcctgaggtggtcgatcagctgcagcagcttgcgcaggactacaccaatcagaccggcgtgcaggtcgacatccagatcgcgtcctccggcagctatgagtccacgctgacctccgaactggccaagtccgaagctccgaccatgttcatcatcgctggctacgacgagttcgccaagtaccagaggtatctcgaaccgttgcaggacactgacgtgtacaagctgctcaacgacgaaggcaagaccaactcgcataaggtcggcgacgacgcctacaccatgccgtatgcggccgagtggtacggtatcatctacaacaagaagatcgtcaacgaatacgccaagaaggactacgcagtcatccagtccgacgccgacatcaaggactacgacaccttgaagaaggtcgtcgaggacatgaacaagcacaaggacgacctcggcatctaggctgcgatggcgacgccgggccagtcgtattcggcgcgcgccgtggccagcgcgctcttgtcggggacgaacctggcgaacagcctgcggctcctgcgctcgacctgcgtgtcgatgcaccgcctcgacggggaggcgccgacgaccgtgtcggactcataatggccgaactcgcggcgcgagtccacgcatttgggcctgtcggcgatcggcacgcgcatcgggatgcgcgaccccttcgacctcctgcccctggcgcgcgtgcgatgccgcttgccccgcggcaggtactgcctgaggtccaatgccctgcgcggcttggcgtagatccactggtagaggcattcgtagctgatcctcatatgcgggtcggacggccattcgaccttcagccgtccctcgatgagttcgggcgtccatcccttgcgcagcgcggtcatgacccattcgagcagcgggtcgtatgccatgcgcatgggcttgcgcagctggcgggcgcgccgctcggccttgcgctgcgcggtcatcgccgagtagaacggacgggacgtccacgcgcccgtcttcagctgtttcggccggtaggggcggtgggactcgttctcgtcggacgcgaaccacaggccgcgtctcagctcgcggctgacggtggacttgtcacggcccatcctcagggcgatctggcgcacgccgagcccctcgcggttgcgcaattcgtcgatccggatgcgttcctgtgccgacaagtgggaatacactttcctcatgggcgcaacaccttctccagttagaacctgaacacttccaaccatagagcgggtgttgcgcttctatctagaacccgggttcggcccggggca

SEQ ID NO: 3272 - DNA, 8977 bp, Unknown
  R53_2m  MAG No. k141_10229
gattaaaatcagattcccctcattgtcgcgcaagtggcataagtattttcgcaacggaatggctgaaccaggtttgaaaccattaccatttccgcttatctatgactcttcgcagagtgagcaaaagaagttctcgataagatggcgccattggttcaataagagggaatgcagaaagcagcttcattacctggagtcgctgagccgatgcatcttcatactcgaaccgtatcaggcgactcttgattatctactggcctattcgtccaagataatcgggaaggaaattcgtaaggataaaatcctgaagggatacattccagttaatgacgaagtctacgtttaccaaaaaaatgtagacaaataagcaataccggaatacggaaatactgaaatcagtaaataccaaaaaacaatataccgcaatcggatccacgtgaatccaggacgcttttttcaggaacgcggtcaagaacacggtacggcacctgacggtggtaggcgaccacctttttctttcccatccattccaaagtcggcatgacctgttctcctcgctacttcatggaattggtatactcagagtatatcggcctaatggctcatatgacgcgcgggcgaaagtattctgaccgacgcgcagtgggattcaatcgttagggatttcctacagcgaatggcatgaccgacgcggacgatgagagcgtgacctaggtggcgatccgttacagcctgtcccagaacggcaatggataacgcccgaattcttgcgcaaaagcggttcggcccgttgccgggaggacaacttcagtcggttgattgcatgatgccgtcgagccgggacatgtccaggtagcggcgtgcgctccattggttggcggtgacgtagcggatcctggcgcagacgagcatgagcgcgctcctgccgtccgggaagctgccgaccactctggtgcgccggcggatctcgcggttgagccgttcgatcatgttgttcgtgcggatccgccgccgatgctcgacgggatagtcgtcgagcaggtaggtcgtggtctcgctgatgccttccctgaggcaggaggcggcggccttcagccccttggactccatttcggtggcgacctgttcggccttctccaacgcggcctgccggctttccatggcgaacacggccttcagggcggacgcggcccatgccgcgtgcttgtggctgaccttggacaggacgttgcgcatgaagtggaccatgcaccgctggtagcgcgcgtccggcagcatcgagttcacggtggagacgagcccggcgcaccggtcgccgaccacgagccgcacgcccctgagaccgcgttcgatcatgctcctgacgaactgctcccagctggccttgtcctccttcatgccctccgcgacgccgacgacctcacggtggccggtgtcgtccacgccgatggcgaccagcacgctcacgttctcccgacccgccccacgtgcgcttgtgccacacgccgtccacgaacaggtacgggtacgaatgggccgccaggggacggttccgccattgatcgatgtcctcgtacacgcgcttgagcttgtcggagagcgtctgggagggcatccgctcgccccacagcaggcggctgatgtcgtcgacctgacgcgtgctgacgccggccaggtacatgtcgatcagcgcctcctcgacgctctgctcgcgacgccggtagcgttcgatgaccgccgactcgaagaccgcgcccttcagcttcggcaccctgagcgtcatcgtcccggccttcacggtcaggttccgctcgtagtggcccgcacggtaggccctccgaccggacgcacgctcgtatctcgcggccccggtgatctcgtcggcctccgcgtccagcatcgcgttcaacagctcctcgcccttccgggacacgagacggtccagcttcgtctcgagcatgttctcgtcgacctgtagaatctggttcgacatggttcgtcgcctctttccatagcggttttatgtttggcgactgaaatcgtaccccggcgacggatcatgtcccttcattcagacctcaaccaaagtgcgcaacaaaccgggcgttatcaaaagcagctggagtcgacaatcaccttcaatgtcaaaatgctattgacggcttatggttattcgcagtccagcttggccgaagcgatgggaattggccgttcggccatgtccctaaagatgtcggggaaaacaggctggtctgtatacgacctggttaatgcatcaagattcttgaaagtaagcacggaacaacttcttgatgattctctgatgaggagaatgggcgtttcggacgatgcggaggcggatatggaaaagtccgccgtttccggcggactttccgatgatggtacccccgtcggagcgcgcctccgcggaggcactcgaaaacatccacccgttcgccgacgacaacgggcgtaccggacgccagatcctcaacatgatgctcatgcaggcggggtacgagcccatcgccatcaggcatgatgccggcagcacctacgccggacggctcgagcagtggcaggcgtacggcgatccggttcccctggcgtgcatggtcgcggactgcgtggtccgggaacagtgccggatcgggaagatcgtgtccgatatccgccgcgggcatcccatcgccggacacgccagaggtatacgtgaatagtgtgtttacacactgttcgagaataataccctgacatgtcaactaacgcaacgtttactgggatgacggacaagaaggttggttcctatcagctcataatgacgttgccgactgcttgatggtggttgtggcgcttgtttgttcgattccgccggtgctgggtcgttttcgtctggctgaacggcggccaatctgggagttcgttctggtagacctcgtcgggccataatctcccagattctgcgggagtttacgctgacttcgggaattcgccgctgaactcccgtgccggacgcgggagtttacgagaatccggtactctcatgcataatctctcaacaaaaacgttggaattccgcgattctcaaaaatcgaccttgaagccgttcccgggagaacttcgccggattcatgtttcgcgctaaactcccgcgcgcatccggaagttttcatagaatcggtcgcgcaaacggacatccggatttctcaatttctcccgggatcagcctcttccaccgagttttccagaccacaatctgaaaactcgtgatttgagcctgctgaatcgagattttgagttcttcccaaactgactgccgcaaactgaccgcactcatcgtcctgtcagcgcagccggtttgcggaatggaagacgtgtgcggagagcagcgcgcagcggtgcatagtccccatggttggtggccgtccgcggctactccagcggtgtgcgatcccactggtcggcgcgtggaatggtgcgcaggctgcgcgaactgacgattagcagcatactgacgagcatcaccgcccagaacaccagcatagtcccgctgaatccgaaagcgggcaacagacttccggccgtcgctgagcagaacgcggacagtgcctgggccggtacggtaagcgtcacggtgatacgcccctgcatcgtgtcgggcgtcttaccgaaaatgaacccgagctgcaacgcgttgatgatcgggaacggcaggcacatcacggcgttggcgataagcagcacccagtagttgtcggtcagcagcatcggcagcgaagcgatgcagataaacacgaatccgcagcatgtcaccggcccgaccggtgcggtatcgctgatccgtccggcgatgaacgcacccgccagcatcgcgaggaatacgcccgtattcacgaatccgatgagcgtcgcgttcacgccggtgcgcatcagatgcagctgaatcgcatactggaagccattgaccccgaaattcgccagcgcggacgacaccatcgtcaacaccagcatcctgcggtgcagcgaccacgaccatccttcggcgaaatcacggaaaaatgacgcgccgcccgctttcccaccgtcatcgtcgctatcgccgttgccgctatcgctgccgttccgcggatttccgccgactcggatacgtgtcgcagccacgcctgccagcaggtacatgaccgcagccgacaggaacggcaaccacggggcgatgccgtacagcaggccgccgactgggctgccggccatgttgatggtcgcgtcacggccttcgttgagactgcgcgctttcggatatgagcgaatatcgacgatggatttgagcatcgcatccgaggcggggccgagaaacccgttgaccgcagactcgaacaccgcgatggcaagcagcacggggaagaccagcttgccggccatgagcagcgcagcgactgacccccaacagatgacgcccgctgtcgcgttcacgatgatcagtgtcttgcgatcgtgacggtcggcgaatgtcccgccgaacacggcggccgcctgctgtgcgatcgcggccagcgagcccaaccaacccgctgctgtggtcgatccggtgagcttgtatccgatcagagagaccgccagataccgcagggccacgccgatggccgtcgcgctgtccgccgtgaaccatggcacgtaacctgggatatcccacaacctgctttcgcgcacaggagcagaaacgagctttaacgaattactcatctaataattaatttctccataccctaccagtactggaatcctacagaagattaggcggcactggttctttacaaacttgctcagtatgccaagcataatcatatatatcgaagtaacccttttctccataatgagcaggacagcaatgacatcgataatcttcaacctgttccgctaccaacgatcccaatgttgaacataatcgatagctaagcttaccggactcatggtgcagcaatagcttgcctttgattgccaagtgtgaagaaatatagtcatatttattgttcggataatagaattcaggcaaacttaccgaattaccaaaatagcctggattaacaatgaacgctatatctttcttatcacatgagtagttaatcatccttgcgacttcggtggtgcttggaacgtctgccgcttgaattactaagttgattttctctcggtcaattaattcatcaagttcactatgacaagttatcattttatcaatgctatctatagaaagacatcttgacgccctggatttcagcacatcaacctttttcttcccaatgtctgttcgcacgtaatcctgacggtaaatgttgtctacagtgacaacatcatgatcgaccaaagtaatatgttccaaagcaagcattgaaatgtgccgataaatatgacttccaatagacccgcatccgagcagcaggcatctaatttgtcgcggctcagcgtgttcgacacgcaatacgtccaaactgacaagtttgtcaatagccgctcgaagagaagaacacgtaacagctgggaatctaatctcaatcgactgaatatctgctggagattccaagaactgtaacagatcaaacgtcatttgtcgatacggtaaacggcaaattgtcccccgctgcccgagcacaattaacagatagccttgaccattgtcatatattgacacagcatcagcgagtctatatcttatttcattagtcatttttactccgaaaaaaatcattcggggcgcagacaagtgttactcatccacgcccgaatgaagtcattcagctattgataccaatactgatatcagtgagaatcggcgctgaaatcaccgacacctcaccaagatcaaaatcatattgatttgatgtctgaatcattgttaccgccccctttcattacaactgaaaggtagcacttatcgagaagaatgacacatacaatatgccaacagagaacacgtatagaacaaaacacaattccccatcggaatcaagcaacacttggttattgcactgagccaagacaatttgctggacaggccagtcggatccggcatcctcgtgcgcgccgcccgcggcgcgcacgtgtaccggctgacccgtcatttctcggacacgaaaagccacgggacgcaacctcgtccttgtagactatggtctgttagagttgacgccgctcctgcgccagcggaccagtatcgcccctccgtcgtgcgttcgaatgccgcagccggcggggcaaggaaggaagaagccatgctgaacccgtctctcacccgacggatcaacgcgttgccggatacgctcagccggctcatgtccgaccccgcggtatcggaatccatggcccgtgcggacgagtcgaagcgcaggcttacccggctgctcccgcttgacggcgtggagcagtcggccatcgacgagtaccgcagggactggctggcgcgatacgtctataactcgaacgcgatcgagggatccacgctgtcgctgaaggataccgaactggtcatggaaggcgagttcgtccccacggacagccctgcgcggtatatcttcgcggcgcgtggtgtcgccgacggcatggcctatgtggaatggttcgtcgaccggaggcatccgctggatatcgacgtgatccgcaagctccacgagatcaccgctgtatttcgtcaagtcggtgtttcgtgttcgaggtggtgacgttttcttggactcgttgagtcaaggagagcgtcggcatgacgtatagcaggcagcagcgcgagcgggcggtggatttgtacatcaagtacgagcacagtgccgcggatgtgatccatgagctgggatatccaagcaggacgattctgtatgtgtggtaccgggatcggctggaggaggagcgtaccggcgttccctcggggcgcgggcaacggcatcggcgctatagcgacgagcagaaacaggccgcggtggaccactgcctcgagtacggcagacggcccggccgcaccatgcgcatgccgggctaccccaaaagcaaggagctgctcatggcgtggatcgacgaactcgcgcccggccaacgcaagctgcgtcacgggccggtgcccgaggaaccgaaaagggaggcggtggtggccgtcgcgtccggcaggatgaagtcacgagaggcggccgccgggctgggcgttcaggcggcggtcgtgagaaaccggaaacggcagatgcttgcgaagtccagggaggaaccggtgtccgagacagagagagggaaggccgtcgcgagagcggggaatccggccggcgcgcggcccgcggttccgaattcgtcggacgcggccggtccggcggacgcgttggcgtcgatgcagaggaaggcggcggagctccaggcccgtctggacgcgctggacgccgacgtcgaacggcagcggcgggagaagagggagctcgacgtcgagatcgcgattcgccgcgggactctggagccgttgggaaaagggccgggcgcagacccggaaaacctgaccagccgggagaaggccatcctcgtcaagcagaccagtgagaggctgggcgtgaccgccaaaagcctgttcgacgcggtcggcattccgcatagcagctaccattaccagcccgacgccatgaacgggcccaacagggacgcgtggctgccgcccttggtcgaggaggcgttcgggaacagcgagaagcgctacgggtacaagcgcgtccatctggaactgaatggcatgggggtaacggtgtcggccaaacgggtcatgaggctcatggccaagcatggcatggtgccgttgcacaagagcgcgaagcggtacggctcgtacaagggcgggctggccaaggcgccagccgacctcgtgaaccgcgatttccacgccgagaggccgaacatgccgtgggtcacggatttgacggagttctccatcccggcgggcaaggcgtacctgtctcccatcatcgactggtacgaccggcttccggtcgcctggacgatcggcacgagccccaacgccgcgctgaccaacggcatgctttcggacgcgtactccacgctcggcgaggacgagaaaccggtcatccacagtgatcgcggctgtcattataggtgggcggaatggatccgcatctgcgaggacaacaaattgacgcgttcgacgggcgcgaaaggctgttctccggacaacgcggccgcggaggggttcttcggccgtcccaggcaggagttcttccacaagagaagcttcgcgggtgtttcgatggacgggttcatcggcatgctgaacgactacatggtctggtaccgggacaagcggatcaagaccgagtacggcacgggcatcatggaccggcggcgcaagctcggcctcgtggcataatcagaaggcaggaacaaggaagtccaacaaaacggcaccacccccgttgaacacctttatttgatcacatacacgacatctcgcattccacgctgcaccgttgggtccagggcatccgcaacagcggctccacgaaagccgccgacaaccgcacccctgagcagaacgagccggtcgagctgcgcaagcgcaacagacagttggagatgaaggtggacgtttcagaacaagcggcaccggtattcgcacgaaagtagcagtgatacgggccaacgccgcccgctacccgatatcagcgcaatgcaggataccgggcgttccccgctccacctactactggatgaccgaacatcccgaagccgagccgttcccgcgccacgggcggcggcatggttcatggcgccgacggtgggtccgtccgcacgcggagcgcttccatgcctcgctgacggatgatggcgatcccccacggagaggagtattgtttcatttgtagataacattgttacacagtaggagagcattgatatgcaatctgaacgttcgttgattcccacccccatgccggtccggagacac

SEQ ID NO: 3273 - DNA, 10223 bp, Unknown
  R53_2m  MAG No. k141_10394
ccggtcagtgggtgtacgtcgatggcggctatgtccaccttgaccgtgcgctgagctgacaagcagccctttcccgaatattcgcgcggcaattccggagctttgatcattgctccatccgtacgccgtatccgcgtatgccgcccgtatcacccgcgccctgggtcatccgtttaccaacatggcccagggtggtccacttctcgctaggcaatatcggggaaactcgtatcactaaggagtcaatgatgacatccaaaaacacaaccggttccaaggcgaccatcgccattgtactggtgacctcactgttctttatctggggcctgaccatgaacctcgtgaacgcgttgaactcgccgttcgcaaactacatagaactcagcagcgccgaagcgtcattactgcaggtggcctattacggcgcatacttcgtcatggccattccagccggcttgatcgccaagcgtttcggttataagggcggcgtcatctccggtctgttcctgttcgctctgggcgcgttcatggtgatccctgccaccagcatggccagctacggcctgttcctgttcgccatgttcgttatcgcgctcggcgcggcatcgctggagaccaactgcaatccgtatatcaccaagctgggtgatgaaaagggcgaatcgttccgtatcaacatggcgcagagtttcaacggcgtcggcaacatcgttggcccgctgattcttggccagattctcggcaccaccgtcgcatcaggcgagtccggcttcgacgccgctaagacgcagttcctgaatgatacccgcacgatatacattgtgatcggcattgtgctggtcgtggtgctcgccgtgttcgcgctgttcaagctgcccacgcctccgggagacgaagaggaggccgcgggcggcacctcctccgagaacagctccttcttcgggctgctcaagcgtccgtacttcgcattgggcgtgcttgccgagttcattttcatcggcctgcaagtggccggcatggcggtcttctccgcttacgcgctcaagcactggggcgcgggcatcacagccggcaccgcggcgatgatgctttccgtgctttccctgctgttcaccatcggacgcttcgccaccaccccattgatggccaaattcgatcccgcgaagattcttggcgtgtacatgaccatttcagccgtgctgatgttcgtggtattccttggcctgggcaaggtctccgtcatcgcgttcatggtggcgtatctgttcatttccatcggatacccgaccatattctccctgacgctgaaaggtatcaagggttccgcggcgaagaccggttcctcggctttggtgatgagcattgtgggcgccgcgttgattccgctgctgctcggtgtgattcaggatgcggcaggcatcgagatcgccatcctggtgatggtcccgggcttcctgttcgtggcatggtacgcattctggggttccaagatcggtctgaaggaggcctgatatgacactcaacgtaatcgattcccacttccatatctgggatccggatgcgcaggatctgccatggctggcaggattgccctcgctgcaacacaagtacacgattgaagacctagccgcacagtacgccaagtttggcgtgaacttcctcggcggcgtatatgtggaggtcgacgcggccgatcacgagctcgaggaccggttgttgtacgagaatgccagccctctgatcctgaagcgcatgttgcaaggacgggtaagcccttggatgcgtgtcccgatcaacgccgatggcatcagggaaccgctgcatgtggattccgagccgcggggccgtgcgctcgaacccgaattcatcgccggtctacgcgcgatggccgccaagggattgccattcgagctgtgcaaccgtggcccggaactgggcgacatggccaaggcgttctcgcaggttcctgaagtgacggtcatcatcgatcatctcggcaacgtgcccgggcttgatgaggaatcgtgcgccgcactcgcagcgttggccgaactgccgaattcgtatatcaaggtttccggcgacaacccggtggacccggacatcgtgaaatacgtgcgggacacattcggcccgaagaaggtgctgtacagctccaactggccggtcgtggaactcaactcgacctttgccacgcacttccaactcatgctggacacgttcggcgaggacgaggacttcttcgaaaacaacgcccgccgcgcttacaacatcgactaaacccaagccccctctgatgagggggctatcgtccgcaggacgactgggggagaggccgcaaacccggtgccgcttgtgcggcacccctattccgtaacgaaaggaacaatcatgacgagcagcgccgaattctcaggcatcatctgcccatccatcaccatcaccaaggacgacggtgacatcgactatgaacgttgggggcagcatctcgatcatctgatcgaggccggtatcaacggcgtgctggtgtttggcagcatcggcgagttctatgccttccctctggacgtcaagaagcaggcggtcgacttcgtggccaagcatgtcgccgggcgcatcaaggtgttcgcgggcgtgggcgataccaacttgaacaatgtgatcgacttcgcgcgggcagtcgaagcaagtggagtggatgcgctcgtggtcgtttcgccgtattacttcggccctactgcgggaggcgcgaaggcgtacttcggcgcggtcgctgaagcgacgaatcttccggtgatcctctataatttcccaccgcgcaccggcagcgacttgaccccggagctcgtggccgagcttgccgccgcgcacccgaacatcgtcggcatcaaggacacggtcgacacaatcagccacacccgtaaggtgattcgcgcggtcaaggccgtgaatccacggtttgcggtgttctccggtttcgacgagtactatctcgtcaaccgcgtctccggcggtgatggcgtgatctgcggcatgaccaatgtggagccggagaccttcgttacgctgcaccgtgcatatgaggccggcgactatggcaccgcaattgaggccgccgaacgcatcagccacctgatggcgctgtacgatcagaccgacctgttcatctccgccatcaagggtgcggtcaaggccaagggactgaacatttccaccctgatccgtgagccagcggtgcaactcactgctcagcagtatgaggcgattaaggcgattctcaagtagtgtatatctcaggcttccgcggaatcctacggtggatttcgcggaagtttttttacggtgattacagttgccggctcagctcagcagcgccgcgatgatcgcgataaacaccgggctggtcatggtgctcatcagaatgccgtcgcgcgcgaaggtgaggcccacgttgtagcgggccgcgtagttgtacacgttctggccggtgggcagagcggcgagtaccacgcaggcgtacagctcggagccgcggaagcccatcacgaaataggcgagcaggaacgcgatgattggcatgatgatgttcttgagggccgcgaccgtgaagatggccgggcgatcgcccttctgctgcagcggcttggtgccgtgtagggacatgccgaacgccatcaggatcattggcaccgctgaatcgccgatcatgtcgatcgggtcgaaaatgaatttcggcactgggaaccagccgcttttagcggaaatcgcagagaccacaatgcccagcagcgaaccgataagcagcggttgatgcagtggctgcttggcgatttccttgatggagaccttgcccttggtggtcacgtccagcactgtcaggcccaccggtgtgaagatggcctgctgcatgaccagaatcggtgccaccagagccggattgcccagaatgtaggtggcgattggcaggccgatgttattggaattgaggtacagcgaattcagggcgccgatggtggcgtccggggcgttcaggtggaagaacatgcggttgagcaccaggaacaccacgcctaccagcacggcggagaagaacgccacgataatcgagggatggaagatgtcgaagatcggttccttggagaggatggcgaacatcaggcacgggctcgatacgaagaaggagaaacggttgagcaccatctgagcggacggcccgccgattcgcattcgtgcggcgacatatcccaccgcaatcacgatgccgataacgcagaagccttgcatggcgctgattagacctgacataatcctccctttcgccaccccagtgtggcacataaaaatgtattcggccgcaaaatctcatgtagtgggtgtgctgggcccgccgcccacgcggtacgctgttcacatgacgcttgaattgaaccgcaccgcatccactgccgagcagctgaacagcctgctcacccagatcatggagaacttctccgtgtccgaccacgagggccccctcaccgacgaggtcgaggccttccttaacgagcaagagcacctgaccgtccgccgtcacggcgacacagtggtggccagcaccgacttcggcgagccgaaccgtgtgatcttggccgggcacctcgatactgtgccggtcatcgacaatttcccaccgaagtggctggagcccggcgattcgctgattcgcgaagaaatcgcccacgctcatcccgaagaccgcgtgctgtggggccgcggtgccaccgatatgaaggcctccgacgcggtgatgctctacctcgccgccacgctcgacggccgcacgccggaaaccaccccgaaagtcgacctcacctacgtcttctacgaccatgaggaagtcgtcgccgaaaagaacggccttcgcaaagtcgtcgaggcccatcccgattggatcaccggcgatttcgccatcatcggcgagcccaccaacagcggcatcgagggcggctgcaacggtacgattcgcttcgacgtcgtgacccacggcgtggcagcgcactccgcccgcgcgtggatgggagagaacgccatccacaaggcggccgacatcctgagccgactcaacgcttacgagccggccaccgtgaacgtggacgggctcgactatcgcgagggcctcaacgccacgctgatttccggcggcaaaggcacgaacgtcattccggatgaatgccgcgtacacgtcaactaccgcttcgccccggacaagtcgctggccgaggccaaggctctgatgatgggcgcggatgccggtgccgaactcggcaatggcgagcatgtggccactggcggcgtgttcgagggctacggcatcgaaatgaaggacgaaagcccctccgcgcgcccgggcctgaacgccccgctcgcccaagatctggtccgactggtcaaggagcgcaccggccgcgacccgttggccaagctcggctggaccgacgtggcacgcttctcccagctcggcatcccggccgtcaacctcggtgccggcgacccgctgctggcgcacaagcacgacgagcaggtgcccgaatccgacctggccgccatgaccgcaattcttaccgactggctggtctgacacctctcgagctcccctctctgaggggagctgtcaccgcagggaggggagccgagagaacgtcagcctcgccgggccacgcccgcacaaaatatgtggcatactaaaggatggtggttctgcataaccatcagcgtgcgagatggcgtcgatccccttgcggctctcgagaatgagacaacgcaagcgccggtgtccgccacccgcaggacagacttgagacgaagttgcctttacgcggcgcgttttcgcgcggccacggtgagagcgtggtgtgagtcaagcgtataggcctggaaataggcgtcgtgatgcagcgcgccgcgaggagcattgtgcccactgacaaccgtgaaggtttcgtcaacgacggaaccgataattcaaccgtatccaatgccgattcggctgcagccgtgaacgctgcgcctgccgccgcctcccagcccgtcgaacctgttcgccgtcgtcgtggcggccgccgcgtggtccgcggcaccggtgctgccggcgcctccctggaactgcaagtgcaggaacgcaccccgctgttcgaagcccccgcgcttcccaatgccagcaccgcggccgattccaagtcatccgattccggcgattccgatgaatccagcgattccaaggattccgccgaacgtccaacccgccgccgtacgcgccgcgtttccacggccgacgatgccgccgaaacgccgcgtcgcacccgtcgtacgtccgccgcatcttccagcgataccgatgatgacgacgagactccgcgccgtccgcgccgcgccgcttccgcagtggccgacttggatagcgaggatgatcgtccgcgccgttcgcgccgcacggtcagtgccgatgatttcgatgacgatgacgccccgcgttcccgccgccgttcagtcgtggacgatgacgattacgacgaggaccgttcggttcgccgccgctctcgctcccgccagtccgacgatgatgactacgaggatcgcccggttcgctcccgcctccgccgtgcgcctatggatatggatgatgatgacgaagaccgtacggttcgccgtcgttctcgccgtgcagttgcggatacgcacgaggataccccggatgagcgcctgttcgacgcggtcgaatccctgccctctggccacgagaccgtgcgccgtggcaaaccgatgacgtccctgctgttccaggaaccggtgctgcccgccgccgtggatgcgcacgataccgctgacactcgtgatgacgatgttgacgccgacgaacgcccgtctcgtcgctcccgccgctcgcgcagccacgacgatgacgatgcccagccgcgcagccgtcgccgcgacgatcgcgacgaccgcggccgcgcctccgccgaccgtgacgcttcccgtgacgccgcgtccggcgataccaacgccgatcacgacgatttcgacgccgacgacacctcggactcccgccgttcgcgccgctcccgccgtctgaacgcccaggagcgccgtgcagccgccgaagtcgagcagattgaggaagacctcgagctggacgatatcgcctactcgccgattgccgaggaggagggcgacgaggaatccgacgtcacccgcacccgttcgcgccgtcgccgccgtcgtggttcacgcggcgaaaccggtgccaacggcgagcacgataccgccgagaacgatgccgaggatacgcgttcccgccgtcgtgacgatcgcgatgatcatgaccgtgatcgcgatgaggacgatgaggagcagaccgtcactcgccgtcgccgccgccgtcgtggcggcaagaacggcgagggcaccgacgaccagagtcagaacagcgaacagccgctggtccgccgctcccgcaagcagcagtacatcgacgaaatcaccgatgtggaaggctccactcgtctcgaggccaagaagcagcgccgccgtgacaaccgccgtgagcgcagccgccagagccagcttatggaacaggacttccttgcacgccgcgagaacgtggaccgcctgatggtggtgcgcgagaaggaacaccacacccagatttccgtggtggaagacaatgttctggtcgagcattacgtctccgacattcaggaagtacagaccgtcggcaacatctatcttggccgcgtgcagaacgtgctgcccagcatggaggccgcattcgtggatatcggccagtcccgcaacggtgtgctctacgccggcgaggtcaactgggatgccgctcgtctcgaaggtcagccgcgccgcatcgagctggcgttcaagtccggcgacccggtgctcgtgcaggtcactaaggacccgatcggccacaagggtgcccgcctgacctctcaggtcacgcttgccggccgcttcctggtgctcgtgccctccggtggcatgaccggcgtgagccgcaagctttcggagcgcgaacgcagccgtctgaagaacatcgtctccaagatcgccccgaaagacatgggcgtgattatccgcaccgcggccgaaggcgcatccgaagacgccatcgtcaaggatctcgaatcactggtccgccagtgggagcgcatcaacgccaagcgcgaggaattctggcacggcaagcgcccgaaactcctgcagggcgagcccgacgtggccatccgcgtggtgcgcgacatcttcaacgacgacttcagcaagctcatcgtggaaggtgacaaggtctacgaccgtatcgaggaataccttgacaccatggcccccgacctgaaggacaagctggagaagtgggacccggccgagcacgaaggcaaggacgtgttcgacaaatggtccatcgactcccagctgcgtaagggcatggaacgtcaggtctacctgccgtccggcggctcgattgtcatcgatcgcaccgaggccatgaccaccatcgacgtgaacaccggccgctttatcggcaagggcaagtccttggaagaaacggtgacgcgctgcaacttggaggcgtctgaagagatcgcccgccagctgcgcctgcgcgatatcggcggcatggtgatgatcgactatgtggatatggtcatgcccgccaaccgcgatctggtgctgcgccgcttggtcgaatgcctggcacgcgaccgcaccaagcatcaggtggccgaagtcacctcgctcggtttggtgcagatgacccgcaagcgcatcggccagggtctggtcgaggcgttctccgaggaatgcccgacctgcaagggccgtggtttcatcctgcatgatcagccgaccgtttcggccgactacgacgatccctacgcgcttcgcggtggcgacccgttcgtcaaaaccaacaagcatggtcgcggcaccgctcccgctcccgaaccggctggttccagcgccgacgtcaaagccaaactggctcagattgccgccgctgccgtcgccgccaacaatacggcggaagagtaacaggtgtgtcgtgcttgacacgcggacaaaaatcatttgatttagtccgcatggtggtgtagatttgaaactcggtgtctgaccgcaggctcggtgcgtgttaggcaaggtagctttccaaaacataaaaggaacgataatgtacgcgattgtgaaggccggtggccatcaggaaaaggtcgaggttggcgacgtcatcctcgtgaaccgtctcgacgccaagaagggcgataccgtggaattcccggtctccctcgttgtcgatggtgacaaggtcaccctcgccgccgccgatctggccaaggtgtccgtcaaggctgaggttgtgaacgatgaagccaagggcccgaagattgacattcagaagtacaagaacaagactggtgttgctcgccgtaagggtcatcgccagaagctgactatcgtcaagatcacggcgattgcctgagttatagaaaggaccatgaatcatggcacataagaagggtgcgtccagctctcgcaacggtcgcgattctaacccgcaatacctcggcgtgaagaagttcggcggcgaagccgtcgtggccggcaacatcatcgttcgccagcgtggcaccaacttccacccgggccacaacgtcggcatgggcaaggaccacacgctgttcgccctcaccgatggctccgtgaagttcggtgtgcgtcgcgaccgcaaggttgtcgacgtcatcgcctgagcgatatagcgtcaagctttttcaagccgcgcccgtaaggacgcggcttttttgtaaggtaatcaatatgagtgattttgtggatcgagtaaccgtccatgtcaagggcggcgatgggggcaacggttcggccggcatccgtcgtgagaaatacaagccgttggccggtccgaacggcggcaatggcggcgacggtggttccgtggtgttcgtggccgaccgtaacgccaccagcctgctcgactatcgtttcatgccgcatcgtgtcgccggcagcggcaccatgggtttgggcgacaataaggacggctccaagagcgaggacctgattctgcccgtgccctgcggcaccgtcgtctttgaggcgcgcggcgaacagggcaaagccaagcatcccggcgcacagctcgccgacttgcg

SEQ ID NO: 3274 - DNA, 4641 bp, Unknown
  R53_2m  MAG No. k141_10397
caagcaaataactgggctcccctctccgaggggagctgtcgtcacaggtgactgaggggagttcctgagtaaggagacatcatgtggaccacatttctggtcgcattgaaagcgaacttgcgtaaccggtcggcgttgttctggatgaccgtgttcccgattgtgctggcgaccatgttcaacggactgttcggcgggctggccgaagcatacgaactcaagccggtgccgatggccgtcatcgaagacacccgttggcagcaggcggacggtgcccgcaccttcgtagacgcgctggccggggaaacggaatcggcctcagacgacacgacctacgccgaaatcgaccaaaagctgctgaccatcaccacagtcgacaccgtgaaggaggccgaacaacggctcgccgacggcactgccaacggctatctgaccgccgacaataacggccgattggcgatgaccgtgagccgggaaaccgccgtcacagccaaggactccacgcaaaacagcggactggacattagcctcgcggccctgcgcagcgtcatcgacctgtacaaccgcaccgacgccgttacccggcagaccatcgccgacaatccacaggccgcgctcagccggaacttctggaacagcgtcgggcagaacgtcgacatgacccatgagacgacgctcacgcatttccagcctgacgagatcgcccgatactattacgcgctgctggccatgtcctgcatgatggccatgggatactccatcagcacagtcgccgccgcacaggcgaacctgtccgcgctgggcatacggcggaccgtagcgccgctgagccgggccaaacagctcgtcgcgggcttcctctcctgctggctgtgctcgtcggtcgccctgtccatcgcattggcctatatccggctcgcctgcaacgtctcgctcggcggacgcgaaccggcggcgatcctcgcggtcatcatcgcctcgttcatgaccagctcagcaggcaccctgctcggtgcggtgccgaagctctcgtacaacacgaaatacgggctgtcgaccggcatctcctgcacgctgtcgctgttcaccggactgtacggcgggtttgccatgcagatcagcgactggatagcccgcaacgcgcccatactcggcaccatcaaccccgcacagcaggtgacgaacctgttctacgacatcctgtactacgacagctaccggccgttcatcaccacctgcatcattctgctggcgatgagcgcggtattcctcttggccggcatcgcaatgctgaggaggcaacgttatgaacacctgtaaagccacgctgcgcgtgctgttcgcgcaccgggtctacctgatgatctacctcgtattcataggcatcctgatgatgtccatcagctgggcgatgctgacctccgcatccggctccatgtccgcggtgttcgaatcgaccaagacgcgcgtcgccatcatcgaccgcgactccgaccggggtgatatcgccacgtcgatgcgcgcctacctgcgcgattccagcgaactggtggacctcgacgacaccagcgaaacgctgcaacaggccgtcgcctcgaactgggtggacctgatcgtcatcattcccgacggattcgctgacgattatgtcgccgcggcggcggacggcgacaatccgccgaacgtggacacggttaccagctacgcatccggctccgggtcgatggcgcggatgaacgtcggcgggttcctctcgctcacccgcaccgcactgatcggcgcgcagacgagggtcgaccaggcggcgctcgccggcatgatgaacgctacaggaggggccgccggttttgatggcgcgagtctggaccaagacatgctggactcgctgccggaagggcaagtcgacaagccggatatcaaggatctgtcccaggccgccaaaatggccgccgaatcggccagcgatacagacgtgaaccatcagatcgccgtggtcgatacgccgaccgaggagtcggcaagcgctgcggatacggcggtcagcggattcggcggcaccatgaaaaccgcgctgtacccgctgtccctggcgatgaccatctgcggatcgatgatcctgggcgcgttcaccaccggcgaggtgcggcggcgtctcaccgcctcgccccgacgcatggtcctgatgggactccagcggttgctgacgttgggcggattcgcgctcgtcgtatgcgtcggttatttggtgctgtcaatcggtctgatgatggcggcggggctcgatccgttgcacctgagcgtcgggggagtgctgatgacgttcggcgcgacctgcgtgtacgcgctgatgaccgtcgcctgcggattcatgctcagcgagttcgggttttcggaggcggctgccaacggattcgccaatatcttcggcctgctcatcatgttcacgtcgggagttgcattgccgattgacatgatgcccggcgtgatggtgaccatagccaagttcctgcccggctggtggtattgcaccgcgatcgacaacgcgctcggcttcggcacggctgcggagagcggcgtgagcgtcgccggctgggccggctcgctgggattggtcgcactgttcggtgtgatgttcatctgcattggcctggccgccggccgcttccgccgatcccgtcccaccctggccgcgcccgccaccacgcagctggccgagtgagaaaatcagcctttcaaccgataccgctgcaccgggtcatcggcgaacttgactcgggcgacccgcccttccttcatcagttcgcgcatgccggacgtggcggccagcggagtcaactgcagttcgcgcatgatctccttgacgctcatcgccgaatgccgttccagtacggtcataatcgccttgaccacgtcacccggtgaactgttcgccatcgtgcgctgcttggtgatggtcatcgtgaacgtgttgatgtcgttgcgcgtggtcgccggctcgatgccggcctcgcgcaacgcggcggcgatgcgctggtagccgtcgccgccttctgggttcacaaacccgccgcccggatacggcgtggactccagcagcgtgaacaggaactggtttcgggtggagacgaacggcgcgcccatcaccggatgcgggctcgccagcacatcatgtgtcaccatgccgtacaggccacccggattggtgatctcgatgcgatcggtgaacacgctgatatgcacctgcgtgccgcgcgcatcgggcgaataatcacggtgggtgagcgcgttcgcaatcgcctcgcgcaacacgagtggcggataatcgggcttcttcgcgccaatccaacgcatcaacgagtcgaccgcatcgtcgatcatcaccggaatcgaaccgaccaccgacttcgaggcgaccaatcgttcgtcgccccggaacacatcgtcccggctcgtccccggaaacacggctatcgaaatgccgagccgcggatagaacttctgcggatagcggcccaacgccagcagtccggccaaggtgggacgcagtattccgccgacctccgactcgtcggaatcatcatggcgcaacacctgcagatccagcagcacatcgatgccatctcggtcggcgaacacgcgcggatgctgttcgcgcacgcgtgccaacaatccggaaacgagctgcgggtcgaggtcatcggtcgtggcgccgggcacgatatccagatcgtaggtgggctgcagatgctcctcgatgagccggtcgacctcataggaggtcatgcgccggtcgccgtcgccggtgcggatgaacgagccgccgtgcggtccgagcgcggtggtgaagcagggcttgtcgcgcggcagcatttcgtcgatgcgcgcgaacaccagattcgcgccttcgaacgggcaggtgacgatcacgggccgcaccaccggcgtcatcttctcgcacgcctggctcagcgcctcctgcatggcgcgcgcgtcgaatccctcgaccggcgtgaacccgttcttttcggacaggccaaggatgatccagccgccggagccgttggagaacgcggacaacgtatcggtgatggtcgaggagatcttgcgcttgcattccttgacctcgcactgctgcgtatcgttgccgatcagacgcatgagttcgatcagctcagtcattttggcagtatagtcatcgaccatggcggcctccttgacaccattgtgccccatgatccgccgcccgctcgcctccagacccgccggttcactccaattcatccagaattcatgggttactggtcaaagtacgaatgattgccgaaaggctgtcgtatatgcgcaatagcggctgcaaactgtgttgcgccagagcgttcaagtcttttagcaaagtcgggaatgtttatcggtggccgatgtcgagaatcgataagctcacgtatggcgctagctgtggcttccggatttcgtctaagtaatacacagagcaaatcatctggcgtgatgacctgaatggagaaagagtcaagcagtttctggggaaaatccttgatattgcgcgtggccagtgcgtctgcttgtccctgtgccgcagccgcaagtgcatgacgatcatccgggtcaggcagatcgaattgg

SEQ ID NO: 3275 - DNA, 43563 bp, Unknown
  R53_2m  MAG No. k141_10416
aacgaggatgacgattatcgggcggattacgatttcctgaagactacgcttgaccgcatcacctctcgggcgaactacgatccgaaccgcccgattttcgtgctgacccatcacggcgtgcagaataccgcctatgtgaccaacgaatggtacggcgagtacggtgccggtaccgaccacgacctggtgaaactcatgcaacagtatcctcagatcattcaggtttccggacactcccacgccacgttggaagacgcgcgctcaattgatcagagcttgggatacaccagcatccaagacggtacgattggcgcctatttcgagaatgtaagcggcaaggtggatcctattaccggtactgccgccactcggccggccgattccgaactggcctcgcaggggttgttggtcgatgtgtatcgggacggcacggtgaaagtgcataggatgaatttcgcaaccggcacgtggatatatcctgacgaaccatggaccattaccgccgatggagccaaggctaacgtgtatggcaagaatcgtccaagtaccccggccatgttcccggacggcgcgtcggtaggctttgacactgcgaagaccaccgggaacagtgctgctgtcaccttcccggcagccaagcccgctgacggcacgaacaacaatatgattcactcatatcgcatcacgatgacgcctaagaacggcggcgagacggtatccaaatccgtgttcaacgattattactatgccaaggctggggtcggggctgctggagccgtgccgacccagaaaagcaggtggtccgttaccgttaaaggcctgacgccgcagacggaatacacagccacggtcgaggcgctgacctcgtttgaagaggagaacggggctgccggtgccgtgatcgccagcggccagacaagtgtgaccaccaatgaggcccctgctcccagcccgatgttcgatgttgattttggcagtgactcggccgatgactactacgctcaccagtccgttaagcagggtggcgtttccacaatcgaggataacgccgagctcggccagcaagtactgcatgtgcgtggcggagatggtggataccggtacacgatggaagacgaggactacaacgccatcgccaacggattcaccacggatgtcgtattctcgattgcggatgtgcagaaggaccagtgtgtcttttccaatcagcaaaatgcgggattcggctttgaagtcgagaacggcaaactggaattctggctgaatgccgggagtggccgagccaagccagcagtggctattcagcccgatacttggtatcacgccagtgccgtatacgatggcaacaccgtaacgctgtatttgaatggcgagaaggttgattcggcgtcggctaagagcggcttggtgattccgtccaacggcgcaaaatacttcttcatcggtgcggataccagcggctctggcgctccggaataccagatgagggaagggtacgttgctcttgcgcgcatctccagccaagtgttctctgacgatgaagttgccgcatcatataccaacgcgatgggcgacggcccggccgccaagcaaacggtgcgccaggccttgactgcggctaagcgtgtggttgaagctggccagggaaactatagcgatgcaacgtggtctgcgttcgccgatgcctataccactgcgctggtgcgggtcgaagacttccgtgccgccccggccgacctcaatgccgctgcggtcgccctgcgttcagcacagcaggcattgcaggaaacgaatagcggagatgacgggaatggcggcaatggcggggacggtggatcagacgctggtggccaggatgctaatcagccaggcggttcgcacgattccgattccggcgcggacaagtcctccgccagtcagggagccaatgctgctgaccgtttgagcgcaacaggtgtgaacacggctggattgttggccgtaacactggtacttgttggtgcggcgctgacgctgaaagtcgttcgacgtagatagacccggaaaggcgattcgggcattgtctagatgtgaataacgccaaaggcgtgtggtggagcattgttcaagttccggcacacgccttttccaggtagagaagccatgctaaagtgactcttcgtgcaatacgccaagagtgttgtcagcgcacgtgcggacgtagttcatcggtagaatgaaagcttcccaagctttagaggcgggttcgactcccgtcgtccgctccacttgtctcaaatggtgagaccatccaatcattccaacgttttttttaatcttgtagacacctgctcaatcacttggtcttttgatgagatagtgattcctgcggacatgaggggaggcttctgatgcgtggtcaacagcgcgccattagggttttgtttgttgcgcagggactgagtctcgctgcgatgagcgttgacctaacggtcactgcgctcgtgggcagtgagctggccccgttcgcgtggatggcgacgataccgatcgccttgatcgcgttggggacggtgttcgccaataccttcgtcaatcgcctcatcgcccgcatcgggcacaagcatgtgttcgaggccggggcggtcatcgccatatgcggcggaatcagctcgttctgcgcggtatggttccacaatttcccgcttctgtgcgtcggcacgttcgcggtcggcatctatcaggcggcctccaactactaccgttacgcggcggccgatctcaaccccgatacaaaggaccgggccgtgtccgtggtgctgtcggcaggcgtcatcgccgcgattgtcggcccgttgctggcgacgtgggccgagggactgttccccgtccactacgcaggctcctatctcatcgtaagcgtcctcggcatactcgctctggtgacggtggcgatgttcccggcagaccagcagatcggaaacacgcggcagcccgttggttcggcgcagaaggtcggcctgcttgagcttctgcgccgcccgcgctttctgctcggcatcgccctggggttcaccgtgtgctgcgccatgaccatgatcatggccggcgccccgctggtgatggaacatgtgctgcgcgaatccgacggcacgcgcatgcaggccatgcaactgcacatgctcggcatgtatctgcctatggcattgattccactgctcaactccgagaaacgctctcacacggtctttgtatctcttgctctagggctaggacttgtcagctgtctgttgggtctaggtcagaacgcgccgctcgtcgcgatggcattgctgggcatcgccgtcgcctgggcactcggctacaacgagggcacggtgctgctggtgagctcgtattccgccgacgaagtggcgtcggccagaggcaagggagagttcttcctcgtatgcggacaggtcatcggcagtctgttggccggctccgtcatcgaattcctcggatggcggaccatgctggcgatcctgacgctgctgtttgtgctgacatccggtatcgccatcaacagtcgaaaggctatcgcctagctttaattcgttaacaatgtctggctcccctctctgaggggagccagaattaacaaacgaatcaacggagtgggatactagcgcgcggcggcgagatccaggccggccgcgtcggcgaccctgcgccaccagtcgaccagcaccggcatggtggcgtgcgcgttcaacccgctgggctggggaatcacccacagctgcgcgcctccgaaccggtcggtctcttccgcggtgaggtcctgcagccccagcgcggcggacttatcggcgaacgcctgtcggtacgccgtgatgcccagtatcgcaatggcccggggatggaccctcgcgcacagctcccgcagccgatcggcgccctgacgcagctcggcggtgttcagctcgctcgctttcgcggtggcgcgattgacgagattggtaagcccgatgccgcggtcgatcatcatgcgctcatcgcgaaggcgcaggccgtaactggcgtccacctgccacggcgtgagccccgaggcgaaaagcgacggccagaatcggttgccgggataggcgaagggtgcgttgaccgcggccgtccataacccggggttgatgcccacgataagcagtttggggtgcgggcagcggatgtcgtcgaccgtgccgtcgacgaaaccggcgagctcggtgcgcttcggccgccggccttccagcggagaatgtcgaatatcgctcacgggttccatggtagtcgtgccccgcttacggcggtttgcggcgtaggttcgagttgtcggtgagctccgcgcctcgcgggcaaggtgatcttgcgcacattcgccgccgaggtctccccgacaatgcgattcgtcactcggcggcgggataatggaagccatgactatcgcaactgccgaacgctatgccgaaatgctggatgccgcccgccacggcggatacgcctatcccgcgatcaacgtgaccagcacgcagacgctcaacgccgcgctgcagggattcgccgaggccgagtccgacggcatcatccaggtgtcggtcggcggctcctcctacttctccggccaaagcgtgaacgaccgcgtggtcgggtcgctcgcgttcgccgcattcgcgcacgaggtggcgaagcgctacccgaacatcacggtcgcgctgcacaccgaccattgcgccaagcagtacctggacggctgggtccgcccgctgctcgcgcacgaggccgaacaggtcaagcgcggcgaagagccgacgttccagtcgcatatgtgggacggctcgactgtgccactggaggagaacctggacatcgccgcggagctgctcgagaaatccgtccgcgcgcatacggtgctggagatcgagatcggcgcggtcggcggcgaggaggacggtcattccgcggagatcaacgaaaagctgtattccacgccgaccgacggcgtgcgcgtggcggagcggctcggcctcggcgagcacggccgctatatggccgctttcaccttcggcaacgtgcatggcgcatacaagccgggtgtggtcaagctccgcccggaactgctgcgcgacatccagtccgaagtgtgggacgcggccctcgacggccgtcttgggtcgctgggcgcgtcggcggtgtccacgtgcgcgctgccggacatgcccgagcgcaagcccttcgctctggtgttccacggcggttccggctccacgcccgacgagatcgcccgcgcggtgagctacggcgtggtcaagatgaacatcgacacggacacgcagtacgccttcacgcgcgcggtcgccggccacatgttcgcgcattacgacgccgtgctcaagatcgacggcgaggtcggcaacaagaagctgtacgacccgcgctcctggggccgcgaggccgaatcggccatggccgcccgcgtggtcgaggcgtgccggcagctcggctcggccggcaaggcattgaagtagcgaagcggcgggcggcaccgctgacgggctgcggtcatgtgataaggtcaggacattgatggattgttcgccagacggatggggactgcaatgagcgcaccggcggaggaagatcgtatcatgaggccggatgtaatgtgcctgcggcagttgtccctgcttatttgcagggaggcaatcgtttcgatggatatgatgactgcttgagttccgaggtcagcatcaagaagatgtcggtctggttcgaaaaaatgaccgcgcgggagtaccgcaagggaaccgtgataccggaattccgggcggtgcggcgcgtggtcacggattgccttcgcctgttgaccggcttcgacgacgccagcatcgcctacgacggcggcttcgtggtcagttacacggcatccgacggaacatacatggaggatcagccgttcgaaactctgagcgacggctatcgcgtagccatcgggttggtggccgacatagcgcggcgtatggcacagctcaaccccttcctcgccgaacaggctgttgcgcgaactcccggagcggtgcttatcgacgaggtggatctgcatctgcaccccaagtggcaggggaagattctgggcgttttgcatgaattgttccccttggtgcaattcatcgtcaccacgcatgccccgatggtgatctcctcggtacaatccaagaatctacgggtgatcgagccggtcgatggcggtgacggcaagtacgtcgccgtctctccggacgacgaaacgtacggtgtcaacgccggggcgatactgcgcgaagtcatggggaccccggataagccggcggcggttcaggacaaactggatgaattcggccagtatctgaacgacaaagaatacggcaaggctcaagcgacgctacgagcgttgcagaacgaggtaggggaagacaacccggatctgagcaacgcgtgggccgcgtattatttcgccgtgccggcgccggacgcgtgagggcgcgcgggtagcttggacaggccggcggctgcatatggcgtggcagcggtagaggctgtacggtagtctgtgttcggcggaaaaagcgatgttgcggaggtgtgttatgcccggaattgttcttatcggtgcccagtggggcgacgagggtaaaggcaaggctaccgatctgatcggcaccaaggtcgattacgtcgcgcgcttcaacggcggcaacaacgcgggccatagcgtggtggtcggcgatgagtcgtacgccctgcacctgctgccctccggtattatcaacccgaacctgaccccggtgatcggcaacggcgtggtcgtggacccggaagtgctcttcgaggagattgacggcctggaatcccgcggcatcgattgctcccacctcaaggtgagcgaggccgcacacatcatcgcgccctaccaccgcacactcgacaaggtgactgaacgcttccttggcaagcacaagatcggcaccaccggccgtggcatcggcccagcctacgcggacaagatcaaccgtgtcggcatccgcgtgcatgacctgttcaacgccgaccatctgcacgacaaggtggaggccagcctgcaccagaagaaccagatgctggtcaagctctacaaccgtcgtccgatcgacgtggaccagaccaccgaggagctgctgaagctcggcgaacgcctcaagccgtacgtggccaacaccggcctgattctcaacaaggcgcttgacgaaggcaagaccgtactgtttgaaggcgctcaggccaccatgcttgacgtggatcacggcacctacccgttcgtcacctcttccaacccgaccgccggcggcgcctgcaccggcaccggcgtgggccccaccaagatcacccgcgtaatcggcgtctccaaggcctacgtcacccgcgtgggcgaaggcccattccccaccgaactgctggacgagtccggcgaatggctgcgtcagcagggtcacgaatttggcgtgaccaccggtcgtccgcgtcgttgcggctggttcgatgcagtcgtcaaccggtacgcctcccaggtcaacggcctgaccgacatcgtgctcaccaagctcgacgtgctcaccggcctgaaggagattccgatctgcgtggcctacgacgtggacggcgaacgtcacgacgacatgccgaccgatcaggccgccttcgccgccgccaagccgatttacgagaccatgcccggctgggatgaagacatctccgactgccactcctttgacgagctgcccgccacctgccaggcctacgtcaagcgtttggaagagctgagcggctgccgtatctccgcgatcggcaccggcccacagcgcgaccatgtcatccagatcaattcgctggtcgactgaccgtctgcaacgaatttcccggcttgactggtaacgacgcggcacatgatatccgccggctgattccgcgattcgaccacttgaagtggaagatggcggcggccggcatagtcattggtctggtttcaggattgctggttgtcgtataccgtctcggcatcgaatacggcacggatgcgtcccgttggatatatgcgcggattcgcgagaccccgtggctgattgcgccgtgggcggttgccgcggtggcggccgcgctggcgatcgcgtggatggtcggcaaggagccgatggctggtggcagcggcatcccgcagaccaacggcgtggtgatatgcggcttgaagatgcgttggcagacgattctgccagtccgtttcgtcggtggactgttgggcgcgttgtttggtctgtcgctcggccgtgaggggccgtccattcagattggtgcgtcgggcgcgcagtgtgtatcccaccgtttgcgcggccgccgccgtgaggacatgcaggagcattatctggtcaccgccggtgccgcggccggcttgtccgccgcgttcagcgcgccgctgtccggcatgatgttcgctttggaaggggtgcatcggagtttttcccctgcgattctgatgggcgccaccgccgcatcgctgaccgccgatttcgtctcgaaatactgtttcggtctgcgtccggttttggatttcggtgatatcggtcagctgtcgttggaagagtatgtgtggctgattccgttgggattggtggccggtttggttggttcgctgatgaaccgctcgttgcttggcttccagacgctgtacggcaaactgccggcatggagccgcccgatgattgcgattgcgatcgcgttgcctgtcggcatctggttgcccgatgtgctcggcggcggctcgaatctgattgataccgccgaacatgcgcgcgtcggcttgggaatgctgtgtctgctgttcgtggcgaagatgctgttcacatccacgagtttcggctcaggcgcgcctggcggtattttcatgccgattcttgcggtcggttcgttggccggcggcatctgcggtgaagtgttgcatcgattcggtaatctgccatccgacgcagtggcggtgtttgcggtgtgcgtgatgacgggcacgctcgccgcgtccgtgaaaacgccgatcacgtcgattctgttggctgtggagatgtctggaacgttgacgcacatgctgccggtcgcggccgtcgctttcatcgcgctgttggtgtccgatttgctgcgcaccaaaccgatttatggggagttgctggagcggtacgtgcgcgcgcaaggcatgcagatggcgatcgcaagccatgtgggcagcggcattatggaactgccattggaaatgggggcgattgcggacggcaagcgggtgcgtgacgtgcgttggccgtctgggtgtctgatcatcggcctgcgtcgcggcgaaagcgagatcgtgccgcgcggtgatacacggctgcgtgccggcgactatctggtggtgctgttcagtggcgaggaggagcgcgaggtgcgacctgcgatgcggcggctgtgtgatgcccggcttgactgagcctggctgaattcggctggactctggatgtccgaatctgcggaatcggacatccagggtgcatacgttggcgctccgtgtaaactcatatgcgttaggaaggcagcaatcgcggcccagctcgttgttgcacggcctatgggcggaacaacgctgtccgcggaaggccagtacagggggagcgcaatggaatcgcaagaacaatcgccgggagacgtggtgactgcgggtgaggactcgcatcccatcacgcaggcaatcgacgctgttgaggtgacgcatgctggtgcaaccgcgcccgccgctaacaccatggatccgcctacgattcccctggcaccgatgaaacgtatgcaggcgcggttcaatccgctcgccgacggactgatgtatgttgtggtgttcgtcggtggatttgttggagtcggctgtcggcatgcgttggatatgcttctgccgtcggtcagcgggacgccattcgttgtgggcacgtttgtgtcgaatatggtcgcctgcttcctgttcgcgatgctgaccgaattcatggcgaccgcttcgtggctgcgtcgccgggtgcggcaggttgtcagccgtggcgttgggctcggcttactcggcgggctttcgacgatgtccggcgtgatgctggaaacgatggaaggtttgcacgagcggcatatcgccagtgcgcttggctatcttgcgggaaattttgcaggcggtttgctcgctgccgccgccggcgtggttctgatgcaggcactgctgtcacggagtactcgaaagcgggttcggggtgcgttttcagctgtttccgtgtccgattctgccgaatcggacacgcagggcgtacgccatgtgaaagtggccgacgtggcgcgttctgccgcgcaggacgcaatggaagccgcgcaggcggcgcagcaggccgcgcaggcggcccagcagattgcacagacgggacaggttccgcgagtcgaaacaccaaccgtgccgccgactgccatccagcctatgcagacaggccacgttccgcagattcctccgctggtcgttcctcagctgacgcagccggcgcatccgttgctgcgcgagccggatactccagacttggggcagctgcccgagattaagcagtcgcagccaatccagcagccggccaacccgcttccacccagcttcgagcccaaaccgatcactgcggagatttcgcttgtcgccgacccgactaccggggaggtgcgctgatgatgtggatgatctgtctgttcggcggtctgggcgccatggcccgttacgtgctcgacgtgtcaattcaacaaggctggaaccgcgagaatcggagaatgaaccgcaacttcccgctatccacgctcgtcatcaacggcgtcgcctcgctatgcgcaggcatcgccatgatgtcctactattcgcaatcggtggatatggacacggtcatgatgttcgttgtcggatttctcggtggtttctcgacattctccacggcgctcaacgaagtggtttcattgattcgccagcgtcgttttacgctggctctgggctatggaatagcaaccgtcgcggtgcctctcatttgcgcggccaccggtttcggcattgcgctgcttgccaatccggcgtaattttcacgttacacggacggtcgctgagtaacgtgaaagaaatctgagcgcaaccgcgcaagctgtttcctctcctacgttgtgaaaacaataagagaggaaaaaccaatgacagccgtaacgtatttcacacggcatcgtcgaccgggaatcgcaatgctatgttcgatttttgccgttctctcgatgcttttcgtactccctcccgccattgcgtccgcagccggcaccgctcaagccgtggatgaatgcaatccgacatccgacaacggttgcgtcaacggcattctgcaggatgccggcaaacagccgatcgccggcgccaccgtcaagttgtccggcaaggctacggcggagaccacaaccgcagccgatggcaagtgggcgttttccgttgccgatgatggcgactacaccgtcacgattgacgatgccgttgcgaaagagcatggcctgaagtcgagcagtgcgacggtcaccatcaagaaagccagcttcgacaagcagcgcggcgtcatccgcttcgatcaggccgacgataccgctggcaacggcgcggccgaatcggcggacagcaagcaggggacggcggatgcagccggatcggcggacgccgcagcatcgtcagccaaaaaaggtggctccaatatcggcaaacgtatctggcagcaactgtattccggcattatcttcggtctgatgctgggcctgatgtccgtgggtatgaacctcgtgtatggcactaccggactgcagtccttctcccatggagaacaggtcacgctcggcggcctgatggccttcgtgggcacgcagatgctgcacatgccgctcgtggcttccgccatcttcgccgtgatcatcggcgcgctgaccggcttcatccaaaacgagatcgtatggggtccgctgcgccgccgccacgtcggcaccatgcaacagatgatcgtgaccatcggcctgtccatggcgttgcagtacacgttccagttcttcttcggcggtgacattaagggtatcgtcaaatccgtgccgaacagcttccaaatcggcccgatcaccacggacatgccgacgctgctgtccgcgctcatcgccatctgcgtgatcgtgggcgtcacactgttcctctacaagacgcggctcggccgcgccacgcgagccgtttccgacaacgcggcactggccgcagcgtccggcatcaacgtggatcaggtggtccgcgtggtatggattctctcgtgcgccatggccgccctatccggcgtgctcctcggcgtatacctcaacggcatctcttggaacaccggcgcgaccctgatcctgctgatgttcgccgcggtgacgcttggcggcctcggcaccgccaacggcgctcttatcggctcgttggtcatcggcatcgtggcggatatgagctcgctcgtcatccccaacgacatgcgttacgccagcgcgctggcaatcctcatcatcgttctgctggtgcgcccgcagggcatcttcggcaagcagcaaagggtgggctgattcatggatgtcatgacaatcatctccaacgcggcgggcgagctgatcgcccccaccacggcggcatatgtactggccgccatcggtttgaacattcacttcggcatgaccggcctgatgaacatgggccaggcgggcttcatgctcctcggcgcctacggattcgccatcacgcagtcgatgggctgcaacctgttcgcctcggtctgtgcggcgctcgcgctcgccgtcatctacgcgctgctgctcggcattccgacgctgaagcttgggcccgactatctggccatggtcacgttggcggccgcggaaatcatccgcatcgtcggccgttccacagccatgacgaacttcaccggcggttccgcgggcatctcgccgcaggatttcactgaaaagttcgaagcgctttccccactgcccgacggctcgaccacgttcctgctgtggacgtacagcaacaacatcgcgaattcctggtggctgcgtatcgtggcttggattttggttgcgatcgctgcgttcctgtgctggcgatggttccactcgccgtggggccgtatgcttaagggcattcgtgaggatgagaatgcgattcgttcgcttggcaagccggttacgaaatacaagatggaatcgctgattttgggcggattgttcggtgcgatggccggcatcatcttcgtcctgccgcgctccgtacagcccgattcgctcggccgtacagttacgttctacgtgtggacgattctgctgctgggcggcgcggccacgattctcggtcctgtgctcggctcctgcgtgctgtgggtgctgctcaccttcgtcaaggaggttatgcgcaacaccgttcccgaaaccctgatctcctccaatcagatcgaagccctcggctgggtgatcgtcggcgtggcgctgatgtgtctggtgatattcagaccccaaggcctgttgggcgaccgaaaggagttggctttccatgcctgatacaacgaataccccgaccaccggcgcgcagcagccatctggcgtgcagccgggagtgccgttccatgacctgaccaaatgggccaccaaagcgccggaaggcgagaccctcatttccacggcctaccgtgacaaagtcaccgaggatttgaaatttgtggagaacaagccgggtgtgcacaagcccgatccgattctgatcgccgatgacgtgacccgcaagttcggcggcatgaccgccgtggacgtgagccatttcgaaatcgaaaggcatggcatcactgcgttgatcggaccgaacggcgccggcaaaaccacgttcttcaatctgatgaccggtttcgatatgccgaacaccggcacttggcagttcgacggcaaggacatggcccacgtgcagcctgaaaaagtggcgcgcatgggcatggtccgcaccttccagttgaccaaggtgatgagccgtctgaccgtgcttgacaacatgctgctcggcgctcccgtgcagcctggcgagggcatgttccgcgcgctgttccccggcatgtggaagaagcaggagaaagcgaatattgagaaggcggaagcattgctggaacgttttctgctgatcaaaaagaaggatgattatgcaggtgcgctttctggtggtcagcgcaagttgttggaaatggcgcgtgcgttgatgtccgacccgcagctggtcatgctggacgagccgatggctggcgtgaaccccgcgttgaagcagtcgctgctcgaccacatcatggcgttgcgagaggaaggcaccaccgtgctgttcgtggaacacgacatcaacatggttcgacacatcgccgactgggtcaccgtgatggctgaaggcaagatcgtggccgaaggtcagccgaagagcgtgatgaacgatccggccgtgatcgacgcgtatctgggagcccatgcgaatatcgacttgggtgacgactccgtgctggaagatttgaaggaggcctgaaatgagcgacaacgcaagtgtggcaagtgcggctggagtgtctggtgcggtctcggtaccccatgtgtccgattctggtgaatcggacatccaaggtggcggagacaagccgctgacccgcgagcagattcatgtgggtgagccggaaggtgagccactgcttgacgcggtggaccttgtggccggatacattcccggcgtgaacatcctcaatggcgcttccctgaccctccatgaaggtgagatcgtcggcatcatcggcccgaatggtgccggaaagtccacgctgctgaagtcgctgttcggcctggtgcatattcattccggcaagcttctgctcaagggcgaggacatcaccaatctgcgtgccgacaagctcgtgtcccgaggcgttggcttcgtgccgcagactgaaaacgtcttccccagcctgaccatcgcggaaaacatgcatatgggcgctttccaggcgccgaagctgttcgaggagcggttcgactacgtatgctccatcttccccaagctcggtcagcgcaagaaccagcttgccggccagctttccggaggcgaacgccagatggtggccatggcccgggccctgatgatgaagccgtcagtcctcctgctggacgagccttccgcgggcctgtcgccaatgcttcaggacgaaaccttcatccgcgtgcgccaggtcaacaaggccggcgtctccgtggttattgtcgaacagaacgcccgccgttgcctgcagatctgcgaccgtggctatgtgctcgaccaaggtcgcaacgcctactccggcaagggccgtgatttgatgaacgatccgaaggttgtctccttgtacttgggcaatctggaagaggaggtccaggaagagggcaggtagccccggtaaatcgcagagcggagcgtataaggcccgtcatcctctccgctcgaagcgccttcgtgtgctttagagtgccttagaactcggatgtcggtctccgtacacgttacgcgaccccctacgagccggaatttctggctctgaatcaagtttccgccggtggggcggaatacccccgccggcggtttcgccatgcctgaaaaatgacacaaatccttgtgtttccaacagttttcatacttcatctccggttaacttcacgcatacacgttcggtttcctcacagcctatagtgcacctcaagatgttcgagcaacctatctcggcaatcgtcaccaagggttcggcaatcagcggagccaagagaggaaatggtgattcatatgaagaagacaaacatgaagggcatgaaaaagctgtccatcaccgccaccgcagtagtggccgccgcggtcatggcgctcgccggctgtggctccggctccggaagctccagctccgacacatccgattccggtgccaaaaccaccaagttcgtgcttggcggtctgtggccggaaacaggatccctggcctatctggcaccgcctgaactggccgccgaaaagctggcagtcaaagacatcaatgacgccggtggcgtacttggcagcaaggtcaccaccgtggacgccgatacgtctgatgcggatcatgccgaccagaacacgtcggctgcccagtcggtgttgagcaagaatccgtcgttcattattggccccgcttccagctccgtggtgaagaacacatacaagtccattacttcgcagaacattccgatgctgtcgatgggtgccacttcggccggcttctccggtctgtccgactacttcttccgcacggtcgctcctgatactgtgcagggtgcggttatgggtaatctgatcgcccaggatggcgtgcagaagctcgccatcgcggtcttcaacgacgaatacggcaccggtctgcgcgacacagtcgtcaaaaccgcttccgcggcgggcgtcgacatcgtctacggcgaaaaggacaccttcgatccgaccgagacgaacttctcctcaatcgccaccgccatcaaggcgtccaaccccgacgcgacgctcgtcatcgccttcgaccagaccaagccgttgctcaaagcgctcgcttccgccggggttgacaccaagaaactgtacttcgtggatggcaacacctccgactattcgagcgaactcgacgcaggcctgctggaaggctcgaaaggcaccattcctggcgtcaacccgtccgacgacttcgtcaagcgtcttgaatccaccggtgtggatctgaaaaacaccaccacctatggcgctgaaacatacgacggcatcatcctcgcagccctcgccgcgcagaagggcggcagcgctgacggcaagaccattcaagccaacatggcggccgtctccggtgctgacggcggcgagaagtgcgattcctacaaggcctgcctcgccctgctgaaggatggcaaggatatccagtatcagggccagaccggtatcgggccgttcaacaagaacaatgatccgagttctgcgaatatcggcgtctacacctttgacaaagacaacaagccggtctttgaccacacgcagtctggtgacgttccgaccgactgatcgcaatgatcgcaatgtaggccatcatcaatacaagaagacggcgcaaagtgagcgtggatatcgcaagctttgcgccgtttctttcgttgtacgtaattgtgatgttttgcaagatgttgtgcatgatgtatcttccatcgatgcggtatcgactgcagtgcaaaagtgatccatgaatgtgatttcaagggggcatcatgaaaatcacatgatggaaataaagttaggggtgtccccgtcaagcgatatacacaccggactgtcgaacaggttcgagagcatgtaaatgaatgtaatattagcggtaagcacgtgagaatacggcgatagaacagtgatgacggggaaggtgcgatcatggtcggcatgcgcgatgtggcgaagaaggccggggtgtctctgagcaccgtctcgctggtggtgaacggcaacgggtacgtgtctgatgacatgcgcgaacgtgtgcgcaaagccatgcaactgctcaattatgtgccgaacgagcttgcccgcaatctgtatcatgatcgtacgaatctggtcggcgtcatcgtgcccaccatccgccacccgttctttgcaacgtttaccgcacatctgcagcatgcgctcgccgcgcaaggattacgcactatgttgtgctctaccgcagatgaggcggagggcgaaatccagtatgtcgacatgttgcgtcggcacatgatggacggcatcgtcatgtgtgcgcacacttcgcatcccggcgattattggacgtcgattcatcgcccgatcgtcgcgttcgaccgtgtgcttggagacggtatttcgtcgattggatccgaccacgagcagggtgggcgattgattgcgcagatgctgatccgcaatggtgccaaacatgtggtgatgattggcggtccgcgagatcaattcttcgatttggctgcgcgcggagaagtcgaggaaggatcgttcgatttgggaaagaccacgttcccgacggtgcgctattacctcacgttggaacaggaattgacctccgcaggcgtgaaatacgagtatgttgaagctggcgaagtgatggattttgccggctgtcatcgtgcggtcagcaatgcgctcgacaaggtggcgaccgacggcgtcgatgccgtggtcagttccgacattggtgcgtcgttctgcgtgcgcgaagcgttgagccgcggaatttccattcctgacgagctgcagatcgttgcctacgatggtacgtatttgactgatttggctggcatgaagctgaccgcggtcgcgcaggatttctcggcgatcgcacagtcgacggccgaccatatcgtgcaggctattgccaatgaggaagtggccgcggctaacgcttcacgcagggacatccccaagccgttcgagccgaacgtgcttattcccatgacgctggtgccaggcgataccacgcgttaatgctgcgcgtcttcatgcgtgtgcccggtgtggatcgcatcgatttcagcggcgtccacaaccagcggacgcccgtcgatagtcgtgctcatcatccgacttgtgcacatgtgtccgattctgccgaatcggacgtctaagttccgaaaaaagtgttctgtgtgtccgattccggagaatcggtcatgtgtgatgcgtgagatgtttggatgtccgattttgcagaaacggacacattggggtcggacaggctgggttgtgtagaacaccgcatcaaaccggttcgacacgcgcattttgcggtattactggacatcaacgtccctttcgaggtagtatcaaaccggttcgatacgtataagtatgtaaaagcacgcatacactgcgtacacattgcacctgcatccatgaaccaagggaggtcccatgaaaaacaaagtgcagctcatcgcttacgccgatcgtctcggcgatggcactcttagctcgatgaccgacatcctgcgcacccgcttcgacggcgtgtatgacggcgtgcatatcctgccgttcttcactccgttcgatggtgcggatgcaggctttgacccgatcgaccacaccaaagtcgacccgcgtctcggcagctgggacgacgtcgctgaactttccaagacccacggcatcatggtcgatgccatcgtcaaccacatgagctgggaatccaagcagttccaagacgtgcttgaaaaaggtgaggaatccgagtattacccgatgtttctgaccatgagctccgtcttcccgaacggcgccaccgaagaggaactggccggcatctaccgcccgcgcccgggcctgccgttcacccactacaagttcgccggcaagacccgcctgatctgggtcagcttcactccgcagcaggttgatattgacaccgattccgacaagggctgggaatacctcatgtccatcttcgatcagatggccgcatcccacgtcagctacatccgtctcgacgccgtgggctacggcgccaaggaggccggcaccagctgcttcatgacccccaagacctttaagctcatctcacgcctacgcgaggaaggcgtcaagcgaggcctcgaaattctcattgaggtgcatagctactacaagaagcaggttgaaatcgcctccaaggtggaccgcgtctacgacttcgccctgcctccgctgctcctgcactcgctgttcaccggtcacgtggaacccgtggtccactggaccgaaatccgcccgaacaacgccgtcaccgtgctcgatacgcacgacggcatcggcgtgatcgacatcggctccgatcagctcgaccgcagcctcaagggcctcgtgcccgacgaggacgtcgataatctggtcaacaccatccacgccaacacccacggcgaatcccaggccgccaccggtgccgccgccagcaacctcgacctctatcaggtcaacagcacgtactactccgcgctcggctgcaacgaccagcactatctggccgcccgcgcagtccagttcttcctgcccggagtgccgcaggtctactacgtgggcgcactcgccggccgcaacgacatggaactgctgcgcaagaccaacaacggccgtgacatcaatcgccattactactccaccgccgaaatcgacgaaaacctcgagcgcccggtggtgaaggccctgaacgccctggccaagttccgcaacgaactgcctgcattcaatggcgagttcagctacgaagccgacggcgacacatccatcaccttccgctggatcgctgccgacggcaagaccaaggccgccctcatcttcgagcccggccgcggactcggcacggataacaccactccggtcgccagcctcgcctggaccgatgccgccggtgaccacgagactgatgatctgctgagcaacccgccgattgccgatatcgactaaccgttggcccataaacgccactccgctgtgcgcgctccaagtagtgcgtccggcgtaagctaggtccatggaaaacaaaccgcccgcagtgcactgaagctagtgcgctcgggcggttttgcatgtggcggggttgcgggtcatgctcagtcggagctggccggtacctcccgccggtgatgagagcaaagaaagagcagcaacatgttggaaccgtacgtgcgcccgggtattgacgaccgcccggatctcgacaaggcattgagtcccgaagacaaggatgccgtggcccgactggccatcaaggatcgtcggcgtcctcccgaggcatccgccgatcagcccgaggcccaggccgtgcgtctggcggccgccggttcgtcggctgctgccgctgccgcggccagcgtggatgcccctgcgcctgatctgtcgtctgcatatctcgatatgcgcgatccgatggtcgccgccaatggtcagcgacccaccgctgttcagatttcccgtcttaattggggctttttcgtggcttcgattctggtcggcgcgccttgggcggcgttgaacaccatcgccatgcccaacgccgtggcgcgattgttcgactacgacaccgcttctgccatatcggtcaccatcaatccgtccaccagccgtccgctgcccgtcgccactgacttggtggtgcctctggccgtgctggtggtcgttggcgtggtggcctccatgttcgcgatgcccttggtctccgcgctgtccgaccgcacacgtattcctctgggccgccgtaccccgtggatggtggtgggtggcgtgctgtgcgcgctgatcacgctggttctggggcagaacacaggcctcgtagtgctgtgtttcttctgggcgctcatgcagtttgcctatgcgatgatttccgtgccgttggccagcgccatcagcgaacgggttccggacaaattccgtccgcgcattgagcgctggcacggtatcggcgtgatgcttggccaagcgcttggtgtatgcatgggtgcgctcggcgtgatgttcgactccttcacgccgtttgcctacaccgccgtgctgtttgcggtttccggcatcctgaccgtgatcatgctgcccaaggagccttccagccaggagcagccacatcaacgattcgagtcgagccaggtgtttgaccagctgcgtccgccggcacatgcgcctgcattcgcccgtgtgttcgccgctcgcgtgtgcatgatgacgggcgttggactgaccggggtctttctgtggtatctcgtgcgcttttgggtgtatggcaaggctgtggtgttcacttccgcgccattgaccattcccgcgggcctcctcatcgccggcatggccgcggcaacgctcatcggcgctgcgctcgcgtcctgggccgctgggccgatctccgagaagatcgaggaacggaacatcgccaccactgcagtggtggcggcatcctgcctgctgtatgccatcggcgtggcggtggcatggggactcggcgtctggtccaccggcacggcacgcgaaaacggcatgctgctcttcgcgttgatctccggattcgccttcggcgtctacgatgcgttaggccttgaactggtaatggactctttgcccgacccgcgccgagccggccacgacctcggcatttatgcgctcgccaactcggccggtctggcgctcgccgccatcatcggcgcgctactggtgaacgccttcgagcgcagcttcggctattacctgctcttcccgtccgccatcgtcatggtgctgctggccggaatcgtcaccctcaccgccgagtccgcgcaatgacgggccggtccggctccccggccgccggcggcgttcctccccgcggcgggggcgttcgtctcggcgacgtggcgtccacaatgtgaacccttgctggattggcaagacagccaaacctatgtttacattccagttcaggtcgaacggcctgaggaaataccgaaaggaggccacgcgatgactggattcaatgcttctgcgtttgtatccgcacgaattattagcccgtcttcgctggcggactaattcggcattgatgcttgaagccccgtcaacgaaggcagggccaatcaagctgacacaatcggtaaggccctgcaagttgcggggctttttttgttgcgctcacaaggcttacggcagaatcccgcagacggaaacggtagcggacagtacacggcaacaacacagcaacagaacaacaacctccctgtgagacgaaataatcgcccgccaatgagagtgaacgagagcaaaacaggagtaacaatgactgcagcagtcgaagagactggcttagggcaggcggcaggtaaagccgctaccttggtacgcgattcggtcaagaccgtgatcgccgcatcgatggtcggtaccgccatcgaattctatgacttctacgcctacggcaccgccgcggcaaactacttcccgcacatcttcttctccgcgaaggacaaccccaccgtcgcactgctgatgagcttgctgaccttcgccatcgccttcatcgcccgcccgctgggctcgctgatcttcggccacttcggtgaccgcatgggccgcaagaccacgctggtcgtcagcctgatgaccatgggtgtcggcaccttcctgattggctgcctgcccacctacgatcaggtcggcgttggcgcagtcgccatcctctgcctgctgcgcttcatccagggcatcggcctgggcggcgaatggtccggcgcggcactggtcgccaccgagaacgcgcctgaagacaagcgcgcactgtacggctccttcccggagctcggtgccccgatcggcttcttcctgtccaacggcacctacttcgtgctcgaatccttcaacaatcaggacgcgatgctggcttggggctggcgtgtgccgttcctgctgtccgccatcctggtgatcgtcggcctcgtggttcgcgttcacatggaggagaccccgatcttccgtatggctcaggagcagaagaaggtcgtcaagtccccgctgaccgaggtcttccgcaagtcttggcgtcaggtgctgcaggccaccttcctcgtggccgtgacctacacgctgttctacacgctcgccacctggtccctcgcttggggcaccaaggagcagggcgaaggcggcggcggccttggcttcaccaaccaggaatacctgctcatgctcatgatctccatctgcgtgttcgccctgttcatcgtgctgtcctgcctgtacgcggacaagatcggccgcaagcgcgtgctgaccttctcctcctgcgcactcgtcgtgttcgccgtgctcttcccgttcctgctggacggtggtctggtcggccagaagaacttcttcgccaacatggtgttcctgtgcgttggctttgccctgatgggcgtcgccttcggcccgatcggcgcgttcctgcctgaactgttcgaggcgaacgtgcgctactccgggtccggcatcggctacaacctggccgccatcgtcggtgcggcgttcgtgccgaccatcgccacttggctgagctcccattggggcgttcactccgtgggcctctatctcgccgtgatggccgtgtgctgcctggtgtcggtcctgacctgccgtgagacgaaggacgctgactttaccaagtgaaatcctccataactaaatatcgccaagttcacaacgtgaaaaatctcaattccactaagtgaacctctgcagggcttttccgggtcaacaggactaaacctgcatatcggaaaagcccacaaggaaagccaaaactaaaaacagtttctgcagaaccagcagagcacaataacaattaaagatttcaccccccataaacaaataaataaaaggagcgccaaaaatggcagcaactatctggtacgagaaggacgccgatctgtccgtgttcgatggcaagaaggtcgccatcttgggctacggctctcagggtcacgctcacgcactgaacctgcgtgactccggtgtcgacgtggtcgtcggcctgcgtccgacctccaagtctgtcgagttcgccaaggagcagggtcttgaggtcaagccggttggcgaggccgtcgccgaggctgacgttgtgatgatccttctgcctgaccagtaccaggccaaggtctacaaggaagaagttgagccgaacctgaagccgggcgctgccctggccttcgcccacggcttcaacatccactacggctacatcaagccgtccgaggatcacccggtcttcatggtcgccccgaagggcccgggccacatcgttcgtcgtgagtacgccgctggccgtggcgtcccggtcgtcgttgccgtcgagcaggacccggacggcaagacctggccgctgtgcctggcttacgccaaggctctgggcgctctgcgtgcgggtgccatcaagaccaccttcaccgaggagaccgagaccgatctgttcggtgagcaggacgtcctcatgggcggcatcaaccacctgtgcgacctcggcttcgacgtgctgaccgaggccggctaccagccggagatcgcttacttcgaggtgttccacgagctgaagatgctggtcgacctggctaacgagggtggcctgaacaaggctcgctggtcctgctccgacaccgctcagtacggcgactacacctccaccgtcatcaccgaggagaccaagaagcgcatgcagtaccagctcaagcgcattcaggacggctccttcgccaaggagttcatggacgaccaggccgctggcgccccgaagttcaaggagctgcaggaagagttctctcacccgcatctcgagaccgtcggcccgaagctgcgcgccatgttctcctggaacaacgccgaggccaaggacaaggacgaggccgagtccttcaacggcaagatcgctcgtacccaggttcagtgattgccgcccctgaaggggatttaagctagcaaaccgccgttcccgcccatacgggagcggcggttttgtgttgttgcgcgcagcgaatcattctcaataacaactatgcgctgatttcttgcaggcaaacgaacaccgaatatgcaagatcgttgatatctcagcctttccccatatgtgggattgtgcgattctgttcaaaagggtgcagagttgttatcgagaatcgttctctgcacacggctgtccatactccaatagtgacctagctcacgttgtggactccagcggggctgcgacggcgttctcggtaggattgatttcggtttgaaggacacaatcctcgcaacacaggacttatctgcacaccgtagataccccggcgcccagcggcgccacaccccactactgaaaaggagtgccaataatggcagcacagatctggtatgagaacgacggtgatctttctgttctcgaaggcaagaaggtcgcaatcatcggctacggctcccagggccacgcccacgcgctgaacctgcgcgattccggtgtcgacgtggtcgtcggcctgcgtccgacctccaagtcggtcgacttcgccaaggagcagggcctcgaggtcaagtccgtggccgaggcttccgccgaggccgacgtgatcatgatcctggcccccgaccagtaccagcgcaccatctgggccaacgacatcgagcccaacatcaagccgggtgctgctgttgcgttcgctcatggcttcaacatccactacggctacatcaagccgtccgaggatcacccggtgttcatggttgccccgaagggcccgggtcacatcgttcgtcgtgagtacgccgctggccgtggcgtgccggtcgtcgtggccgtccagcaggatccgcgtggcgatggttgggctctgaccctggcctacgccaaggccctcggtgctctgcgcgccggtgccatcaagaccaccttcaaggaagagaccgagaccgatctcttcggcgagcagaacgtgctcatgggtggcgtgaacaagctcgtcgagatgggcttcgaagtcctgaccgacgccggctaccagccggagatcgcctacttcgaggtctgccacgagctcaagatgctcgtcgatctgatgaacgagggcggcctgaacaaggctcgttggtcctgctccgacaccgcccagtacggcgactacgtcaacaccgtcatcaacgaggactgccgcaagcgcatggaataccacctgcagcgcatccaggacggctccttcgccaaggagttcatcgacgatcaggatgccggcgccccgcacttcaaggaactgcaggagaagtactccaacgagcgcatcgagaccgtcggcccgaagctgcgcgccatgttctcctggaacaaggatggcgtcaaggatgccgacgaggccaactccttcaccggcaagatcgcccgcgcccaggttcagtgattcttccttggctcccctcgggtgaggtgcgcacggacagcgagccggcaatcgcagccttcaggctgtccgtgtttgcagtacgctggcgcgtaagcgcctgagggtggtccccagtgcataccaaaaggccgccgctccgattcattcggagcggcggcctttcgcatggtcccaccatatagtcaaacctccaccacgtagtaaaatccccacgacgtagcaaactacccaccacgtggtgacgcaaaacggctttattccgcggaatacaaaattacgctgacatcgtggtgggcagttcatcgcgtggtgggcagttcatcgcgtggtgggatagacagttgatatacgccggctatcaaatcaatgatgccttgctgtgttccccgtatgccgagctgctttatcggaagcgtttcatgggatattttcccaagaaaatcagcgagatcatggtaggcctcgtcgttgagagacacgcgatcctctggagcaagtagttgagccaaacggaatacatcatatttatgcttcttgagatcttttccgtctacgtgctcgccatgttgttctcgggcgttgagatccaaccatgctttcgccttgaaaggaatgagatatttctcgttaagcacgctgatgccttgtattgattcgcggccttgctgcagtagccgatagtagctgtcgttcagcatgatggctgacaggctggaaacgtcgtttgcaatatgcaatggcgtcaggaacgagttcggcacaatagggaagtcagggtgacgtgaaaatagctcgatcatagtgggatacccgtacgtactggggtgcatgaaacggtacaggtgaggctgtgcggagttcttcgtgatagaggtgtatccgccatcgcgaatgaaagaccataatcgttgtgcaaactcgcgaagatgtccctcggcaatcagcaccatgtcaatatctttggtggctcggaagtccaggtcgttgtcggtcatgatgatgtcacaagcggtgccgccgatgattacgtaagaatcttcgtagccggcaaaggccgttctgatgagctgcaggccttgtgtcatattgtcgctcctgagaaagtattgcggatggattcttgtatggcgtcttccaaacgttcgtcggcaatctcgccaagagtcagggccgtggaaatggggtcggcaaggtagtcttcctgcgtatattgagcaagtaggcggggatcgtacctccacagctccagaatatatgcattatctggcaccttttccaaagcggggtcgataatgcatagttccttgttgtgctgcttgagccaatgacgttcaacggcatagattcgcagttttggggtggccagttgcgtcctgcgcgaaagagcaaattcgccggccggaatcagctcgtcggcaatcatctggcgattgcgattcgtgacggtatatttgctgaatattggtgacttcaggagatgccaagatgatttcagtaaatcaagtcggctggtctgccttgaagtcagtagttcgacgctattgctgcggccttgcttggtgcggtgcacgaatgccagctgttctaacagcgtcacggcaacgctgacctgagcttcggtaaactgaagcgctcgggcaatatctgattggactttgctctcgttggagtagagcaaatacagccagaccagctgtgttgcgggggagaagggtcgcacctcgatatcctgtgcgttctccagcggccgtgaggagatgcgctgggtgaacaccatgcccagtgaagggatatacagttgggtaccgggcacgatgaaaggaacgtgattctgaatcagggcttttcgctggtatacagaaagccggggaaactgaaagacaatgggcagatccgtccgctgctcaagcctgctggcgtcggcggtgacgcgtgtgatgctgaatgggtgagcctctccgctcgcgattagcatgctcgtgttgtcgatggtgagtttgctgaatgtccgtccgttggtcagaaatagcggcagtgaggcagtgccatcccaagaagtgatttggcagggcagaccaagtgtctcgcgaatgtaatgctcggcatccatgtcgacctcaatccttaacgaaaatctgtaagattcacatctcttgttaagtatatagaatattattaagtattttggggttggcatgtcgcgaatggaaagaaagggcagtcatccccgaaatggagacagcttagccgggaaaaaggacgacgccagcatccggagaagatggatgactggcgtcgggtaagctcgcaaaagctctactgaataacccacgcagaagtgtcggtggggagctggccttcgggggtcagcgggccggacgccagcaccacggagccatcgggcagcgcgaccggggcattgccgaagttggtgattgagatgaacacccgcccgccaaccgccgcgcgggtgtacgccaccacatcgtcgcccatgtccacctgctcggccgtggtgtcgcgcgtggcggtcagcgactcctggcgaatcgccagtgcggcgcgatacagcgcgagcatcgagtccgggtcggtttgctccacgtccaccgcgtaatccttgaaccacagcggttgcggcaggtgcgggtcggcggccggcgtcacgccctcagcgcgcgtagccggcgagaagccgaaggaagcgcccgtgccgaactggccggcggcgcacagcggcacatggttctcgccggtaccgtcatcggccggagtcggacggctgaagtcggccaaggccggctcatcggcggcggtccacggcagcggcacgcggcagccgtcgcggcccttgtccatcgtggcctgagcagtgtggaaagcggtcggatcctccaagtgatcccacggaatatcggccacctcaaacaggcccagctcctcgccctgatagatataggcggcgccgggcaggccgagctccatcaaagcggcggcgcgggcgcggcgagtgccaagctcgcgatcctcgggataggtagtgccgttgcgcagcagccagtcgtgcggcagctggtggtagggcgcgcccttgatctgcggcaggccgtaacgggaggggctgcgcggcacgtcgtgattgttcatgacccacgtggtggtggaaccgccggtttcggccgccgccttgagtccggcggcgatggcctcgcggaactcgtcggcataccagttggcttgcgcgaagtcgaagttgaaggactggcccagctcgtccatcgaagcgtacaggtgctggtgctcgggcaccacccacgcctcggccacggcaaagcgcggcgggttgtactcgttgaacaccttgcgccattcgcggtagatatcgtgcacctcgcgacggtcgaacagcgggtggctgaagtcatgattcagcacgccgaccacgctgtattcgcggccgagctcttccaacggcttggattcgaggtccttggccaggccgtgcgccacgtcgatgcggaagccgtcggtgccgtggtcggaccagaaacgcagggtcttcttgaactcctcgtggatgtccggattcttccagttgacgtccggctgcgccttatcgaacaggtgcagataccactggccgtcggccacgcgcgcccaggccgggccgccgaagaaggattgccagtcgttcgggggcagttcgccatgctcgccgcggccgtcgcggaagatgtagcggtcgcgcgccggggagccaggctcggcggcgagggcctcctggaagaacacgtgcttgtcagcggtgtggttgggcacgatgtccacgatcaccttgatgccggcctcgtgcgcggccttggccatcgcgtcgaagtcttccatggtgcctaggcgcgggtcgacgttgcggtagtcgattacgtcgtagccgccgtccgccagatcggaggggtagaacggggaaagccagatggcgtccacgccgaggctcttcaggtagtccatcttctcggtgacgccggcgatgtcgccgatgccgtcgccgttaacgtccttgaagctgcgcgggtaaatctggtaaacgacggcctgcttccaccagtcgtcattgaggttatttgcggtcatgccgattccctcctgttccgggtgcgttgtggttgggttgttccggtcgcgcccgaactgctgtgtgaaggcccgaccgttgtattgatgatgacaacgatatcatgtgaattacgcatgcaaaaatcgatttatcggcgttttgcggtggtaacgtgctcacgcctgcgcgggcgctgctgtcgcggcaggcggcgcggtggtttcgcgcagtattagcggagtgtccggccgtacgaatgccggttcgattgacttgccggcaatggcatccaataccatgtgcccggcagtcgcgcccattgcgaacgggtcctgatgcagcgtggtcagtcccacggcggcggacagggtggaatcgtcgaagccgatgatggaaatgtcctgaggtacccgccgcccgtattgacgcaggcgatacagcacgggcgcggccatttcatcatcctcaaaacagaaggcggtgatgctgggggaggcgttcagtacggcgttcaatgccgcgttgctttcgccaagaccgcgttgaatgctcaggggcgttagctcgatccccggatgggcggcagcggcatcaatgacgccctgcaaacgagcctcggcactgtagcgcatattggtttcggtcggtgcgctgccgacgaacgcgatatgccggtggccgagtgcaatcaggtgctcgatagccgaacgtgtggcggcgtaatcatcaatgctcacgcctgcgtcgaacccatcggtggaggggatgttgatgccgacaatcggcacgtgcatatgcttcagtcgctccacttcagccggtccgatgtcgaaggagctgacaatcaccgcatccgcattgcgccgcacgggcaaatccgcaaagaagtcgtggcgctcggcggcgttgcgcatggggtagggcacagtgtcgtagccggaggggcgcagcgccgagtcaagaccggcgaagatgttcgaattgaaccaactggcgatggtctcgctggcaagtagtgcgatacggaacgattggccggattttagggcggcggccgagcgtgagactgagtagtcgagcttttcggccgcggccatcactcggtctcgagtctcgggaagcaccagatccggcttggcgaaggttcgggacaccgtggatacggaaacgccggcctcgcgggccactgcctgaatgcttgccttggtcatatgccgtcgctcctttaccgtcgcgaacaatcattgtcatgacaacgataacatgcccataacaagtcgtcgtcttcggctatctcgattacgaggggctgatttagggtgtcccggacatctacttccgtttcaaggggctccttgccggtgaaaccacaagtgcaaacgactttgtgccaacgtcattccgccgttctcgcgctgggtctacttgggcgccagccccttgaagcggaagtggatgtccgggaaaggccaaatcagcccctcgaagccgatttagaccaatttcccattgcggaatcgatcaccgcttctctcggcgcatcacggcggctagggactgcacgcgtggcaggtcgaagacctcgtcggtatgcaccacgtggcctgagctgtccgccagcggcacgcgccagttcgaatactcgctggaagtgcccggctgattctgggaacggcattcgcccacgccgtccaccagcgctgcctgcagcagcagcgacggcgtatcggtgagcatggcgtgcatcgcctccacgatctcctgcacatggccttccacatcatccgccacggtctgtgagatatagccgttctccaccagacggttcatcatggccgtgcgttcggccatcgccgaggcggcgaacgcctccaccggctcgctcaggagatgcagctcctcgcgcagcttgacgtgttcgaagtccaggtagccggcggtgggtggcagatcgtgcgtggtcaccgaggccaatgcctgtttgcgatagtccttgggtgcacggtacgggtcgccggcgttcggcgaatcgtccacgcggttgaaccattccacgtcagtgccgagcacgccgtgatcggacagaatgcggcgcacgtaatccggtacggtgcccagatcctcgccaaccaccatgcctccggcgcgcgtggcctcgatggccagtactcccagcatcgcctcgtggttgtacgtcacgtatgcgccgttgagggcgccgagcccctgcggaatccaccacaggcggaacaggcccagcacatggtcgatgcgcaccgcgcccgcgtgctcgtacatcgaatgcaccatctcgcggtacacctggtagccggtggcctccagatagcgtgggttgaacggcggctggccccaatcctggccctgctggttatagaagtccggcgggcagccgaccgtgacgccgccggaggcgaagcgttccggattggcccaggcatccgcgccgagcccgtgcacgcccacggccatgtcttgcatcagacccagtgtcatgccgtggtccagcgcctcctgctgcgcggcgttcacctgctcggcggcaatccactgcagccagcggttgaactcgaacaggtcgtggtgctcctcgacgagctggcgcacggccgggtcgtcgatggtcttctcgaagaaccaacggttctcgccccacggcgcgccccatacctcgaagcacaggcaccaggtggcgaaggaatcgaggtctgggccggcggtggtcttgaaatgctcgaattcgagctcgcgcttgttgttgcggcccgcgtcgaagatcaggcgcagcgccgggcgtttggccgcccacgccgcgttgatgtccatcgggttcgattcgtcgttgcgtgcggccactgaatcatgcagcgcatccacctgcgctcggatatcggccggcagcgtgccgtattcggggatgtcctgcgggcggatgtacgtcacgttgaggaatcggcgcgattccggtagatacggcgatggctcaagcggcggaatcggcgcgccggcgtgaatcgggttgatgagcatgaagtcggccttggacttgtcggccgcgtccgccagcagcagcttcagatcgccgtaatcgccgatgccccacgattcgcgagaccgcacggaatacatctgcgtcatccagccccaccgctggtgctcggcgaccgcctccggcacgggaatgcgcgcgggggcggcgatgatggccgccttgccctcgcgcccgtccaccgtgacggtcagtgtgtggtagcccatcggcagatcgggggcgatggtcaagtccggcttgccggaattgaggttcggcagcagggcaaagtggccaaacgcggtgctgtcctccagctcgatggaggcggtgatgtccgcatccgacgggcaattcagggtcaggcttgtcggcttgccggtggtggccatgatggtgggtggtagcaaacgtttgctgttttcggcctcaagttcggtcatggaacgttttatggcctcgtcgctggaggcgtccacatcgagggccttgagcacggcgaccaaggcctcgtcgctgatttcggtgtaggtgccgagctggtcgatgaacgaggtggaaagcccgcatgctttggccagcttgaccagcggacgggcgagtcgttccgcgctttccgcgcgctgcggggcaccggaagcggcgtcgttggtggtgtctgcgatggtgccggtgctggtcgctgcgtcgttgccgtacgcgtcagtcatgatgactccttgcttgcagatcgggtactgctagtcgtttgcattgctgttcgagggccgctctgcgttgaggttccggcaatctgacagaccaatgttcgagctgttctgtctttaccataactcatattgacaacgattgcaatatggtcggtgagttgggtggccggcgggctatccgagcacgacgaacgactgcggggagagcgtcgggtggccgtcccagcgccagtcgaggtagaagtccatgtcgaatccggcctgcatcgattcgttcggtcggcccacattcggcgacgaacgccgcctcggggaattcggggcggattttcgagaacatgtactgccaggtgcggatcgtgtatggcttgccggttcatgcggcgatgatgcctcggccgattcgacgaagaatgttcacccggcgttcttccggcggtatccggacgttggcttgtgaggcctaccgtgaaatccggaatcgaaagatccaagcaatgcaggtgcggaacggttccgcgaagctggaaggcatgacgacgacggacgtggccaaacgggtgcggccggagaagtgcgggccggacggcgcagatgacactgcatggaagaaggaagaacaatgggcaatcacaaggctttgaagagcgccgtcgcggcggtcgcctccatcgcgacgctcggcgcgctcgccgctccggcgtttgctgtcgatgccgcaaacggcacctacagccccaacggcaagtcggtcgccgagctcgccaagcacggcgccgcgcagcgcatcgccgccatcggcaacaagagcgcgaagaacgtcgtgctgttcatcggcgacggcatgggcgattcggaaatcaccatcgcccgcgactatctgaagggcgccaacggccacttcgatggtctggacgcggtcggtcagcccggcgcgcttgacgacgtgcaggcgggcaccggccagtacacgaccttctcgctcggcgacggcagcaaggacagcgccgtcggcaaggatggcaccggcaagctggtcgccaaccccaacccgggcaagctcacccccgtcaccgattcctccgcgtccggttccgcatgggcgaccggtaccaagacctacaacaacgccgtggatgtcgacatctacggcaacccgcagctgaatctcttcgagcttgccaaggccgccggcaaggccaccggcaacgtgtccaccgcggaaatccaggacgccaccccggccgtgctggaatcgcactccaccgagcgtgcctgctacggcccgcagggcaagaccgacggcacttccaacaacgcctccaagcagtgcctcgccaaccagctcaaggagaacggcggcatcggctccatctccgagcagctgctcgacacccgcgccgatgtgaccatcggcggtggttccaagtacttccgccagaccgtgcagggcggcgaatacaagggcaagaccgtgtgggagcaggccaaggacatgggcttccagaccgttgagaacgacccggccgcgatgaacgccctgcagtacaaggatggccagccggtgctcgccctgatgagcgacggcaacatgccgaccaagttcaacccgtccaaggccaccgccaaggatccggccaaggacgccaacccgaccgtgtgcaccccgaatgacgcctggctcggcaaccgtggcgcctcgctcaaggacatgaccaagaaggcgctcgatctgctcaacgccaacccgaacggccagaagaacggcttcctcctgcaggtcgaaggcgcttcgatcgataagcaggaccacaacgccaacgcctgcggccagatcggcgagaccgacgacttcgaccaggccatcgcctacgccatcaagaacgtggacctcacgaacacgctggtgatcgtcaccgccgatcatgcgcacacctcccaggtcctcaacgcccagccggcctacgcgctgtccaccgtgctcaagtccgccgacggcaacaacatggtcgtctcctacggcaccgcccaggaagcctccaccgacgccgaaggcggctacaacggcggcgacatggagcacaccggcacccagctgcgcatcgccgcttccggcccaggcgcccagcgcgtcatcggcctgaccgatcagaccgataacttctacaccatcgccggcgccctgggcctggccacctcccccgacgagcagaacgcgctctccaaggacggcaccgtgaaggtcgcccgcacgcaggccggcaagtacgtcgccaatgtcgacggtttcaacggcgacgcgctgctcagctacgagctgaaagacaaggacggcgccgtggtgtccaagtccgattccagcaccccgttgtccggtgtgcgcgtcaagcccgcgcagaccacttcgatcgcgctcgacaagatgtcggaaggcgccgagtacacgctcaccgtcaccggtcgccagtccggcaaggtcgcgaccgtcgccatccaggcgccggccgccggctccgccgacaagaagccgggcgccgacaagaacggcgtgatcgcttcgggcaaggtgccgaacgattccgcggtctccggtccgttcggcaccctgggcgccaccggtaccgccgtcatggccatcgccatcgcggctgtgatgctggttgcgatcgcgatgctcatcaaggccgcgcgtaacgccaggaacaattgattcggccttggccgaccggtaatcccgagtcgtccagccgccggaaaaccatcgcccgccgagccgatgcccggcgggcgatggttttccggcggcttttggctgtgatgcgatacgtgccgtgtgccgcacttcgcaaaaacctgagtgagaatcgctcaagttttttgccgaatccggaatatgcacttgcggtttaaagttgagtggtgtaggctcaagtttcggaagcacgggaatgggcggttgcgaacgcaaaccccacaaccgagaggaaccgcacaaggaaccgaccgaaacccgggcgaaaaacgaaagaacgaacacgtgcgagacggctcgcgcacaccgcgcgtcacaacccgaacaggtcgtggcgaacggcggcgccggccgggcaatcgcaagtcccacaaaggagcacacattatggcacgcgcagttggtatcgatctgggaaccacgaattcctgcatcgcaactcttgaaggtggcgagcccaccgttatcgtcaacgctgaaggcgcgcgcaccacgccgtccgtggtggccttctccaagtccggcgagatccttgtcggcgaagtggccaagcgtcaggcagtgaccaacgttgaccgcaccatctcctccgtcaagcgccacatgggcaccgattggaccgtcgacattgacggcaagaagtggaccccgcaggagatttccgcgcagatcctgatgaagctgaagagggacgccgaggcatacctcggcgagcccgtcaccgacgccgtcatcacctgcccggcatacttcaacgatgcccagcgtcaggccaccaaggacgccggcaagatcgccggcctgaacgtcctgcgtatcatcaacgagccgaccgcagccgctctggcctacggccttgagaaaggcaaggaagacgagcgcatcctggtcttcgacctcggcggcggcaccttcgatgtctccctgctggagattggcaaggatgacgacggcttctccaccattcaggttcaggccaccaacggcgacaaccacctcggtggcgatgactgggatcagaagatcatcgattggctggtttccgaagtcaagaacaagtacggcgtcgacctgtccaaggacaagattgcgctgcagcgtctgaaggaagccgctgagcaggcgaagaaggagctctcctcctccacctccaccagcatttccatgcagtacctggccatgactcctgacggcaccccggtgcacctggatgagaccctgacccgtgcgcacttcgaggaaatgacctccgacctgctgggccgctgccgcacgccattcaacaacgtgctgcacgatgccggcatctccgtgagcgacatcgaccacgtggtgctcgtcggtggttccactcgtatgcccgccgtcaaggacctggtcaaggaactcaccggcggtaaggaagcgaaccagtccgtgaacccggatgaggttgtggctgtcggtgccgccgtgcagtccggcgtcatcaagggcgaccgtaaggacgtcctgcttatcgacgtgacccctctgtccctcggtatcgagaccaagggtggcatcatgaccaagctcatcgatcgcaacaccgccatcccgaccaagcgctccgaggtcttctccaccgctgaagacaaccagccgtccgtgctgattcaggtctaccagggtgaacgtgagttcgctcgcgacaacaagccgctgggcaccttcgagctgaccggcatcgctccggctccgcgtggcgtcccgcagatcgaggtcaccttcgacatcgacgccaacggcatcgtgcacgtgtccgctaaggacaagggcaccggcaaggagcagtccatgaccatcaccggtggttccggcctgccgaaggacgagatcgaccgcatggtcaaggaagccgaggctcacgaggctgaggataagcagcgcaaggaagacgccgagacccgcaaccaggctgaggccttcgcctactccaccgagaagctcgtcaacgacaacaaggacaagctctccgatgacatcgtcaaggaggtcaccgacaaggtcaacgccctgaaggaggccctgaagggtgacgacaccgagaaggtcaagaccgctcagaccgagctgatgaccgccgctcagaagatcggccaggtcctctacgcccagcagggtgccgagggtgccgcggctggtgccggtgcggctggcgctgccggcgctggcgcttccgctggctccgcctccggttccgacgacgacaccgtcgaggccgaggtcgtggacgacgatgacgacaaggacaacaagtgatgtccgagttcaacaaggacgactacctgaacgacctgccggatcccgaccaggccgctgagggtgccgcttccgccgcgccgcaggactcggccaaagccgagaccgcatcccaagcttcctctgacgagggagctggcgcggcgaagtccgcgactgagggagagaccccggcgaacgccggagcggaacagccgagcgatagctcgtccgattccgctccctccgattccgaagacaccctcacccccctcggcaaggccaagaaggaagccgcagactacctcgaagccctgcagcgcgaacgtgcggagttcatcaactaccgcaatcgcacgcagaaggagcaggagcgcttccgccagcacggcatcatcgacgtgctgaccgcgctgctgcccgccctcgacgatatcgaccgcattcgcgaacacagcgagatggacgactcgttcaaggccgttgccaccaagatcgacaaagccttcgagaagttcggcgtcgagaagttcggcgaaaagggcgaggacttcgaccccaccaagcatgacgcgatcctgcacaagccggacgcgaatgccgaaaaggaaacggttgacaccgtggttgaggccggctaccgcatcggcgaccgcgtaatccgcgccgcccgagtagtagtagcctccccacaaaactgacgaccagttcgctgcaatgagttgacagtgccttagctccctctgatgagggagctgatatttacctcggctcccctctctgaggggagctgtcagcgaagctgactgaggggagcttaacggaggccgtaactcccctcagtcgcctatgacgacagctcccctcaaggaggggagccaatcataaagacttttctagaaaggagacatgaatggctgaaaacgaatggctcagcaaagacttctacaaagtccttggtgtctccaaggacgcttcggacgacgacatcaagaaggcgtaccgcaagctcgcccgcaaataccatcctgacgtcaacaagaccaaggaagccgaggagaagttcaaggacatctccgaagcctacgacgtgctgagcaagaaggaagatcgccaaaagtacgacgcgattcgccagttcggcatgggcggcgcccgcttcgcaggcggttccggtgccggcggcttcgacgcttccggtttctctgatatcttcggttccatgttcggccagggtgccggcggcaatggctcgcgcatccgcttctccacttcgggcggcgggcccggcaacatcaacgacatcttctcgatgttcggcggtggcgcgggccaaagcggatacggccagcaggcgtacggcaatgccggcggctatggctatgaggaggccccgcgccccgaaaacggcgaggaccgcaactccaagatcagcctgaccctgcgtcaggcggtcaagggcgctaccgtgtccctgtccgtggacggcagaaaattcaaggcccacgtgcctgcgggcgtcaaagacggacagaagatcaagctcgccggcaaaggcaagccgggcatcaatggcggcaaggccggtgacctgtacctgcacgtcaccgtcaagcccgatgccgcgttctcgatgcgcggccacgacatcgtcatggacctgcccgtcaccgtgggccaggccgtggccggtggcaaggtcgaggctaaggacatcgacggcaatcccgtcaccttcaaggtgccggccggttccagctccggcgcggaggtcaagctcgcgggactcggtgtccagcgcggcaaccagccgggcgacctgatcggccgcgtgcagatcatggtccccgccaagccgggtctggcggtcaagcacgccgccaaagaattcgacgaaaaagccggcgactatctcagcctgtaatcaggaggtgaacaatggcgcggttagccaaccaaatgaagcagttgtacgcaatgtgcgcaaccgcgctggtgatgggcagggccgatctcgacggagccgatgatgtcggcttcgatatcgaactgcccatcttcaccgtcggccaggccgccgaactggccaacatccacccccagacccttcgccagtacgaccggctgggtctggtccgtccgcagcgcaccgatggcggcgcacgccgctactgcctgcgcgacattgcccgcctgacccgagctcagcgcctaagtcaggatgagggcatcaatctttccggtatcgcacgcattttggccctcgaagaagagaatcgccaactgcgccgcgaagtcaaacgcatgcaaaccggcgaccaggagagcgttttcgccgcaggccgtgacggcaatatcgtggaggtacaacgctccaaccgcgcccgcctctggcgcaacgccatccgccgcgaaacccgcgaactgcccggccgcgataccgccgccgataccacgcgcgaatccgactccacccccgccgattccaaatccatggtcctgtggggttggtgatttgctgttcggctgtcgtgcggagttggtgagataggtatatcgaatacgaatagttgaggattcactgcgacgtacggaggtaaccatgctgctcaaggccgtgttttgggatttggacggaacgcttatcgattcggagccgctttggcatgacggtgaaatcgagatcgcgcacaacaatggcggcgagtggaacgaggacctcggttgggagtgctccggcactccggtgccacacgtggcagaggtcatgattgcgcatggctgcacattgagcgttcccgaaatcgacaaacagctcaaggattatgtgttcaaggcggaggtcgaacgtctgccgtggattcccggcgtattggacgtgctgcactcgctcaaggaggccggcattccgtccatgctggtcaccacgtcgccgcgccgtatggcggagaacatcatgaagcagtccgagggactgttcgccggctacgtctgtggcgacgatccgtacgaacacaagccgaaccctgcgccctatctggccgcagccgacaagcttggcatcgcccgtgaagacatggccaagtgcgtggtgctcgaggattcctcggttggacttcaggccggtgcggcatcgggcgcgactctgatcgcgcagactggctggattcgcacggatacttccggcctgggccagttcgcgtccatcgaatcgtatgacggtatcgatgcggccgcgctggacggtttcgtgcgccagcgtcttggtgagtagaaataggccgattgtatcggcattgcattccggtgtgtcgcaagtatttgcaatgtttatatcaaccatttgatgtctgttttgacaaacttctgaaacgttatagaattgttgccaacgaagaaatctgaaacgttctagaaaaaccggcgcacagcagcgtcggttgactggttttccgctccggcaaagcatgcccgagtattttctatggccagtttctgaaatgttacagaaaaagaagatgaggtccaagggaggtcatcatgacggcaattcaggaagccgttcccgccgcagcgggggcagcgcaaa

SEQ ID NO: 3276 - DNA, 8920 bp, Unknown
  R53_2m  MAG No. k141_10446
ccagtgcacgtactgggcgtatgaacgccgtaggcagatgggcattggcacgccgtcctatctcggcaatggcggcgactggtggcgcaacgccccctcgtacggcttgcgcgtggaccacaaccctcaggtcggtgcggcgctctccttcctgcctggtcaggatggtgccgacggtacctatggccatgttgccgtagtcgaagccgtgtatggcgacggcacattccagatctccgaaatgaactggggtggtccgtggaacatgcacaaccgcactttgaccaatttgggtcagtactggttcgtccactgaccggttggttcggccgatatatgcggttgaagggttcctcttgaagaggaaccctttttcgtattcgaggccggtccgtgatatcgtcggatgttgcgttgctacccacgagttgctactcacgagttattgcccacgaaaggaggagacatgcccaaggaaaccggtgagaaactcatcgtccagaacaagaaggcccggcatgactatgccatcgaagacaagtacgaggcagggctggccctgaccggcaccgaggtcaagtcgttgcgcgaaggccgcgcatcgctgtccgaggcgttcatctccatcgaccgccgtggcgagatgtggctggagggcgcgaacatccccgaatacctgaacggcacatggaacaaccatgcgcccaagcgcaagcgcaaactgctgctgcaccgactgcagatcaccaagctcgcccgcggcatcgaagccaagggatacacgattgtgccgctgagcctgtacttcaaggacggtcgcgtcaaggcggagatcgcactggcccgaggcaagaaggaattcgacaagcgccaggccctgcgcgaagagcaggacaagcgcgaagccctacgcgccatgcgctacgccaacatgcgccactagtcccgtcccttggctcccctccggaggggcgccaagggtaggatgtccgcgttgtggggcatttagcccacgattaacgcttccgtagcattgcactcctacgctctggaaccatctgggaaacatacccgcccagctgactatccggagagaggaaatccaatgtctctaagcaagggaatacaatccgctgcggccgccgccctgagcgcggccatgctgatcgccgtggcggcctgtggcacgactgacggcaccgacaccgcatccaagagcggcgattcatccaaggactcgtccagcacttcgattcaaggcttcgacaccagcagcatccagaaggacgacgagattgccgcactgctgcccgattccgtggccggcgacggcacgctgaccgtcggcgccgatacttcctatgccccggccgagttcctggccgaggacggcaagaccccggtcggctttgatgtcgacctgtccaaggcgctggccgcagtgttcggactgaaggaaaacaccgtctcctccacgttcgattcgattatcccgtccgtcggctccaagtacgacatcggcatctcctccttcaccgtgaccaaggaacgcatggaggctgtggacttcgtgacctacttcaaggccggttccacgttcgtggtgcagaagggcaacccgaacaaggtcgactcctcgaacctgtgcggcgtgaaggtggctgtgcagaccggtaccacccaggaagaggaagtcaacaaggataacgagcagtgcaaggcggacggtaaggatgccatcgacatccagtcctccaagctgcagaccgatgtgactaccgccgtggcttccggtaaggctgatatcttctacgccgatacgccggttgccggctacgccatcaagcagaccggtgatacgctcgaggccctcggcgaggacgttggtgtgacccctgaggccgtggccgtcaagaagggcgattccaagaccgccgaggccgtacagaaggccatccagaagctgatggatgatggcacgtacaagaagatcctcgacacgtggggcgtctcttccggcgccgtcgacaaggccgagatcaacccgtccgtcgagtagtttcggttactatgaagactcccgttgccctgcggcgggagtctttttgtatatgtatgcactgtagtgtataaatatgcttaaccgttgatcgttgccgttgaagcggcgtaagagagaagaagaaacgattatgcagtccaccaaactgaagtccattatggccattgcactgagctcggccatgctgttcgccaccgccgcttgcggcgcctccgacaaggccgatgccggtacggattccgccaagggctccgatgccgccaccatcaccagctacgatgtcagctccgtggagaaggatgacaccatcgccgcactgctgcctgaatccgtgaccaaggacggcaagctcaccatcggcaccaacccctcctacgccccggccgaattcctcgacgccgacggcaagacccagatcggctacgacatggatctcgcccgcgccatgggcaacatcttcggtctcgagaccgaaatcgtctcctccaacttcgatacgatcattccggccatcggctccaagtacgatctgggcatcgccgcgttcaccatcaccaaggaacgtatgcagtccgtggacttcgtctcctacttcaccgccggtatgggctacgcggtggccaaaggcaaccccaagaacgtgaacccggatgacctgtgcggtctgaacgtcgccgtcgagaccggcaccgtcgaggaagaggccatcaacaagaccgccaagcagtgcaaggcggacggcaagaaagacatcaccatccagtcctccaagcagcagaccgacgccaccaccgctgtggtgaccggcaaggccgacgtcttcttcgccgattccccggttgtcggctacgccatcgcccagaccgatggtcagctggaacagctcggcaaggacttcgatgaagtgccgaacgccatcgccatcaagaagggcgattcccagaccgccgaagccgtgcagaaggccatgcaaaagctcatggacgacggcacctacactaagattctccagcactggggcgtcgaatccggcgcactggacaaggccgaaatcaacccggccgtcgaatagtcgacaagctgtcgcgaaaattcgaatggggcgcactgtttgtaacacagtcgccccattcgtgcactaaggttcaacgctagttgcaacttgcagttcaggctgcctaacacatccaaggaaccagattatggcgaagaaagaagtcgacggtgaggggctgaacatccccaaccgcatcaaggcgttgccggtcaagcgccccggcccgattgtggccgcagtgatcgtggtactgctcgccgcgatgctcattcaaggcttgattaccaatccgcgactggattggcccaccgtctggaagtacctgttcaacgagaacgtgcttgaaggcattcgctataccttggagctcaccgtgatctccatggtcgtggcgatcatcctgtcggtgattcttgccatcatgcgcaaatccatcaatccggtgctgcgcggcgtcagctggttcttcatctggttcttccgcggcacgcctgtgtacacgcagctcattttctggggtctgttcgccgtgctgattcctaagatcagcctcggcattccgttcacctcggtggagttctggagcatcgactccaacgtggtggtcaccgcattcaacgccgcatggattggtctggccctgaacgaggccgcctacctgtccgaaatcgtgcgtgccggccttgaagccgtggaccccggccagaccgaggcggccaaggcgctgggcatgaaccgcacgctcatcatgcgccgcatcgtgctgccgcaggccatgcgcatcatcatcccgcccaccggcaacgagaccatcggcatgctgaagaccacctcgctggtcaccgccgtgccgttcactctcgaactgcagttcgccaccaacgccatcgccaaccgtatctacaagccgattccgctgcttctcgtggcctgcttctggtacctgctgatcacctccattctgatggttgtgcagtcccgcctcgaggcgcacttcggcaggggcttcgatgcccgaccggtgggcaccaagggcaagcagacgccattgccgggtaagaccgacggtgaaccgaaggatgacgtggacaagctcaaccagaccacatttgtcggattgaatgcataaggcgggagcgcgattatgactacgaatgacatcaccaactccgttccggtcgtgcgcaaggcggctgacggttccgtgattcctgccgtcgaggccgtgcaggtgcacaaggcgtttgggccgctgcatgtgctcaagggcatcgatctaaccgttatgcccggtactgtgaccgtgattctggggccctccggttccggcaagtccacgttcctgcgtctgatcaaccagctggaaaccctgaccggcggttccatcgaggtgtacggcgaactcatcggctacaagcacgtgaccaaaaacggccaggacatgctacagaccttggacgataaggagatcgccgcacagcgctctcgcctcggcatggtgttccagcgcttcaacctgttcccacacatgaccgcgctggagaacgtgatggaagccccgatccacgtgcagcaccagtccaagaaagccgcccgtgacctggccgtggccgagcttcagcgcgtcggtctgggcgatcgcatggactattacccctcccagctgtcgggtggtcagcagcagcgcgtggccattgcccgtgctctggccatgaagccggagatcatgctcttcgatgagccgacctccgcccttgaccccgaactggtgggcgaagtgctcaacgtcatgcgttccttggccaaggaaggcatgaccatggtgtgcgtgacccacgaaatcggcttcgcccgcgaagtcgccgaccagatcgtgttcatggacggcggcgtagtcgtagaaaagggcggccccgacatcatcgaccaccccaccgagcctaggtttaaggacttcctacagcacgtgctgtaggaaggctgttatattacctcagcactgtcgtgcttcggcgtcgcctacggggagcccactgggctccccgctttacggctccgcctacagcacgtgctgtaggaaggctcgttgttgcagctccaaaagcgtacgctgatgaactcagcgtacgcttttcacgaaggggcatgttccaatcctgcaaaggcggcgggttggattcgctttgcgcaataatcgtccgctaggctggtgagccatgtgtggaatcgttggatacgcgggaaatattgaaacggcatgcggcaagcctttggaggtctgcctgcaaggcctggaacgtctggaataccgaggctatgactcggccggtgtggcgctgaccgcgcccggcatggataaggtggtcgtgcgcaagaaggccggccgtttgaagaacctggtcgaagacatcgagcgcaagccgatgccgctcgccacggtgggcatcggccacacgcgctgggccaccaatggcgagccgagcgacgtgaatgcccacccgcacaccagcatggacggcaaggtggccatcatccataacggcatcatcgaaaacgcctctcagctgcgtttcgacctgcaagccgaaggctaccgattcgcctccgccaccgacactgaggtggccgctaagctgctcggcaagatcgtggacaagattatcgcggacgaaggcaagccagacttgttcaaggctgtgcgccgtatggcccgcatgcttgaaggcgcgttcaccattctggccaccgactgccgccagccggacatcgtggtcggagcccgccatgattcgccactggtcgtgggccttggcgagggggagaacttcctcggttccgacgtcgccgcattcgtggcctacaccaagcgcgccatggaagtcgaccaggatcaggccgtatgcgtgtccgccgacaaggtcatcgtcgccgatttcaacggcaacgtggtcgaaaacccgaagacctacaccgtggattgggatgcttcggccgccgaaaagggcggctgggattcctttatggacaaggagattcacgaagaccctgccgcagtgcagcgcaccctgcttggccgcttcgacacgaatggcgacatcacccttgatgaagtgcgtatcgacgaacacgacttcaaggccatcgacaaaatcatcgtcgtggcctgtggcaccgccagctacgccggccaggtagccaaatacgccatcgaacactgggtgcgtatccccgtggaaatcgaactcgcgcacgaattccgttaccgtgacccgattctgaccccgcgtacgctcgtggtggccatttctcagtccggcgaaaccatggatacgctgatggccctgcgccacgcgcgcgaacaggggtccaaggtgctggccatctgcaacacgcagggtgcctccattccgcgcgaatccgacgccgtgctctacacacacgccggcccggaagtcgccgtggcatccaccaaggcgttcgtggcgcagattaccgccgcctacctgctgggcctgtatctggcgcaggtcaagggcgcgatgttccgcgatgagattcatcagatgctcgactccctgaaagacatgccgcgcaagattcagtgggtgctcgacacccagcccaagaccatccaggcggccgccgagcgcatggtgaacgccaactccttcttgttcctcggccgccacgtgggctacccggtggcgcttgagggcgcgttgaagctcaaggaaatcgcctacacgttcaccgagggcttcgcggccggcgagctcaagcatggaccgatcgcgctggtggacgagggtgagcccgtggtgttcatcgtgccgccgcagcgcggccgcaatgtgttgcacgccaaggtgatctctggtatcgaggaggtcaaggctcgtggcgcgtacatcatcgccgtggccgagcagggcgacccggatgtggaacggtacgctgacgtggtgttctggcgccccgcctgcccaacgctgatgagcccgctggttgacgtggtgccgctgcagctgttcgccatggacatggcaaagctcaagggctacgacgtggacaagccccgcaacctcgccaagtccgtgaccgttgagtaagccacatcggtatgtgattgacgagcctcatattccgtttgagatggacgtgctgtatgaggacgagcggatcatcgtggtggacaagccgcattttctggccaccatgccacgcggcatgtggtatcggcagaccgcgctgatccgattgcgtgagcggctgggggagccggacatcacgccagcgcaccgattggaccgcatgaccgccggcgtattggtgttcgtgcgggattcggcctgccgcggcgcgtatcagatgctgttccagaaccggcaggccgtcaagatctatgaatgcctggcaccctgccggccgatcagcggcccgcgattcggcacgatcatgcaggtcgaaccgccacgcccgttcccattgctgcgccgatcgcacatcaccaaggaacacggcacgatggccgcattcgaggaaccgggtttggccaacgccgaaaccctcatcgagcgcggcgacctctgtttccctcccgctggcgggaggtggcgcgaagcgccggagggtggtccccatccgggaaatcaccccatctgccgctacacactccacccgcgcaccggcaaaacccaccaattgcgcgtccacatgaattcgctcggcctgcccatcgtgggcgacgacttctacccgcgcatccagacacgcccctacgacgatttcagccagccgctgcaattagtggcgcgtgtgctacgattcaccgatccaataacaggcgagaagcgcgaattcgtttcccgtgtgccgcttaagatctgatttcttagggggatggcgagaccaatccccgcccgtccgaatcactgtccctttcgactggccatccagctcattgcatcgtcgtacaccatcatgatgcgcttgcgatagctatcgatgaattcctgcgcaccaatgctcgcgataacgtcgtgagcgggttgcacggtgctgtcgaatgcctccggcagcctatccaccaaggtgtggaatcgtaaaatcacggattcctcatctaatcccatccgctgtgcgaatcgttccagatgtttgcggcgtaattgaagaagatctcggcgtccgccgatgttcatcgccaaagtggcatttatgatctgcttgccatgccccaaataagggaacaccgaagcaaggtcatagagcggggcaagccgcacggacgcgccatcgagcaatagcgagtagttcttggcgtggctgtctgttgccccgacgagataactggcgaggatgccgtcggtgaaggctcggatattgctttcggcctgaccgggcagaccgtgcttgcgcaacatttccgcatatgcattggacgttgggccgttgtgttcctcgtatttcagcgatgagggaatgcccagcgcttgggtaaagtcttcttggtgcagggccgtcaccgtaccattggcggacactatacggtcataccgctcgctgatgatggctgggaccccatcaaagatgtgaaaagaggtgtgggccacgggtattcccatcgcctccacaatgcgcatggtgatgtgttcgttgaatgcttggtgtggaagggtcggtatgccgggcttgatgatatgagtcgtccgcgcgattccagtggtggagaaccatgatccattgcggttcctcagtgcgatcttgccctgctgtcccgcgaccgaccaatgctcgtctac

SEQ ID NO: 3277 - DNA, 4876 bp, Unknown
  R53_2m  MAG No. k141_10518
gatccggatgcgttcctgtgccgacaagtgggaatacactttcctcatgggcgcaacaccttctccagttagaacctgaacacttccaaccatagagcgggtgttgcgcttctatctagaacccgggttcggcccggggcattcaccgacgaactgctagaattagccgacgaacaggggcgttgcacttctaaatagacagcgtggcgtgcatgttgctcgcttaggtatgataacgttgtcttttgagcgggattgttatccactgttgatgagcgaggttgccatggcaaaagcgagcattcaagcggtagcgaaagaggctggcgtatccgtgtcaacggtgtcacgaaccttcgccaagccgaatcttgtgctgccgaagacacgtgaccgagtcctcgccgccgcacgcaaactcgacttccaggtctcccggtcggcggccgcgttgaaatccggacaatcgttccgcatcgcactcctgcatgccgataccattgccgtctggttcaatgccaatgtcttccgcgggctcaattccgtattcggcccggccggatacgacatctccgtatacggcctgtcgaacgcgcgggaacggcatgatttcttcactgaactgccggttcgtcgcaatgtggacgcggtcatcgtctgctcgttcgacatcgacccggatgaggtcagtcgtctgaaagacgtgaacgtgccgctcatcggcatcaacaccccgtccaccatcggacttgacggcgcggtgtgcattgacgacaagctgggcatgcatacggctttcgaacacctgatttcgctcggccatcgcaacatcgcctacgtgtacggcgcgccggatgacaccagtcaactgcgcttcagtgcggaaaaccgactgcaaggccttatcgatgccgctgcggcccatcctgacgtcacgcttgagcagattcgctgctccggccatgaggatacgaccggcgcggcgctcgcccagctgaccaccatgtcgcccacgcccaccgcagtctgcttccagaccgacgaaatggcgattccggtgctgtaccggttgccgcaatatgggctgcgcgtgccgcgtgacctgtcagtaattggcttcgacgatatccccttcagcgccaaaatgggcctgaccacattgcggcaacgcccgaatgacctaggcgccattgccgcgcgcaaagcgcttgccgcgatggaaggacccctgtccgaaccgcgatttgaaaccgtggccccgcagctgatgctgcgcgacaccacggccatcgccgcatgaatgcccccgatgcgtgtcgccgtcggtaacagtatatccgcatgaaaaggaccatgacggagcgtatcgcgatgtctgaggcccgcacggcggcgatggttcatggatacactaacaacaacgtggaaaataacacgagcaaaggagcacaccaatgtccacctttccacagctggccacccatccgggcatgaacccggccgcggtcatccaaggcgaccgttggcgcatcggcatcatcaccgaatcgctcgtccgcctcgaatggcaggacaacggcaagttcgaagaccacgccacccaaatgatcgtcaatcgcgattggttgtcggatgacgcgaacggtgcggatggcgcgaaccgtgcggacggcacttcaaacccgccgaagttcacgaagaccgagcgcgacgggctgctcatcatcgatacgccggcgctgcgcctcacctacgacatgcagccgttcagtaaggaaggtctgagcatcgtcgtcaaaggcgtggcgaattcccagatgaatacgtggcactacggcgaagcccaggacggcaacctgcgcggcaccgcgcgtacgctggacgcggtcgacggtgagatcgaactggggctcggcgtgatctcccgcgacggctgggccgtgctcgacgattccgcatcaaacgtgatcgtcgaaggcgccgaagccgccaccgtcaagggcgaggccaacccattcggcatgtgggtcattccgcgcgagcaccccggcaaggatctgtatgtcttcggatacggccatcggtacatcgaagccgtgcaggacttctacaagctcaccggcccgacgccgctactgccgcgcttcgcgctcggcaactggtggagccgctaccaccagtacacggaagccgagtatctggagcttgtcgatcgcttcgagcaggaaggcctgccgttcaccacggccgtcatcgacatggactggcatctggtcgacaatgtcgacccgaagtatggatccggatggaccggctacacgtggaaccgtgaattcttccccgaccccgagcgattccagcgcattctgcacgagcatggactgcgcacgacgctcaacgtccacccgcgcgacggcgttcgagcatttgaagacggctatgccaaagtcgccgaacacatgggcattgacccggcgggcggcgagccggtcgagttcgatctgaccagtccgcgattcatggaagcgtacttcgacctgcaccatgggctcgaagccctgggcaccgatttctggtggctggactggcagcagggcggcgtgacccgccagaagggtcttgacccgctgtggatgctgaaccacatgcattatctcgactccgcccgtgacgggcgctggccgctcacgttctcgcgatatgccggcccgggctcgcaccgttatccggtcgggttctccggcgacacagtcgtgacgtggaagtcgctgaagttccagccgtacttcacggctactgcgtcgaacatcggctacggctggtggagtcatgatatcggcggccacatgttcggctaccgcgacgaggagctggaggcccgctggtatcagcttggcgcgttcagcccgatcaaccgtctgcattcgaccgattcgccgtttaacggcaaggaaccgtggaacttccgtcccgagacggaatgctcgatggatgacgcgctgcgtctgcgccacgaactgctgccgtatctgtatacgatgaactggcgtgccgccgccgagggccgtccgctggtcgagccgatgtactggcagtcgccggaaaatgtcaccgcgtacggggtggagcatgagttccgcttcggcaccgagctgatcgtcgcgccgatcgtgacgccgtccgaccgcaacgcgcagctggcgaaaaccgacgtgtggctgccgcagggtacatggttcgacttcttcaccggacggcggtacgaggcgggctctgccgaaggccgcaagttcgaggcgtggcgtgggctcgatggcattccggtcttcgcgaaggccggcggcatcgtgccgttgcagccgctggacgaggagctcaacggcagcctcaactccgtggataatccgcgctatctggaggttgccgtgttcccgggcgcgaacggcgcgttcgacctcaaggaggacgatggcaccaaccaggcgcagccgtcggattccgcgctcgcggtgacgcatatggacttccgctgggaggccgatggtgcggtgaacgcgttcgagattgccccggtggccggcaatgtggcggcggtgccgcagcagcgcacgtggacggtgacgttcaccggtgtggcaccggtcgccgttgacgagttgattgtgacggttggtggcgctgaggtcgtgccggatgtgtcgtacgacaccgaggcgctgagcctgtccgtcacggttgcggatgcgccggtcacgcaggccgtgtcgattcacgcgacgaacggactgcggtacgccgacgatccggcgattgaggatgcgttcactgtgctgtacaacgcacagatcgactatctggccaaggaacgtgcctaccggctcatcaaggctgacggcgctcgtgcgctcaatgcgctgcatacgctggaaagcaccaagagcagctatcccggccacgagttcgacgattcccacatgcccgaatccgtgatccaggccatcgccgagccgctgctgcgcgggctctgacgttctgttcggataccggcgcgtcctacgccagtagttcgttgatatcgtttccggctctccttgtcaggagagccggcccgcgaagcggggctgaggggtagcgaatttgtcaacgaactgctgacgcagaacgctagctgcctattgcgctggtggctgctgagcgcaaagaaccgcaataatcggatgctctgggttcttagcgacgcaaattctcggaataatcccattgcgcgagaatttcgtgcgctggcgggctctcagtgacgtaaattctcgacgtagccattttcctctagaatttccgtcactgagaggacttgcaagtcacggtgcgcagcggcggtaacccataccccaatacggaatatgctggtgtgctcgtaagcaacgtgctcacgagcacaccagcatgctaagcggcgtattcccgagtgataatcaggacgctaaatcccgattaccacttcaatgccggtcgcttcgaatcagtgcgtggtcttgtattccgacgcccaaccatccacgaaggcagacgcgaccgtatcccagtcgccggtgccctgtgcgtactcgagcatcgcattgccgagactcatcgcccattgtgcgctcggcaaaggatagatcacgatatcgtaattgcccttgactgcgtaggcgtcgttggcgcgatgaattggattcgtggtcttgtatccgttttctgcatatgacttgaacggtgtctcgaatcccatctcgtcggtgaccaacttgcgtgcatcatcgttttgcaggatgtagtccaagaactgacgggtcgcctgctgatccttttcggaagcgtccttgttcatcgcaaa

SEQ ID NO: 3278 - DNA, 6406 bp, Unknown
  R53_2m  MAG No. k141_10601
agattggcgaccacggctttagcagcattaatgccatggatatcatccgcaaaacatccttcagggccgacttcttcgatctggctgacaaaccgcggcttgaacaataccttgccatgatcttccagtatcttttccaaacgttccatacttgccgtttgctcaggatcgaagaacggaccggccacatagaagtcatactgtttgtcttcactcatggtctctagtcatagcgcagccgcgtcggacgccagccgttattttcactgtatggacaaggggtcgtatcgtgaacattactacgggataaccgtcaatgactacgtacgttgcccccgatcagcacactccgccactttcgccccctcccgtatcgtcgagcacgcgaaccaagccgaccaaatagccgccatcccatgcgctgattaccgtatccgaatgctgcaatgccttgaacaaccgttcgggccactgcgccgattcccaaccaaccgacttgaacagcgcctcaacctgttcgacagtaaaccgcttctcttccgtgtattcgatagccatggaccctcacgataaccgtgaagccccacatgtctttgcatagtttcacatgacgggatgatggatggtggaacctatacgtttacacatgcctaatgcccatggctcatcaccgatgaatagaggctgagataccgtcatgtttccgaagccaagtgcccgagatcggattcgaaccgacgacacccgctttaggagagcggtgctctatccactgagctactcgggcaacgacgtttcattgtacacggccgcacgcccagtcgcatcatgttcgcgtggcagcctacataagacgcatggcagtctgtgtaagctacctggcagaacccgccaccaaggcatggccggttttcgtgctggtttggtgcgaactgctcttgcgcacggcgaaaagacactgaaagacaagccgcacacggtacagtggcaaatcgcacgaaaagcaaggtaacagtaaacaagccggaggaaagggcagcatggcaaaggcacggagtactaccacaggtgcaagcgtacgagctcgcgccgctgccaagccacgctctgccaaagccacggcacgcccagtatccaagtctgccgtgaagccacacaaacggcatcgtctgcttggttttctcgccacgatgttcgcacttcttgcccttgccggcactgccgcccgcgcgctgcctgccgatttacaggaactgccatttgtgccgattgtggtatcggcaacgccctggttcacgttgcttggcctgattgccctactgttggccatcgtgtcgcggcgtatccttgccgcactaatcgccatcgccgcaatcgcatgcaatggctattggcaatatccgttcttctactcgaccgacccactcccccaagccgcgcagaacgccgtggctgcggcctcccccaacaccagcgatgcctacgcgcgcgtcatgaccttcaatgtatacaaggggcaggccgacccacaagccatcgtcgaactagtccgcgatcagcgcgtcgaagtgctcgctttgcaggagaccaccgaggatttcgtcaaaaaactcaacgaggctggcattgagcactatctgccgtatgcgcaggtctcatcgtctgacggcgtattcggtaacggcctctggtcggccacgccacttgccgatccggccgacgatgacgtgaattccagcgcctcattcatgcccggcggcacggtggatatgggtggtcagcagattcgattcgtatccgtgcacaccaccgctcccgtacccggctattggcggcagtggaagcgatcgctggatgagttgggtccgatgcgcgggcatacggatacacggtatattttcatgggcgatttcaatgccacttacgatcacacgccattccgtgattttcttggcgaccggttcgtggataccgcacgtgaatccggacatgggtttacgttttcgtggcctacgaaccgcgtgtatatgccgatgttcgccggtattgaccacgtggtgcttgatcagggcatgaaggccgggcaatgcaaggtggtcaaagtcgagggctccgatcatgcggcgttgttggctaccgtggcggttgggtgatttcgtattcctcggccagccgcatacactgggacacggcttccagaatcgcctcgatgccggacttcttgattgagccgtcatcctttaaatacttcatcaggcgcactgtggatttggtgctggcctcggggtcagggcgagcgccgggagcggcgtcgacgataagcatgtggatagtgttcgaaccgatatcaagcacaccaagtcgcgtggtgcgcgaacgcagattgaccatgatccctattcccgaccttacctaacccgtgatggccgaacaacgggccgaccatcgcaatcagccagccgtgcgccaccatggcgagtcgttcggccggcaaccaacaccgcgaggccagccgaacatcacacaaactcgactactgtacaacaatcacaccggctgccgcgccgttcacaacgattcgacgaacgttccgagacgttccagcccctcggtcagggcctcacgtgaggcggcatagctcaggcgcacatgcgtatccgctgtggccgcaccgaagtcgcggccaggagtcagagccacatgggcttcatccagcgcgcgttcgcagaacgtccaggcatccagaccagtacgggagatgttgaagtaggcgtagaacgcgccattcggctccacctcaaccggcaaaccgatgcgcttgagcccgtcaatcacaatgcggcgacgggcaagcaattcctgacgacgagcttcacattcggccaaactctccggcgtaaaacaggcgagcgccgcatgctgggtgggcgtgtgggcgcacaggtagtagttggtggccaggtcgtcgaccgcttccagcacggtggggtcgtcgggcagaatagcccagccgagacgccagccggtcatgccgaagaacttggagaagctgttgcacacgatggcaccgggatcgcaggccagtacggacttgacttcggtgccgtccggctcacggtcggccaaatcaaggtaggtttcgtccacgatgcgccatgcgccgcggctggcggccagcttgcacaccttgtccaatacgttgaagtcgatggtggtgccggtggggttggacggcgacgtgatcattacggccttggtcttgcttgtccagtactggctgcacaggtcggcggtcaggtggaagcgggtggcggccgaggtcggaacgtcgatgacccgcccctcaaaggagcgcacaagttcgcggttgcacgggtaggaggggtcggccacaatcacatcgtcaccggggtccacggtcagcgcggtggccaacagcagggcggccgaaccgccggcggtcacgcagatacgcttggggtcgatgtcaaggtcatgacgctcgcggtagaagtcggcgatggcttgacgcagttcaggtaggcccatggcggcggtgtacggcagggcccggccgtcgtactgttcgcgcatggcgtcgcgtacggcgggcggcgcgccgaaatcgggctcgccaaggcttaatttgatgacgctgataccttgggcgatcatcttgtctgcttgttcgccgaataccatggcacggaagggattggcctcacgcgctcggcgggacatgactggagacgcggccggagattggggctgctgctgcgctgcttcgttttccatatttcggttctatccgcctcacgggacaaggtttcttcttctataatcactgtaggtcgattgagtgtaccaacccgtattcaaggaggaataatgagtcgattcaatggcaaacgcgccgagttcgaggccagcggcgaaaagatcaacgtcgcgattctgggtgcgggccgcatagctcacaccatggccgacaccctgacccagatggctgaaggttcactgtattcctcatggattcacccgtatgcggtagcggcccgtgatattacgcgcgcgcaggcttttgccgaccaatggcattttgacaaggcttatggatcgtatgaggagttgacggcggacccggatgtggatctggtgtatatcgccaccccgcacagtctgcacgccgaacaggcgatcctgtgtatgaaagccggcaagaacgtgctggtggagaagtcgttcaccgcgaacgccgggcaggcgcgtgaggcgctggccgtggccgaggaaaccggcatgctgtgcacggaggccatctggacgcgctacatgcccagccgcaagctcatcaacgaagttatcgagtccggcgagatcggcgaggtgaaagcggcgagcgccaacctgtgctatccggtgtccggcaaggcacgtatgaccgatccggcctgtgccggtggcgcgctgctcgatgtgggcgtgtatccgctgaacttcctggatatggcgatcggtgccgaccatggccgcacgctggatcatttcgatacgtcgatgatggccgccgaaaccggtgtggatgcacagaattccaccacgttgtattacgatgatggcacgatggccgtgtccaccagttcgatgctggtttcctccgatcgcggcggctacgtgtggggcaccgaagggtatttggtggtcaccaatatcaacaatcccgagtccatcgatatctacaacaacgatcacaagcccgtgcgcagtgttgcggtgccgtcgcagttgaccggttatgagtatgaggtggccgatgcagccaacgcgctgctggatggcaagatcgaatgcgaggcgatgccgcacgccgacaccatccgcatcatggagctgatggatgcgattcgcgaccgttggggcctgaagttcccgtttgaggtctgatttcagctcccctccagaggggagctgaaattattccgctgaatctgcatctccttcaacaatctgctcatacagccgtgcgaggcgttcgtcacgcacggctttcgttaattcgcactcccatacggtaattacacgccagccggcggcctccagttcagcccgctgcgcgatgtctcgattgtgattgcgcagtagcttcgtctgccagaattccacattcgatttcggcatcgaatgtttggaacagccttcatgcatatgccagaaacagccgttgatgaacacgatggtgtggtatttcggcagtactacatccgggtggccggggtaacgcttgtcgttcttgcggaatcgcaaacccttgcgaaacagatagctgcgtaccagcacctcgattttggtgtctttgccacgaatatgcgacatcgtgtacgaacgggtgccccgctcatacttctccactagctgtttcttgcgattcacgcactccagactaccgtgacgttgcggcgaggatgaaagcctgaacgaacaatcacccatcttgcccgtccgtgtctcttatcgcgggcaatgatcatctgccggtcgagactgcacgattagaccgaatcaaatggatgacatgatgattcgtagggccacggcggccgatattccccaaatcgacgaactgctgcggcaggtgctcgaagtgcatcatgccggccgaccggatctgttcaaaggcggtgccaagaaatacacggacgaggaattgaaggcgattctggccaacgatcagacccctgtgttcgtggcggttgcaccatctgccaatgacggcactgacgtcgaacataacgccgactcccccgccaccgaccaagtgcaatggcatagcgccaagcgacgtctgctttgcgagatttgcgagagatgaatgcgataccagcgttcatggctatgctccttaatccaatatcaatggatgaacctgcactgccccgtatgtcaccatcataatatatcgaatatcaatataaaaatatcgaaaatcactttcaccattcacccacacacatcgcgacgtgatcgaccgttcttgccttgctcgcagcatccacgaccaacacgggaaagtcactttaaaaaagcactttatcaatgtggataactcggaagctagaaccacatacccccgttcagcttgccaatcagaaacctcatcccataccgtcagatgcacccgcacgcaacgacgcgtcagacaacagaaagaaggaccaatgaacatctctacgtttacccacaactcccacccggcaattcggcatacgcattttgtctagtgcgagattgagagttatgatgacacgaagaaaactcatcatcaagaaacttcggcaagcggcaaagcagcgagggctcgatttctatttgttacggcaaggcagcagacatgaggtttactgcctgg

SEQ ID NO: 3279 - DNA, 7146 bp, Unknown
  R53_2m  MAG No. k141_10631
agcataggcacagtatcggcgcgaccatgcgcgcgaccgggctggaccgccagaacgcggccacgtggccgatcaggccggtaaccgcgtggcgcttgtcgtttccggtttttgcggtcatgcgattctccttccctgggtgctgccccatccgtgttgaagcgtatcgcatgtggcctgtgctgtatggcgtgtatgcggttagatgaacttccaaagaagttttccgttgtcagtcggattcctactggttgatgaacatgaggaagatgagcatgccgccggcggcagtcaggcctgcggataggagtatcgcgattgtactgacgattctgtgtactcccgcctgttcgggatagatgacgatcgcgatgacgagcgaagcgatgaggcatacgaagtcgatgatgacgaggatgttcctgacccagcccgtcgtgtagaggtggatgccgagcagctggggcacgagcgtgcacagaaggggaaggacggccaatgcgaggctggcgcagccgccccatgtccgcccgccgtccggcggtgccggcgtatatgccggttgctggtttgggtattgggatgtgtttgccatggtcattgctccttggatgtgaggttcacggtgccggtgaattggtcgccggtgacgtagatgtagaagctggtgcctgtgacgttgtaggtctggtcgattttgccgttcgtggcgggcacgggtcgtttcgtgtcgctgccgttggtcacgaggattctgccggtgccggatgtgcctgtgatggtgccgttcaggtggatgctggccttcttgccggtgccgccgaatacggcctcctcgccggtgaacttgctgtagtcggccttgtagccgcccgtgtaggagtcgccgtcttgggtgcgtatgccttggaggttcctgtctccggccacgccgatgccggtcgagcagccgatgaggatgatcgcggcgagggcggcgatcagcacggcgatgacgcggcgcggcaggcgtatggactgttcgctgttgtgtggcgcgttgtgttgttcgtcgtgtcgttcgttgtgttggctggtggtgtgcatgatgaagcctttccatggtgttgggtggcgggctcccgcaggtgaggggagcccgtggacggttgctcagacggcttgtttggcgagccggtggaagatcagggcgctgatggcggtccagatggcggcggcggtcgtggaggcgagcatggatgccgggctggcgatgttcgcgaggtcgcgggcggcggaggcgctggtgatcagggcgagcggatacggcccggcgatggccggggcggccaggctcagcgcgcatccgccgatggtcaggaccatcatcacgctcatcgtgcccgcgaacgattcggccttcgcgctcacggcctgtgtgagcgtcatgatcgcccataccgacagggtcagcgggataccgcgcagcaggaacgggccgagctgcgcgaggtcgaatccggcggcgaagcgtccgacgaggatgaactctgcctcgaacacgaggacggtcagcgccgaagccgcgagcccgtgcagcatcttgccggcgatcgccgcgttcacggtgccggcggcgttcagccgctgccagttgcggcctcgatgctcgttggcttcgacctgcgcggcgaacgcggccacaagcaccggcatgaacaccatgctcggcaggaggatcgcctgaccccagatcgcggcccaggtcacgccctgcctggcgaactccgcctggtagccggtgtactggctccacccgttgaacatgccgatcgcgtcgaacaagacggtcacgatccagtaccacaggttgacggccttgcgcgtctcccagaggaacgccgcccacccggacggcctgcggcgtcccgccgcatgcgcgcggggcatcgcggcatggctcgggccggcagctggattggcggccgggttgattgccggattggttgccgggttcactgcgtttgcgtgtgtcatcgtcttgactccttcaccttgaccacgaccatgctgaccagcgtccagccgaggaacgccatggccgcggaggccacggccatccacgggcgcgcggcgagcagcatcgtggcgttgccgcccgcatccacggatctgacgaacgggctcgcggccgaactcaggccggccgggaacagccagccaagcgcgggtctgttcatcgcacccaggccggagcccagcacgccggcgatgacgcccagacccaggccgatggcctgcttgtctatcatcatcgagaacatcagctggaccgcgctcgtggccgtcgcggacaggaagccggtcagggccggcacccacaccagcgcggcgaacgagccggccaccgtgaagccaagggctttcgccgcaatcggcacccacagcaacgggatcaggaagcaaagccccacgccggtgccggcgacgatgagcttgcccacgaaccgggccgcgtccgactggccgaacgacagccatgtgaggttcatgcgctccgaggtctccagcacgacgatgcggctggtcaacagggccgccagaatcggggccagcaggctcacgacctgatagacctcgccatcggccaacgcggccgacctcaacgccgggacgggactgccggcgcgtttcatgaacgccatgcccgcccacgccgaaaccagcagcatcatgcccagcagcatccaccagaacgacgagccccgcaccttcaacaactccagacgcgccagcgtgaacgggctgccggtcttcgcgcgggggcgcggcggacggcgccccgtcgccgcgaacactgccgcgccgctcattgtgcgcctccgtccgccgccgcgaacgccgcccgacccgcagcctgccggatcggcaacggacgacgcggggatgcgtgcgcggatgcgcgtgcggtgtcggaatccatggcattttgcgcctgatgaggcgtgggctcgcggctctgcgggctttcgatcagttcgaggaacgcctgctccagcgtcttgcgctcggaggcgacgcgatagaccgcgacgccctggccgacgagctgcgtgatcagggtgccgatccgctggtccggcagttccggcaggcgcagcacgccgccatccctgcccggcagccaccggtagtcgatccggtccgagcccagcatcgccgccgcgagcttcgggtcggagacacgcaaatcgatgtgcccctcctcgcgcagactgtcgagcgaaccctgatacaacaggcggccggccgcgatgacgcccacgaccggcgccatcttctcgatctcggaaaggatatgcgagctgatgatcaccgtgatgccccgttcgcggctcagacccatgatcatctcgcgcacctcgaccacggcctccgcgtccagcccgttcgtcggctcgtccagcaacaggagctccggctgcgagatcaacgccatcgcgatgcccagccgctgcttcatccccagcgagtagtccctcgccttcttgccctcatggccagccagaccgacctgccgcaaaatcgcgggcgcggccgaacccggcagattcaggtaatcggccaccatacggcaattatctagaccgctcaaccccgggtagaagctcggcccctcgatcatcgaaccgacccggcccgcctgcaacctgtgccggccacccaccttctcccccaacatccacatatcgccgctcgtggccgaggccaacccaagcaacagcttcatcgtcgtggacttgcccgcaccattcggccccagcaaaccatacacgccatgcgccggcacgttcagattcaacccgttcaccgcgagaaaatccccataccgcttcaccagcccgcgcgtcagcaccgcactcgacgccggatcagccggctgcgctgtatattgtattgtcattatcgtcctccaaaatccgtcaccataccgtggcatttacaatgaaaactcgttacgcgcgatacctcaatgaatgagagcggatgtgtactctcgggaggacattccttctgagtttgcaccgacatgcgacggaggtagggattcgaggctgctgtcaaatttttcctacgtgcgctggtatagggctttcgtccatgtccgtggccgttatccacaggccgtcctgcgtaagcccgtagcgttcgcgcagcatgtcgaacgtgtgcaggccctcgcgcatcgctgcccggtattcgtcgtcgtccgccgcgctgttgaggttggcggcgatgacgaacacttcggatacgaggcgttccatgtcgtgcgtggacagattctccgggtgtctttctcgtccgtcatcgaggaagggcgggcggttctccatcgcggcgcgccattcctggacggcgaggctgcggcttctggcatcgtccgcccagtcgtcgcgcagtcgtttcaatctcatgtcgtcgccgtacccgttccgcgccttccattcggcccattgacgccattgcccgtactgccagctgacgcgcgtgccggtatcggagcgtgcgagcccgaccagttcggggcgcgatttctccatccgcctgcatgatctctgcgcgttgatccggtcgtggtacgggttgatccacccgtcgtcggcggcgagctgcaccatgatgtgcacgtggtcgttgccgttggcggacagtccgtggcggaccgcgaccggttgcccgacacgatgctgtatttcgagtcgtatgacggtcggaaccatgtggccgtcagtgccgcgctcatggaggatgatgacgaggaggcgctgcgcggattcctcgccggggaatgcgggactcagggcgaggagctcgcggatcgggtcacagcggactggcagggtgggcgctatcgcagcgccgtgcccgcgttgcgtgacgcgggggtggatttcacgcttgatacccggctcgatatccgctcctggtcggacgagcccatggaacaggggcttgaagcatccggtctcaatggcgccaaggcgcgtgtggaacaggccatgagattgatcgagcaggccggggaatgcctgcgaagcgccgatgccatcgccttggacattgacccgcattacctcgcggccgctttcacgggcaagactgtcagcctgtgcgaccagctcgaacaggcgacgaagcagaccgcagcagaaatcgaggaaatgcgtctccaggagccatccatgggatcatcggacggcaacgatgattccatgtcctttttctctgtataggctagaataatcgagtgttaaggaggcctgcaatgtcgaatctggactataaaccgcctgagccgacaaaggcgcaactggagtacgcgcgttacctcagccgtttccaagcgccgcgtggacgccggactcttttcgcccgcaccgaatcggatatcgcggctgctttccgggaagaggcggcgaaccgttcctggaacgccggtgatctcgcctcccgggccggcatcgacccccggtccgccgatgatttgctccagcggggcgaagctccgattgaagcggtgttccccgcagccgatgcgctgggaatagacatagccgcgttgccgctttccagtctcgggagcgcccggtgagggagctgcacgcctggatgggcgattctcctgttggtgtgtttctggaggattccgaggggaatgtttccctcgaatacgccaagggtgtggatatgcccataagcctttccctccctcttgacgggaaatgggcaaggaaagcccctggcaggtttctggagaactttctcccatgtacgacgttttgaccacgaccttctggccttgggtgtccgccgagctgcccatgcgcatcggcggcgtcaccggtgccagggatgtgacgccccgtcattgggagaagctggcattggaaaacgacctcgatcccgagcgggtcgtcggccaggccaggcgcatggccggtctggtcctttccaacatcgaggaggcgtactcggatgtggagcctcgtatccgtgaccggatcctcatgctggtggatagggcgaacacgaaaatcgatccgatctacgattccgtatccatgactgatgatccgatgggcatgttgtccggcctgatgccttccgccgacgagggcagacgcctctgatatcggtgccggtatgcgccgacatgcttctttgcgcatgtcggcgcataccttttttgtctatcctattcttgcggtgctgagtgagtacgtggcgacgccgtttgcgccgacgatttggttcgtaggcatggtcaatctcatgtcggtgcgggtggtggattccacggcgttgcgcatctcgtcctgcacgagtccgccgggttgcagcgggcgagcccgcgtttcatgccccattggtagaagaccttgacgcagctgcgcactccgcgtctgccttcggtgcccatgccggcaagataaaatatgaggtcgtcttcggtcacgtccgtgatgctcttgttcacgattttggagaaacggacgatctggtaccatcgggttctcaaggtctcttccgtacggcctatggcttccatccagtcgatccacagttcgatggattccttccaatcctcgcgcggctcgacatgctcgcagcttttcctgttcgagttccagtacttcatggcagctccttcgcatagaaaaaggaagtgacgtcttcgtcacttcccagaaaatgctatttgcgattgcatggagcctagccaatgttatcgcggacggctgaagctcttcggaaaaccgggtgcatcgagaggaattgtcgagacacgccgatttgaaggacaagcaaagcaggtgtattctctactcctgttgcaaaaagccctacggctgcaagccagaaccgtatatcggacggttactggttcaagcccagtcgcaggagctcacctgaacgggtaactccggacgggatgaaaattgaatattcctgcgtagctcagttggcagagcatccgactgttaatcggacggtcactggttcaagcccagtcgcaggagctcacctgaacgggtaactccggacgggatgaaaattgaatattcctgcgtagctcagttggcagagcatccgactgttaat

SEQ ID NO: 3280 - DNA, 3778 bp, Unknown
  R53_2m  MAG No. k141_10710
ccagccccgccccggatcaggtcggcgacgacccgcatgaaaccgtcatcgtaatgacgcctgcgatccctacacatgagaaaccgcacctccgatcatcgaatctgaattacttcagtccaacaatcggggtgcggttcaaacccccggggtttcttattatgttgagaatggttggatctgccgtcagttcgcagccatacgccgcgcacgccgttcgcgcagcgaacgcagggaaataatgtctcgcgtacgaccggcaccgtcgcccttgacgccgaagaacaccataagcaccatcgcgaagcacagcagcgcggagaatcgcagcgcccactggatgccgaagatggaagccgcaacggctgagactcccgcctgatgcctccatgcggcgaacgtttccataagaattaccagcacaggtgcacccacggcgcccgcgatctgccgcgcggtgttcgtgaccgacgatccggcagacacctcatccggcccgttcaggcagttcagcgaccatgtggtaatcggcataagcaggaatcccatgccgatctggcgcgtgaactggcagatcgacacccaccaaatccatgtatccatagacaccaaagacatgccgatcgtaccgacggtcagcacaatcgagccgcacaacgccacgggccgcgcgccgaaacgatccatcgcacgaccgccaaagaattgggaaacacactggcctatggcgcccggcagcatgatcaggccgctcatggtggccgagtaaccacggtcggtctggatgtacagcggcatgatgaccagaatcgagctgaacgcaaagaacgccaaagacgccgtgatggtgccgacggtaaaggaccgattcttcaacacctcaaggtccagcagcggaggctgggggagtgcggccggctccgctcccgactgcgccgccttggcttcgcgataccgccgaccgtgacgcaggttgcgcatcacaaaccacacgatgccgaccagtcccacaaccatcggcccccacgtgaccggtgccgcaaatccataggtctccgaattggtgaagccgaacatcagcccgccaaagccaatcaccgacaggctcaccgagaaaaagtccgcgcgggcagacgggtcatgcgagccgaaattatgtagtccgaacatggccgccagcagcgagaccacgccaatcacggtcatggtcaggaagatggaacgccagccattggcgtcggtctgccagccgcccaaggtggggccgattgccggagccacgctcatggccatgcccacggtgcccatagcaaagccgcgtcgggacagcgggtagatggaaaacaccgtgatctgcagcaccggccacatcacgcccgtgccggcagcttcgagcacgcgcccgaccagcacccatacgaagtttggccccaaccatgccagcagggagccgaccgtgaacaccgccatcgagcagattacaatctggcgggtggagaaacgacgggtcaggaacgcggtcagcggcaccatgacgcccatgaccagctggaatacggaggtgagccactgcccggtggtcacggagatatgaaactcggaaacgatgatcggcagcgccgagctcagctgcagctgcgtgaagttacccacgaaggtaataaaggtcaggattgcgatggagataaatgccgcgcggctcagtttgccatccacatacgattcttcgcgactgagcacccgctgcaattcgccgcgacgattcttgattccctgagctccgttcacgcactcccccacttctgttgcccggcctgttgccttggcggtgtcggtggcgtatctgttcagtgatatatgcgcctcgcatatcaatgcgtattcgatgtattcggcgaccgtcgtcttcgcgtgcttggccgagcagcctctcaaagcaccccaatacgctatacccaggggtggtccagtcggttcggaatatgtgcagaagcgggggacgaacacgctttgtgcacaagaccggggcataataggcggttggttattgcaagaggttgcaagtcaataagaccagtttggaagttagtatgagcgttcatagggcaagtcacgcaacaagtattccacgcagaaggcaccgcatctggccgtgagtggtgttgattctggcgctacttgtggtgctgctaggcgtgagcggattcttcggtttgaagctgtattccgaagccaagcaggtaaaggcgcatgaggaacaggcgatgcagctgctgggcggtgtaaccgacctcagtaacctcgacaacctcgatacggtgagccagcagatcagccaggcaaagaccgagaccgcggctgcgaacgagattgcgcacggcacgctgtggaacatcgcctcgaaggcgccggtgtacggcggtgacatcaccatagtgcagggtatgacttcggtgggggattcgctggtcagtgattcggtgccgcagttcatggacgtgctttccacgctgaagagcgcacagctcagctcaggcgacggtcagctgaatctgcagccgattctggaagcccagaagaatattgccaccgcgaaccagtcactgcagcagcaggtgcagaagtatcagcagctgccgaaggcccatatcggcatggtgaagaacgcctatgccgccggcaatacgcagctgaccaagatggcggacaaggtcaatcagctatccggcacgttccagattctgccgaacttcctcggttccgatcagccgcgcacgtatgcgttgatggctatgaccacttcggaggaacgttcgtccggtggtctgatcggttccgtaggtgtggtaactactgacaacggcaaaatcaatattggcgatttccgttcgaatggtgaatatattccatatggtgctggtgatcctacggaagacgagcagcgcatcttccggcagtggggaccattgaatatgtcgtgcgatgtgcgagatttggccgtataccctgatacttcacgcagtgccgaaggtctgcgcgcgatttggcagcgcacgccgtgggggagcaatactcagctggacggcgtgctcatggttgatcctgtatttttgcaggaacttacgaaaatcagtggtaatgtcactattcctgatggaacgctgcttacgggagataacactgctgagtttttgttgaacaaggtgtatgtcgattacccagtctccatgcaggacgccctatttgctcaagtcgcagaacaaacagtcggtagtatgttcagcaatgttgatttggctaaactcaccaaggtcgcacagcttatgggcagcatggccgaaggccgtcacttctccatgtacgcatttgatgagactgctgaaaaaaccattagtgatgcaggctttaccgcgcagacgccaagcagcgaggaaaacccgcaggtgggagtgtatgtgactgagcagaatccatcaaagatgggatggtatattcatcgtacttcgaaggtgactcgttccacctgtggtaatgatggttctcagtcctatcatgtggaatataagatgacaaatacactggagagcaggcagattggtgttctaacgagctatatccttggctccggcggacaaggtgtggaaaaaactctgatttatgcgcctgccggcggctccatctcaaatcttaagaccagtggtggttcagtgacggagagccgtcaagaaacattgaatggtaaaaccgtgtatgcgagcaatgccacgatagctcctgg

SEQ ID NO: 3281 - DNA, 19042 bp, Unknown
  R53_2m  MAG No. k141_11068
gtattgtcacgccttgaatttccggccgactttggtgctcccccccccccgccgcgattccgctatgggcggacgcgtcgcaaaatggtgtgtctcaccgcgctctagggtgtgaggtcagatacgtttcgatcagggtttcggggcttacgtgtgtgtagatctgcgtggtggtcacgctggcgtgcccaagcagttcctgcacggtgcgcacgtccgcgccgccttggatcaggtgcgtggcgaaggaatggcgcaaggtgtgcggatggagtggtttggtgatgccggcccgctccccggttgctttgacgatttcccataccgattgccgcgagatgcgcttgccgcgtttgttgagaaacagtgcgcgtctctcgggaatcttggcgctggagcgccgttccagctcgccacgccccgcattgaggtatgcggtgatggcccggcatgcgtagctgcccaatggcacaagccgctgcttggagcccttgcccatgagtcgcgcgatgtgctcgtccaggtcgatgtcgtccagattcacaccggtggcttccgagacgcggcagccggtggcgtacatgaattcgagcagggccttgtcccgcaataccaccggatcggttgagccgccggctgccgccgcgtcgagcagacgggttacctcgtccacggtgagtacgtcaggcagggtgctggcacctttgggtgccttgactgcggcagaaacgtcggcagtcaccgcgtgctggccgagcgcgaagcgatggaattcatggatcgaggccagtcttcgggctttggagcgggcggactcccccgcctggtcaagggcggcgatgtagtcttcgacgtcttgtttggttatggcgtccggttcgtggatgccgcgggtttcgagccaatcaatgtatttggcgatatcggattcgtaggcggtgacggtggccgtggcgagtcctcgctccacgccgatgtggacgaggaactgctcggtgagtctggtgaatccgttggtcatgtgtttgttctcttccccacccgctgcgcgggagcccccctcgtcagaggggggctaataataggaaaccccgctcggaagcggggtttctagtgtgaagtcacgacttcaagcaatcaggcctcaaccggagcgttgacgtcctcaggcagggcggccttggcggcggccacgatggtcttgaaggtgttcgggtcggagacggcgatctcagccagagcgcgacgatccagctcgatgccggcgagacgcaggccctggatgaagcggttgtaggtgatgccctcagcgcggacggcagcgttgatgcgctggatccacagcttacggaaatcgcccttgcgagccttgcggtcgcggaagttgtagttaaaggagtgcagcagctgttccttggccttgcggtacaggcgggagcgctggccacggtagccggaagccctctcgagaacaacgcgacgcttcttgtgggcgttcactgcgcgcttgacacgtgccataatctattcctcagctttctaaagtcttattatttccgggtaagccctatgctcacttctgcagaagctggtgcagcttcttggcctggccgccgcgcagcacatcgtcggcggacagttcacgacgcttgcgagcggacttgtgctcgaggttgtgacgcatggcggaaccgacatgcttcaccttgccggtgccggtgatcttggcgcgcttggaagcggcggaattagttttcatcttcggcattgctgccctccttgctggtttgcttcttgtcggaagtcttctgagaaatcgcggactgcgcgtcggccgcggcctgagcctgagactcctgcttggccgcgagacgagccgcctggcgagcctgacgctcggcgcgggactcggcgccacgacgacgctgctcggactgggtgtggaccttcttgcccttcggcgcaagggtcatgatgatgttgcggccctcctgcttcggcttggactcgacggtgccgtattcctcgacatcgtcggccagacgctgcagcagttccacaccaccaatcgggcgggagatctcacgaccgcgcaacatgatggtgaccttgaccttgtcgcctccgttaaggaaacgggtcacatggcccttcttcacgtcgaaatcgtggtcgtcgatcttcaggcggaaacgaatctccttgatttccgcggtgctctggttgcggcgagcttcacgagccttgatcttctcgttgtacttgaacttgccgtaatcaatgagcttggcgaccggaggcttcgcgttcggggccacctcgacgagatcgaggtttgcctccttggccaggttcagcgcgacggaagtcgcgatgacgcccacctgctcgcccttcgggccgatcaggcgtacctgcgggacgcgaatctcgtcgttaatacgtggttcgtcgctgatgatgactccaatcctctacttcaattccgtggcggggcctttgctggagtcctgttcaatgctttgggttcatggcaagccacaaccagcgccaatatgcgctcagcttctgcagacgcatatcagttctttgcgtcattcctgactgcgcgttgtatatcgcaatcgctaggctgtttgccttgaacccgaggccttgaaaggcttccaggtggggttgccccgctttcttgattcctcaagccaaataggaagtttaccacatgcccggacattcgcggaccgtgtgtcgatgggtggataccggctacagtaggcataatgactcaggtatgcgtgatttttggtgcgggcgaatactatgcgggcacgcccgtggttcccaccggtgcgtatgtgattgcggccgatggcggactcgaccatacgcgcgagttgggcatcgtgcccgatgtagtggtgggcgacttcgattcgctggagggccggccgccccgcaccgatgtgcgcaccatcgcgctgcccgcgttgaaggacgacccggacatgctttccgcgctgaaggtcggctggtcggcgggttgccgcgagtttcacgtgtacggcgggcttggcggccgtattgaccatacgatttccggcattcaactgatggcgctgctggcccgacacggggcaagcgggtacctgtatggtgacgggctcatcgtcacggccatcaccgatggcaggctttcgttccccgcgcacccggtgcccgaggacggccgtatggtgtcggcgttctcccactccgatgtttcgcttggcgtgaacgaaccggggctgaaatatgagcttaaagacggcacgctgaccaatacggtggtgcagggggtcagcaacgagttccgcgacggcgtggacgcggccatcagcgtgaaacgcggcacactgatcgtcaccttccccatcgaagtggcgttgccacaggtgagcagattccatgaattcggcggcgatatcggcgagctggacaccgaagtgtccaagctgctggttcgctgacttgcatgccgcgcgcttgctcgtgatgattcgagacattcctccaaaggagaggaaaatcacatgtcggttgcgggcaatccaaattgtgagcgctcacaaaaaatacggcatttttacccaaaacgcacgctgaaacgttgccatgtgtacagagtcggcattacagtagcaactgttggtaaacaatggcccggtgtgccaaagcgcgccaaggccaccctacaagggagaattacatgacagttaagattggtatcaacggcttcggtcgcattggtcgtctcgccttccgtcgcatcttcgagctgcaggctcgcggcggccaggctggtgacattgaagttgccgccatcaacgatctgaccaccccggctaccctggcttacctgctgaagtacgacagcacccacggcaccttccgtcatgacgatggcactccggttgacgtcaaggccaccgaagactccatcatcgtcgacggcaaggaatacaaggtctacgccgagaaggacgccaacaacattccgtgggtcaagaacgacggtgtcgagtacgtgctcgagtgcaccggcttctacacctccgccgagaagtcccaggctcacatcaacgctggcgccaagaaggtcctgatctccgccccggccaaggatgacaccaccccgaccgttgtgttcggcgtgaaccacgacatcctcaaggcttccgacgtgatcgtctccgccggttcctgcaccaccaactccatggccgccatggtcaagctgctggacgagaagttcggcatcaaggccggcttcatgaccaccatccacgcctacaccggcacccagatgctgctcgatggcccgcgtggcaccaagaccggccgcaacctgcgcgccgccgccatcaacaccatcgcccactccaccggcgctgccaaggccatcggcaaggtcgttccgtccgtgaacggcaagctgcagggccacgcccagcgcgtccaggttccggacggctccgtcaccgagctgaccaccgttctgaacaccgagaccaccgccgacgagatcaacgaagccttcaaggctgccttctccgacaccgattactacggctacaacgatgagggcatcgtctcctccgacatcctcggcgacacccacggtggcgtgttcgacccgacccagaccgacgtcaacaccattgacggcgtgaccctggctcgcaccgtgtccttctacgacaacgagtacggcttcacctccaacatgatccgtaccctgctgtacttcgctgagatctccgagtgaaccactgcggtctaggccgctacggttcgtttgagaactaagctgtgagacccccgccttgtgcgggggtctcttcgtagtagaacggtaatcatggcaaagaaaagcaagcatgataagggcgcgggttccaccccggcgacagtccaactggagaaggcgggcgtggaattccacgtatacgaatacgagcactccaacgaccatatggatgacggctacggcgtggaggcggccaccaagctcggcttcgacgagcatcaggtgttcaagacgttgatggcggacaccggttcggagcgtgtggtgggcgtggtaccggtcagcggacatatggatttgaaggccctggctgcggctgtaggtgccaagaaggcctctatggccgatcccaaggtggcaatgcgtgaatccggctatgtggtaggtggcatctcgccgttgggccagaagacacgtcataagactgtgttggatgaaagcgccctgcaattcgaccagattctggtctccggcggcaaacgcggactgtccgtaggcgtgaacccgcaggacctgctcaaggtcttgaacgccgttgccgcaccaatcggcacgtggtgaccgttcttggcttccctcggtgaggggagccaaggatgactacttcttcctgcgcaactccgacggcagcacgaagtgcatgttttccttgatggtttcgacggacttcataccggtgaaacccaagttttgcagagcgtcaatcacaccggacaccagttcgtccggcacggaggcacctgaggagacccccacggactccagtccgacgaaccacgccggatcaagctcgctggcatcatccacgcgatacgctttgccgcgcttccccaagccctcctgcgccacctccatcagtcgcacggaattcgaggagttggccgatccgacaatcaccacgcaatcggactgctgggccaccagtttgaccgcagcctgacgattcgatgtggcatagcagatatccgaactcggcggctcttgaatccacgggaacttggccttcagcgcggcaatggtgccggcggtctcatccacgctcaacgtggtctgcgagagcagcaccagcttggtgtcgggcgcaaaatccaacgaatcgacatccgattcatgctcgatcaagtgcacatgttcgggactctcccccaccacgccgaccgcttcatcgtggcccttgtgcccgatatagacgatttcatacccctcgcgcacgaaacgcagcacctcacggtgcaccttacccaccagagggcaggtggcatccaccacatgcatgccacgacgttcggcttccgccttcactaccggagatacgccatgggcggaaaacaccaccggaatacccgcttgggcagcagcatccggaatctccgccaattcctggacgaacaccgcgccttgcccggccaaatcctcgaccacatgcttgttgtgcacgatctgccggcgcacatataccgggggcagcccatcctcgcgcgttcgctttccggaagcctccgcggctttgagaatggtctgtacggtaagaatcgcacggtccacacccgcgcagaagcctcgcggatcagcgagcacaacgcttttggtcatcggaacctcctgaacgtcaatagtgtttttccagtgtaaggcagggattacaggaatctgccgtcacaacttttccgcgtctcccacgaatcaccggtttccaaggaatccacgtgcttctcgcatgatggtgtgagactcgtcactccacgtattgctaccgtgtctgtacgaattgtttattatatgccggctatcgccaatccccgcctcgatagaggagacgcgctagactggggccagcgatagcaggagctaccggcccaccaacctcactacgggagtgattccatgacgagtaaaacaccacgcaccggaaatcagtattcgattcactatggcgattattccgccgtcatctgcgaactcggcgccaagattcgccgattcgattatcaaggcaaggaaattttctgcccgttcggagtcaacgacctgacccccacctgtaacggttatgtgctggccccgtggccaaaccgcatcgaaaacggcgaatacgatttcaatggcaagcattactgcgcgccggtcaacgaatatcatcccgcaccgcgcaacaacgcgaaccacggatacgcctaccactacatgtggaagcttgaatcgttgaccgatagcgccgtgacgctttcactgcgcttccccaacctggacggatacccgttcgatgtgaccgtgaccgtcacatacgaactcggcgacaacggcatgaccgtgaccgtcaatgcccgcaatgatggcgacgagccggcaccgtgggctctcggcctgcatccgtggctggccaacggcaagcagggcgcgacttccgccgagcgtgacgccgactccgccgcctgccacctgcagatcaaggccgccagtcatgtgacggtgaacgaggcgctgattcccaccggcaccgaaccggttaccggcatctacgacctgaacgatggcccgacgctcgaaggccgcgcctttgatgatgcctgggtcgacgtggagcgtgccgccgatggtacgaccaccaccacattcacccgcccggacggtattgaagtgaagctcattggcgatgagacgatcaatgcttggcagtgctacaccgccactggcgcgccgttcgccgagcatccgtatggtatcgccgtcgaaccgatgaccgccccggccaatgccttccgcactggtgaccacttggtgacgctcgcccccaatggcgactacaccactgtggtccgctacgaagtagtccagaagtagttccgttacgctggctcccctccagaggggagccaattttttatccttatgtgccgccgcgtcttgggacttgtgcgatacgattgtgagcggtaacaatctgtttcacaaaggagtgtgcactatggctttgaagcctcgcactggtaaccaatatgtcatctcgtccggcgaatggagtgccgtcgtcaccgaactgggtgccagcctgcgcgagctgaagtggcgcggcgaagacctcatcgtccccttcgacccgaacaaggtcatcccctgctgcaacggctgggtgctggcaccgtacccgaaccgcgtgaccaatggtcagtattctttcgatggcgaagactaccagatgccgatcgacgagttcgaccgccaatcctccctgcacggctacgcctaccgctacatgtgggagctcgttgatttgcaggaatcacatgtgacgctctcctggcgttcccccgacatcgccggctacccgtttgatatcaccatcaccgccacttatgcacttgacgagaacggtctcacggaaaccttcaccgtgcacaacaacgacagcgtgaaggccccatgggcatttggcatccacccgtggctggcaaacggcaagcacgccaccggtcaggccattaccgccgacaacgagtcctgccgtcttgagctgcactgcgatacccacgtgaccgtagacgaacacctgctgcccaccggtgaagagccggtttccggcatcttcgacctgcgcgataaccccacgctggagggacgtggcttcgatgatgcctggaccgatatcaccaaccgcggtgaagacggcagcacttccgccgtgttcacccgccccgacggcatcaaggtcacgctgaccggcgacaagaccatcaactcctggcaggtgtgcaccggcaacgaaatcggcgggaaggctcgtcaggccggcgtggccgtcgaaccgatgaccgcctacgccgacgccttccgcaccggcaaggatctggttgtgctcgagccgggcgatgactacaccaccgtggtcaccttccacgccgaacaaatctgaaaaaccgaataaccaagcctgacgatcatcgccacatggacacccgtgttgcatcacgtcgtacttatgtggcataattccgaaggcttatttttttactgcagcaaaggagtccatcatgggcatgcgcggacgtaagcgcaaggatcgtcgtaagaaggccgccaaccacggcaagcgtcctaacgcctgattcttcgcgtttcttatagaacgctcaaggcccgtctgatgatacatcagacgggccttgttgtatatgtcgttacttatcttcgccgcagcagtgatcaagcgtggccttgagccgggccatcagacattcgggtgccacatccgggcgcaagtaggcacgcaacgcggcaatcaacgcctgttcacgctcgtcgcagcaggtacgggggtcaaaacagtcgccctccgtaacgatatgcacgtctgtctggaccgacgcagcggccgagccggtatctactgaacgatgatgcaccgccgtgatatgcacttcggtctggcttaccgtgccatcggccgccgtacgggttatggagatatggcgagtacgctctaccggctgatcgttcatcagatctcctttcccgaaagcttgcttgactgttgtggcgtgtgggcgtgagtcgcatgactatgtctcactacggcttgcgtgtcgccattgctgccaacagttcgttcactactttcattatggccggaatcggcgattcgaccaacgttttcgctcaacttcgcggatggtgaaccagccgacgaaccagtcgcgtacccgcgctctttcgcatacgaggcgagctcacgcttgagttgcgtgcgggcgcgattcaggcggctcatcaccgtgccgattttcacgccctgctcatcggccacctgttggtaggacttgccgtcgatggcggcgtcgatgaacacctgccggcgttccggcgagagtttggcgagcgcggccatgatttcctcgggcgcgaaggcgtccaaatattcctcttcagcggacttgagcccgtccgacgtatgttcggcggcatcgtaaatgtcccaatcgtcgtattcgccggtggagtcgttggcacgctgcgggcgccgcttggccttggcatactggttgaagtaggcattgcgctcgatggtggtcatccacgcctcgaagttggagcccggctggaatgagtcgaaggccttgaacccgcgttcgaaggtgtcctggaccagatcctgcgcgtcatcgggattgttggtcagcctcatcgcctgccggtacagtgcattgacggcgggcatggcgagctgttcaaatctggcgcgcttggctgccatggactcgcccgatccggctgactgcccggattgcatagttgcttcgcttgtcgtcacggttcaccattctaatcaaatcatgtgcccatatcgtggtcgatgacgtgtgagccacaacacgctacaccccacctgtagaatggcgtatcggctagataatagggagtaacaattatggctttgactttggcttcggccgctgacctgctcaaggaacaccatctgctgcgtgaaatcatccaaggggatgtctggaccgacgacccggcccgtatcgcttcggcggatgaaccgttcgccggcatcacctacgacacccgcaaggtcacgccgggcaccctgctgtgctgcaagggccgattcaaggccgagtatctgaacggcatcgacgaagccggcctggccgcatacgtggccgaaaccgagtactcagccgcaaccgccgcccccggcctgatcgtcaacgacgcacgcaaggcgatgagcctgctgtccgccgcgttctacggatatccgcagaacgagctcacggtcatcggcgtcaccggcaccaagggcaagacgaccacctcgtacttcacgcaggcgcttatcaacgccgtctccggcggcaaggccgcattgttctcctcggtcgataattgccttgacggccacacctacgtcgaatccgatctgaccacgcccgaatcgatggacgccttccgcatgatgcgcgaggcggccgataacggcatggagtatctggtgatggaggtctcctcccaggcgtacaaggtggaccgcgtctatggcctgactttcgatgtggccgcgttcctcaacatctcccccgaccacatcagcccgatcgaacaccccacgttcgaggattacctgtattgcaagcgccagatcatcgccaacgcgaagtcgctggtactcggcgcggacagtctgcacgccgatctgttgcgggaggacgcggcggcagccggcatcggcgcaaccaccttcgccctgcatgacgcggataatgccggcaccagtgcggacgtcgtcgcctggcccgccgacacggcgcacgcctccttccacatcgccgacggagatcagacccttggcgactaccatctgtccatcgatggcgacttcaactacctcaatgcggcggcggccatcgccatcgcccatgcggctggcgtatcgctcgatgacgccggcgcactgcacgccatcgaatccgtacgtatcgccggccgtatggaacagttccgcgacccgcagtcgaacacgctcgccatcgtcgattatgcgcacaactacgcatccgtcaccgcgctgcttgacttcgtctacgagcgttggggcgaggaaaacccgcgtatcacgctggtgaccggatcggccggcaacaaggcctacgatcgtcgtaaggaaatcgtcgaggctgccgagaaccgtatcgcgaacttcattttcaccgccgaagatacggacaccgagccgttcatcgacatctgcatggaaatgcaaggctacatcacgaacaaggatgtggcctccacggtgatttccgaccgtccgacggccatcaccaacgccatttacgatgcccgtgcgcacgccgaccgattcaacatcctgctgattatcggcaagggcaacgagcgttggatcaaggaccatcacaagcatgtgccgttcgacggcgacgatcacgtggtcgaacgcatgtttggcttgtgacgggattccggccaatcagatcctgatcggattccgattggcccacatcagatcacgcgcaatacgaccaaaccagaaacacgacatacggatacgaacgaaaaaggatagctgaatcgtaatgatcacgttggagaaagttgacggagccacactggaagccgaagccgagaaggccggcatcacgttgcctatcgaacagaccaaggtttggtctggttttcaggcggatatcgacggacgcacgccatggggcgattatctgatcaagcgtgatggtgaattggtcgccgtgatctcctttatcgattttgagacgcacggttatcattatctgcgctcgatgcatgggccggcgtgggctgccaagcccaccgaagctgaggagcgcgaggtcgtcgacgccatcgtggacaccgtcaagaaggccgacaagaacatcgcgttcctgcgtatcgacacctggttcgccgatggtacggagaaggtgctgtccacagtgccgtacaaccagaccgtggtcatcgacgtcactggtggcgatgatgagattctggctcggatgaagcgtcgtggacgccgtgacgtgcgcaagtctctgcgcgagtgcccggccgaggttgccgatgagacggataaggcgctggccgatttctccgaatattacgatgtgatggtcgagaccggccagcgcgatggattcacgcctgctccgatgagcgactattccgatatgatcggcgcgttgggtgccgatcattgccgtgtgttcgccgcacgtattgaagaccgtgtggtggcatggtcgattgtcaccgtgaacggcacgcatgcggtgcgctactatgccggcatgcgcaacgaggttatgcgtctgcatgtgaccgacaagctgctgtattccgaatgctgcatcctgggctcgcagggtattactgaatatgatctcatgggcatcggctccgacttcgcgccgtctctcaagggccttaacgagttcaagtgcaagttcaccgaggaaatcaccccggtggcccccgcccgcgacgtacccatcaagaaggtcttctacaagacgctgcagactgtacagggcgtgcgcaaggcattgcgctaatacctccccgctcccgctggtgggagctgtcgaacgaagcgagactgagggcggtctttcgatatggaccgccctctgtcacctgtggtaccagttcctgtcagcgggaaccattcgtttatcgttcgagtttttgactcaccacggctgttacgccatcggctctcatggttacgccgtaaagcgcgtcggcaatcgacatggtgcgttgctggtgcgtaatgatgatgagctgcgcatgggcgcgtaactcattgaacgcattaatcaaacgggtcaggttcacgtcgtccaacgcggcctcgacctcgtccatcacatagaacgggctggggcgggcggtgaaaatcgcgaacagcaacgccagcgcggtcagcgaacgttcgccgccggacagaagactcagctgtttgacgcgcttgccggccgggctggcctcgaccagtacgccggtggtgagcatgtcttccgggttttccaggcgcagtcgcccggtgccgcctgggaacagcgtggcgaacatctgctcgaacgcctcggcggtatcgtcgaacgcggatttgaatacctggaccatcgtggaatcgagatccttgatgagctgcatcaaatcgtcacgtgatttgaccacatcgttgcgctgatcattgagatacttgttccgctcctcaagcgcttcgaattcctcggtggccaaagggttgatcttgccgagtgcggccagctcgcggcgagccttatcgagacgcttcttctgctcctgacggttatacggcacggtcttaaagagggcggaatcgccgttggtgccggcctctcccccggtttctccctcttcggtcccagcctcagcttccgtctcatccaacggcacagggttgccctcatcatccagcacgggcaccggctgttcggggccgtaaccactaaccaattcctccaaagtgagaccgagttcgtcggacactttttgcatgagctgcccggattcggcggccaaccgttcgcggtttacatccaaggcatgttcgcgcccggtcagatcggtgaccttgggctcgatctggttgcgctgcgcgcgcagggccttgagttcctcgtcatggctggaggcggcggcctgcagctcgtctcgtttggcggccacgtcatgcagcgtatgttccaccatggcggccactgctcgcgcgtcatcggccacgccttgcaggtgtgcggcctgctcgcgtctgcgatcgttcaacgcctcgatgcgggcgcgtcgttcggcggcttctctggcgttgtcccgcagcagcccggcctgtcggctcagtgactcccctttgcggcttgcttcggtccacgcgattttcgcggcgacctcatgctcgcgagtcaggttcagttcgcgctccagcgtgcgttcacgttcatcaagttcgtcgaaatcggcatgttccgctgtggattgctgggccgatgccaaagcgcgattgagatcgtcgagcttgagctgatgctcgttgcgattctcttgggtctcggtgattttcctatccagctgctcaagctgacgggtgaacgatgcgacgcggtctgtggcggatttcagagatttctccgcctgttgggctttgagccgggcttcggtgcgtttggcggattcctggtcgacgagtcgggccgcttcatcgcgtttggctttggcctcggccacttgctcagccattccgccgtcttgagcggtcaactgtttgacctgtgccaatgccttgtctcggcgtgcggccaaagacaggtccgattgagagatggaagagccgccgaccgccgccacgccgtgcgtgaaggtctcgccgttcttggtgacggcccgcatggcttcgccggatgccacaatctgctgggcttcgtcggcggtgccggccactgttacatcagccagcaggagacgcacggtgtgcacgaccgcttcggcctgcgcctggttctcggcatccgggttcgcagtgacgagtgctgccagcgcgctgcccgatcgcggggcggccgccgtgttctcggcgctactctcctccgactccgtgcctggctctgtggcgggatcgccggcaatgctcgcggtcagcaccacggctttgccgagcttatcttcccgagcgcgttcgagggcgtgcaacatgttgcctgcctcgggtaccacgatggcgctggcatactggtcgagcgcgtgggccacggcttcttcccagccttcggccacatggatgaagtcggtgagtcggccaagcgaggccacgtccgtgtcgcgttccaacgatccggaggcattgcggctgcctagcgtgtcggcaagcgcatcggccttggatttgagcgagatgatcttggactgtatctcgcgctgcttatcggcgagttcgttcagtcgttcgcggcattcggcgagcgttgcacgcgcggcgtccaatgcggcaccgtcatcgtcggcaatggagtctgcttcgctgcgcaatgcgtccagctgttgctgggcatcgtcgcgctgggaagtcagcaagtcgcgttgggaggcataatccttggcgcggctggtcgccagttgcacggcggattcctcgcgggcgatgagttcgcgcagtcgggcgatctgcgcatcgcgctcctgtgcggttttgcgcagttccgtcaaggtctggcggactgaggcaagcttcttctcgtcatcggcacgttcctcggtggccttgtcgagtgcgatgcgtgcatcggccacggccttggtttgtgccgcggcctgagactccagttcctcggctcgtttgacgagcatgccgggatcctcaccgaagttggtgacgatctggccggtgagtgaccggctgcgctcttcggccaactgggcgagcgcgttcagtcgttcacgggtctgtgagaattcatgccagtattggttggccttggcgatggccggactggattcagagctcaacgcctcgacctgttcgatgcgtactttgacgtgggcgagttcacgttgggcgacggccagctggttgcgcacatcgccaagctcttgacgtaccgtgtcgcggcggttcatcgagcgttgggcgtcttcggcatacaggcgtgcttgggcgtcgcgtacggatatctgaatcgcgtcggcgcgccgggagatgcgtgcctggcgtccgagggggccgagctggcggtgaatctcccccagcaaatcgtcaagtcggctcaggttcgtttcggtattggccaacttgcgcaacgcgcgttccttgcgcttgcggtgcttcaggatgccggcggcctcttcgatgaacgcgcggtggccggacgggtcggccttcagaatcgcatccaatcgtccctgacccacaatcacgtgcatctgctggccaagaccggtatcggagaggagttcctgaatgtcgagcagacggcattgcgagccgttgatcgcgtattcggagcctccgttgcggaagatggtgcgggatatggtgacttccgtgtaatcgatatcgagcgtgtgatcggaattatcgatggtcaggctcacctgtgcacggcccaatggcgggcgggaggacgtgcccgcgaaaatcacgtcctccatcgaagtgccgcgaaggtttttggcaccttgctcacccatcacccaggtcagggcgtcgacgatgttcgacttgcccgaaccgttggggccgacgaccgccgtgatgccgggctcgaagcgcagcgtggtggcggaggcgaaggatttgaatccgcggagggtgagttccttgagatacatggcgtgagactgttttccgtatgtcgggcgtccgggtatccgatgtgccttggatgcgggttaccggacgtcggcggaatcgtcggtgatggcgcctgtgtcggcgctggccgtgccggtgccggcgttaccggcgtcactggcctgttccttgccgaggccgaggacgtcgaacacgtcgaagtcgtccgggctcaccgaatcctcgaggttgtcggcggcctcatcctcggccttgtctgccagccgatccgaatcgtccgggtcgaccgccggctgatggacggccatggcctgcctcatcgtggggctggcatgctcctcaagcatcaggcgtgcgtcgccggcggtgacgaagctgccgcagataagcacgccgtggccgtagcccacgcccagctcgtcctcggcatcgaccatattgacggcggtctgaatcgcgtcaggcaggttcgcttccttgatcacacggtcacgaccgaacacgtccacggcaatcttctcaagctcatcggccggcatcacacgttcgcgccacgagttctcggtgaccaccacggagctcaggatcggctccagaacacccagatattcctcgacctgcttgtcgcgcatcatggcgaccacgccgaccagctgcttgaagtcgtagctttcctctatggccttgcgtagggcttcggcggcattcacgttgtgtccgccatccagaatgatggtcggtgaggtgcggatctgttcgatgcggccgggaatcttgaccgagctcaacgcctcgcccaccaagtcgccgtccagcgggccattgaccggaatcaccacttcagaggcggcaagcgcggcaagcgcgttatgggcctgatgctcgccgaacttggcgatcggcacgccctcgtaagtgccgttgggcgtggtcagggtggcgacctggccgccgactgcggccatacggtcggacacggtcatttcgtagccgtcgcgcacgagcatggcgtggttgcgttcggcggcttcggtgagaatcggcatgacggcttcctcatgcggctgaggcccgatgatggcggtgcagttcggcttgatgatgccggccttctcggtggcgatctgttcgacggtgtcgcccagccactgcatgtggtccatgtccaccgggccgatgatggccgcatccgcgttgagcacgttggtggcgtcccacaggcctcccatgccgacctcgacgatggccacgtccacgggcgtgtcggcgaacttccagatggccatggcggtgagcacctcgaagaagctcatcttcggcttgccttgctcctccatcttggcgtccaccagggccacgagatccttggtctggtcccagctgtcgatgaaatcgtcgtcggacagctgctggccgtcgatggcgatacgctcgttgatcttctccagatgcggcgacgtgtacaggccggtgcgcatgccgtaggcgcggcagatggcctcggccatgcgtgcggtggagcctttgccgttggtaccggtgatatgaatcacgcggaacgactgctccgggtggcccaggatgtcgagcatcaggttcatccggtcgagatccagattggtggtgttatgctccggcgggcggctcatgatgtccagttcgacgtcccgcatgctctcgttgttccgattcggatgctcgaatgacatatcctcttctgacctctgctcgtgttgctgttgaaccgttcggagtgcgtaggccacttacgtgttcgtgccattctcgtcatgtctacgcatgcccgcatatattccgcttccgcatgcgcaggaagctcccctcgcacaggtttgccctgcatggttcgggattcttgccttcacgcgtggagccgcactccctcaattccctctatcctagccgccggggtggtttatcgtgcgcgcacagtgaaaccgtctcatatgtcgccgccgcgcgggcggccttttcctgcagcgcgcacagtgaagccgtctcatatagttgcaatgcggctcttgccgtcggcatcccattcttagtcggctgcaatccaaaacttgtatgtccggcgacgctgatgctattcagcgtcggtacagtgccagcttctggcggtacaccgacgctatgatgctcttgcgagtcggtagctggccaaaacctggattaatcccgactccatcgcctctcagtgtcgcctcctcgccaaggcatgccattctgccgtcgctgagaaatttcaacatcgtcaatcgaccatgtcttgccccggaaacgactctcacaaacgtcctcta

SEQ ID NO: 3282 - DNA, 2585 bp, Unknown
  R53_2m  MAG No. k141_11087
cgaattcagacagaatctgcctacgtggcccttcatcatcgaatgaatacgacacggtagtggcaggcacaaagttacgaacgaatcgaactggatcagtgacctttagcgacatggatccgcgtgcgcgaatttccaaatcgacgccatagaaccggtcgttatacaccagcggcgcagaagtgccgaatttgatgccacgaatctcacgcaggttgccgaaggccacatatttggtgcggccaggctgacctccgaaggtgaatcgatcggcaacctgattgaagaacgatccgatgccgtctccggcgagcacgctctgttccccgttgcgatattcataaccgcccgactcggtgatgacgttttcgatacctgtttcagagaaaatgaacgccgcagtattctctggcacatagatacgcgaaccattggtgattattccctcggaaccgtattcattcgaaccgcgatcgttgttgcttccgcggggaatgcccggcacaacgacggtgtgttccgtgaacggaccagcggtgatgatatcacgccacaggtccgcgaatgtaccgccgagcgcgccggcgaacgccttaataactgccatctgttttttcctcgatatctcatgcatatggccgatcttgcgactatgcaatcgcaagaccggccgttatgctggcatgttggttatagctgcgtttcgcgatcgcagtattcgcatcgaacgacttctttgcgatgaccggaaagcggagcgccacaaccttcgcaattcaccgaaaccacgggttcggtaataccaagcccactacggaatgcgccaaaagtgtccttcagcgccccggccagagcctccgttccggggatggccttgttgaaggccggctcatccattggcgtatactgtctgccgcgtatacccatataccgtcatcgttcctttcttggaaaaccgtcacctcgatacgccagtctgatcactggcccaccgatgcgagcttctgcatgcatcgagtcatgacctcggtgtagtaggccgaatcctcactgctgagggagttttcgtcaatggcgtctaccttctgggagaactcagagtaacgcttcatcatgctggcatagtcggtagccatgctgaccacgttatcggatttctgatatttgttcatgaaggcaacatactcatcgataaaggcctcgtagctgtccatcgtggacttgaagtcagcactgtcactggtgttctgctgcgccttctgatccgaagactggtcgctctgcttgttggcatcgctggaatcagtgcccgtatcagtgctcttatcatcctgcttcgcggcgtcgccgtccgtagacgtatcttccttcttttccggaacctggatagtgatggacatgatggtctcgtcgtcagtgttacgagaaacgctcacactgtatccatcggcgttcttggcattgaaactgtcagcggacttgctatagtccacggtgaaaccgttgtcttgcacggacttgacgtagtcggcatactgcttggcgtcggtaccgcacacctcgatggagaaatagtccgaagactcgcttctaatttcaccctttgtggatttcggctgcggcagcagcgccgcgatatccgactccggccatgaatatgcttcgcacttggtggcgagcgatgcttccaattccgcccgatcagccttggccttcgcaccgtcacgaattacgaacacgccaccgattaccagacccacaacggtgataccgactgccacccaggccagcactcggccttgcaccttgccactcgggcgggtcacgtatacggcgaaacctgagagcagtgccggaatcaccgtggcgaacagcagtccgccccaggatcggccagaaacatccacaaattgggcgagtacgaacaacactccccaaataatggcgaacacagccagcttggaagtcttcttcaccccttgtgcattcggagcaagcacggcaggcgcagcggcaccagcaaaaccagtggcagcaccggcaccatgtgtggcgggtgcaggagccacaccaatacgcttgtccagagcggcgaggaactcatcaacgcgcttggcgctttcgtttccagtcgcctccagacgaatggcggcccctgccgcaccctgcgggactacggttagcgtgcagttcaccccatcataggagtggaaggaaaacgctccggtctgggtgttttcgttatccaaggtaaacgtggcgccagtagtcagctggtcgtgaataacttggaacagctgttgcggactgaccgcatatacacgatcaaatggcgcgccggcgggccgctgcgatgccgtagccggagtcatcggagtggtggtagcaccatcagacgctacgttcggttggccagccggtacagtattcggcacggtaggcgcattcgcgcgatcttccggtgcgtcattcgtgccttcggacggtggaaccggctgaggttgttgatcaaatggcgttgtcatgatgcccttctttccttaagcagcagcattaccagcacagaagaggcaagcccggcaacc

SEQ ID NO: 3283 - DNA, 25023 bp, Unknown
  R151_18m  MAG No. k141_566
cttgccgtgcaggagcaccttctcgcccggggcttcctcacagccggcgagcgtgccgccgagcatcacggaggaggcgccggccacgagggccttggcgatgtcaccggagtagtggatgccaccgtcggcgatgcagggcacgccagcggcacggcaggcctgggcggcctcgtacacggcggtgagctgcgggacaccgacaccggcaacgatacgggtggtgcagatggagccggggccaataccgaccttgacggcgtccgcgccagcctcaatcatggcctgagcaccggagcgggtgccgacgttgccgccgatgatctgcacgccgtcgaaggcggagtcgtgcttcaggcgggaaatcatgtcgagtgccagacgagcctcaccgttggcggtgtcgaccacgagcacgtccacgccagcctccatcagagcggaggcacgctgccaggcgtcgccgaggaagccgacgccggcggccacgcgcagacgaccctgctcatccttggtggcgtccgggtactgctcggtcttgacgaagtccttgacggtgatcagaccggtcaggcggccttcctcgtcaacgagcggcagcttctcaaccttgtgctgagcgagtagacggtgagcgtcgtccttggagatgttggacgggccagtgaccaggttctccttggtcatgacatccttaaccttcagggtgtcgtaatcctcggaggcgatgaagcgcatatcacggttggtgatgatgccgacgagcttgttgtccttgtccacaaccggcagaccggagatgtggaacttgccgcacagcttgtcgaggtcggccagcgtgacctcggggttgacggtcagcgggtcggtgatcataccggactcggaacgcttgaccacatcgacctgagcggcctggtcgtcgatagacagattgcggtgcaacacaccgatgccaccgttacgagccatggcgatggccatctcggactcggtcacggtatccatggcagcggagaggaccggggccttcatcacgatcttgcgagtcagatgagtgctggtgtccacttcggagggaatgacatccgtctcgttcggcaacagcaacacatcgtcataggcaaggccgagcttggcgaaaatcgggggaaggggagcatacgccgactgggcgtttaattcatcaaggtttgtagccatgtaaacactatatgaaaatgcgctgaccttcacgacacacgcttgtgagcgctcacttatccgctgccgggtcctgcacctcacccacctgcgagtcccgcgaatttgcaggcgaatcagtcatcgaatccgctgcctgagagccaatcgaatcccggctctcccctactgcagactgcgatttaggcactgtatgctgcgcgtttttacgtgcggattcgaacgtcaggttctcggcttggatctcgggaatacgatgccgcagataggggtacatcgtggctatggtcagcaccaccacagcgatggccatgcccacggccacgtgctgcgctttgaagaacagaatcgtcagcgaaccgaatgcgatcaacgcggcccatccccacagaatcagcacggcgccacgcaccgaatgcccgatcttcagcatgcgatggtgcaggtgcatacggtccggatgcatgggcgactggcctttggccaaacgccgcacaatcgccagacacatgtcgagcacaggcaggaacaacaccagaaccggcagcagaatcggcatgaacaccggcagatagatgctggcatgaatcgaggccgggtcaagacgtccggtcatcacaatcgaagcgcaggtgatgagatagccaagcagcatcgaaccggaatcacccatgaacagtttggcgggatgccaattatgcagcaggaagcccacgcagatacccaccatcatcacgtcgatcagcgtggccaacgaagcataactcggggaagaccgggcgatgatatacgaataggcggcgaacgctatgccaccaatcgccacgataccggccgccagaccatcgaggccatcaacgaaattgaccgcgttgatcgaggcgacgatcaggaatgcggtgatcgccatggacagactcggcgaggcggtaatcagcgaaccacccaaaggcagtgagatgatctgcaatccgtcccaagccacgaatacggaaatcagcagctggccggcgagtttcagcatccaatcgagatcccacaggtcgtcggccatgcccagcagactgatcatgatgccgccggcaagaatcacccacatctggtaattgccgttgaacaatcccgagagaaaaggcagccgactggcgaatacggtagccacggcaaaaccaatcagcatgccaaggccgcccatgcgcggcgtgggaatggtgtgcacgtctcgggcacgcacctcgccaaccgcaccgatttcgatggcgacgtggcgaatcagcggagtcaccagccaggtgacgccaccggcgatggcggcaatcagtaggtagattctcatgcgccgagtcccccgccgttgaggtggagggccttgcgaatcacgttttgggcgatgacgccttcacgcaggatctcgatgccgtcgcgcgcgtacggatcggctttgacgacggtgctggagacatggccttgggtgggaccgccgtccagatacaggtcgacttcgttgccgaacgcgtcaaccgcctcctggacagtctgtgcgctttcgtcgccggaacggttggcgctggacgcggccagcggaccagtggccttgagaatcgcgaggcacagcgccgaattggggatgcggatgccctgcgtgccggggcgaccatcggcggtgtcggccaaagtctccaacgtgcagtcgggccgggctacggcaatcggcgagaacgcgccgggcaggaacgccgccgacaaacgattcagtggagacggcaggtcgagaccgagttcatcaagctggtcggtggatgcgagcagtacctgcaacgccttatagcgcggacgacgcttgagccggtagatacggtcgatggcggccttattacgcggatcgcacgccactccatataccgtatccgttggaatgacgaccaatccaccatcccggatgacacgcgccgcttgtgccagcgattcatccgtgactttcagcgttgttccgccctccacgctcacgacacctccgttcgcctgtgtattcacaatctaccattgcaccattgcgccccgacttgcatagttcatcatcgctcgtttgccgtactgctgttttccgattcgccccatacgcacagaccgtagatacaatgagttcgtccatgctctttcgcgaaattacaggagtgttcaatgagcggaatcaatgctgaatccaccaccatgcctcccgtcgaactgcgtatgccgcgcgccagcgagcgcgtgttcgccaacttcaacttcactgtgctggattgttgcccggtgacgattggcgagggttgcgtgatcggtgccggctcggtggtgacgcgcgatattccgccgcacaccgtggccgtgggcaatccggcccgtccgattcgcgaaatcacggacgcggacacctccgccctgcagtattacgcgcagtagcagcggcggccccgcgcctgtggctacttctcggcgaagagatagcggtctcggccggtccaatctttgccggtggaggcggtggcgaaacctgtggccttggcataggccactaatcgctcgccttgggtgagatcatgctccataaccaatacgccgccgggcttgagcaggcgccaggcgcgctcaataatgcgttcagggatgagcgtgccgtctgccgaaccgccgtatagcgccagttccgggtcccagtcgcgtacttctggttgttcggggatgtcggtttgtggcacgtagggcgggttggtgatgacgatgtcgatggtgccgtcgagttgcgccagcgtggccagtgacgtggcgtcggcgacttccagttggtaattggaggcgatggaggggtatcgtttcgcggttaccgccagattgcgccgggtccattcggcggtacgcggggataattcgacggcccatacttggctgccgggcacttcgctgactatcgacaggccgatggcaccggaaccggcgcacaggtcgaccatgcgcgggtggatcatgctgtgccgggtcagccagtcaagaccggcctggactacggtttcggtttccgggcgcgggataaagacgccggggcccacctgcaggtcgaggtagcggaaaggcgtgtggccggtgatgtattggagcggctcgcgtttggcgcgtcgggaaagcatggcgtggaaggcggcaaggatattggtgacggggtcggcctgaccacccccagtcgctgcgcgacagcccccgccggcgggggccagcgaatcgaggccctcccccatcagcatggccttgtcgatatcgcgtagctcggcgtccacggcctcggccagcaacagtttggcatcatgttcgggcgtctcgatgccggcttcgcgcaactgcgcggcggcttgacgaatcaggtcggctatcactgctggttggccagacggtcggcttcgtcggcttggatgtcggaatcgatgacggcctgcaggtcgccatcgagcacggcgtcaaggttgtaggccttgtaattcgtgcgatgatcgacaatacggttttccgggaagttgtacgtgcgaatacgttcggagcggtcaagcgaacgcacctgcgagtgacgcatgtcggcggcttcggcggcctcttgctcatgtttcatggccagcaggcgagacttcagcacacgcagcgcggcggcgcggttctggatctgcgacttctcatcctgcatgttcactgtgatgccggtgggcaggtgggtcatgcgcacggcggaatatgtggtgttcacggactggccgccggggccggagctcatgaagatgtcgattttcaggtctttcggatcgatctcgatctcgtcgtcatcctcgtcggcttcggggaacacgatgacgccggcggcggaagactggatacggccctgcgattcggtgacggggatgcgctgcacacggtgtacgccgccctcgtacttcatcgaagcccacacgccgtcttcgggagcgggcgtgcccttggcgcggatggcaatctgtacgtccttgacgccgccgagctcggtggtgttctcggactgtacgttcacgctccagccacgcttctcggcgtaacgggtgtacatgcgcagcaggtcgccggcgaacagtgcggcttcttcgccgccggtgccagccttgatttccatgatggtgtcgcgtgcatcatccgggtcacgcgggatcagcgcggtacgcaacttctcctcggcgtcgggcagttcggcttcaagacgcttggcttcctcggcgaagtcggcgtcctcgccggccatctcctgagcggctgccagatcgtccttcacctgcaaccaggttttgtaggcgcccacgatggcacccagttcggcgtgacgacggcccagcttgcgcagcttgtccgggttggacacgacttcggggctcgccatctgttcttcgatggactggtactcctcaagcgcggttgccgccgccgggaactgttcgtctgccataacacgctttctttcgtacggtggtgtctattcggttgtgcaggtcaaaaaaaaaatgtcaaagaatacaaaaacgccagtcctcgatcgggtatgccggagcatgccgaatcgaatcggactggcgtgaagtatgctacttgctcttcttgccgtagcgcttctcgaagcgagcaacgcggccaccggtgtcaagaatcttctgcttgccggtgtagaacgggtggcactgagagcacacgtcaacgaacatgtgatcttccttgccagcggtgcgggtcacgaaggtgttgccgcacgagcacgtcacctcaacggggtggtaatcaggatggataccctgctgcattttacgtctcctatggattcgggggacccgggtcgtcatgcccctatggcaggacgtgaaccggaacctaagggattgtacgcgcctatctggacgtgaagacgcgctgtgccgccgcaggaggcgacgcaaaagagtggggccgcaggggcttgaaccctggaccgggcgattatgagtcgcatgctctaaccgactgagctacggccccacgttcgctgcgtaaaacagccaacttaccaaagtgtagcatgggcccgctaacgccggcacgcgcgccatgcacccatgccatgcacccgccagcaacaagcagcatctcccggcgctacttctcccccatgtaccccaacgggttctcgatgaaccgtcgcaagcccatttcggccgcgccatatagcgagggatgcagcgccaccggcggcacgaacacgcggatcttcacattcgggtatcccagaatttccgaacgcagccggccttcaagcacggtggccagctcgtcgccgaagtgcgtccacagtccgcccaacagcaccgtatcgacatccaccagattcacggcggaagcgatggcggaaaccagcgcatcagcggcctgatcgaccactttggccacgtctggatcccccgcacgccaacgctggaggaatgtatcgatggcctcgctgctggtggcatccccatcctcggcaatgccggcagcctcgaccaaggcgcgacggcccgcaaacgcctcaaggcacccgtggcgcccgcagctgcacaacggcccatccatcgccacggacagatggccgatctcgccggcgaatccgtgcgagcccatcaccacttcgccgtcacgcaccaccgcgccgccgatgccgatatcggtagacaggtaaataaaggaatccgtgcgatccaccacattcaggaaggacgcacgttcggtggcataccccggaatctgagcgatggcggccatcttcgcttcgttaccggccaccacatccagccggcgtaccacgttgaaccgggtgaggttgacgttttcccaacccagattgcgggccaccaacagccacatgtcgtcggtgacgatgcccggcagcgcaagcccggctcccaccactttgcagccacgtcgtttgagtcggctttccaacggaaaggtcatcgcatcgagcttggcgaagatctcgtacgggtcagtgccggtcatatcctcactcacccactcctgaccgagagtgtcgccgttcagatcgagtgccaggcaaccgtagccatcggtgttgatctgcaggccgatgccggcgatggacccgccatgaatctccagcggcgtgctgggccgcccatatgtggtggagacgaccggctcgccttcctgcaccacgccactatcgatcagcatcgaggccaacagcgaaagcgtggccttggtcaggcccgtttccttggccaagtcggccctgctcatgggtttctccgcgcgcaacaaagtgtcgagaaccaccgacaaattatggttgcgcagatcctcctgattgatcctgcgtagacttgccataggctcctacctccttgcacccctagtctcgaacgccgcacaggcgctcacatccgtctatcgcacaatgatattgtgcgtcaaacgattgaaccagatacgcaccctcgcgtgtttccgtttgcaatcatacactgcaatacagtatagtttaatcgtctaacttattggttgtggcgcgccgagacttgcaagcgcgaccctcatcgaggaggaatgcatgacgagagtactggttgccggcgtagatacgtcaactcaatcaacaaaggtccgcattacggacgccgccaccggcgaacaggttcggttcgggcaggccaagcacccggatggcacctcggtcaacccggaattctggtgggaggccttcaccaaggccgccgagcaggccggcgggcttgacgatgtcgcggccctcgcggttggcggccagcagcatggcatggtcattctcgacaagcagggcaacgtgattcgcgatgcgatgctctggaatgacaccagttccgccccgcaggccgccgccctgatcgacaagctcggtgcaactccggccgagggcgacgaaccggacgacgtgaccgcccgcggcaagcagcgctgggtcaaggccgtcggatcctcccccgtcgcttcctacacgctgaccaaggtggcgtgggtggccgagaacgagcctgagaacgccaagaagattgccgccgtctgtctgccgcacgattggctgagctggcgtatcgccggctatggcccggtggccgagggcgaggacgctcatctcgaagccctgttcaccgaccgttccgacgcttccggcaccatttactacgatgccgcgcatgacgagtaccgccgcgatctcatcgccatggtgctgacccccgccgagggcgaggaagccgccaaggcccacgccgacgccattgtgctgcccaccgtgctgggcccgcgtgaggcagccgccgtcaaggccgaccccgccattgccggcaaggacgttgaaggcggctgcatcatcggccccggcggcggagacaatgccatggcctcgctgggcctcggcatggccgtgggcgatgtgtccgtatcgctcggaacctccggcgtggccgcggccatcgctgaaaacccggtgtacgacctgaccggagcgatttctggctttgccgactgcaccggtcattatctgccgcttgcctgcaccatcaacggttcgcgcattctggacgccggtcgcgccgcccttggcgtggactacgacgagctggccgaactggcctttaaggccgagccgggtgccggcggcatcaccctggtgccgtacttcgacggcgagcgtacgccgaaccgtccggacgccaccgcctcgctgactggcctgaccctgcacaacaccaccaaggagaatctggctcgtgcgttcgtcgaaggcctgctgtgttcccagcgcgactgcctcgagctgattcgttcgctgggtgccgagatcaaccgcatcctgctcattggcggtggcgcgaagtccgtggccatccgcacgctggccccctcaatcctcggcatggacgtgacccgtccggccaccgacgaatatgtggccatcggcgccgcccgtcaggccgcctgggtgctgtccggcgaggccgaaccgctgacctggcagctcaccatcgagggcgtggagaccggcgagcccaccgaagccgtgtacgaggcatacgccaaggcgcgcggctgatacgctgccagcacaatccatgagataacaactgaataacgattcctgatgaatgccgccatggcaagcatcgcgaagagccgctgttataccgcgctcctcgctgaagcacacatggcggcatttttcgtttcccacgcaatccacaaatacggctataatcaagtcgtttgaacaagtctggagattcttctatgaacgaccgctcccgtatgatgctgtacgccctgaccgccgtcgcatgcgtgatttggatatggcaatccgccaaagaagcaatggccgatggcacgatgatcagcacctcaaacatcatctttttggtatgcatcggcattgccgccgtctactgcgccgccaacgcattgatattgtggtggcgtcaacccagcaaggaggatgcggagaacgatgacgccgcggatacgcctgacggtaccgataccgacaccgcagatgccgagggatccgaggacgacaccgatgacgatgtcgaaaccgacgtcgcaaccacggatgccgatgcaccgccaaccactaatcgccagtaaccatcgttatcgttcgcccgaatcaagcgaatcatcccacttcagcaaaggaacattatggaagtaacaaccgtgtcaaccgtgatcagcgtggtgctgggcgtcatatgcgcgccttgcggcctgtttctggggctcgttcccatgaaggccgatctggtgaccgccaagcagtcaaaggcctcgcagatggtgagcttcatcgttgccatagtgttcatcggcttgctggtcgcaggccatgatctggagacctgggccatggtaatcggtctggtcatcggcttcgccgttgccaagattcccgcgctgcatgcctgggctttgcacaagtggccgttcttcgagcccaagaaagcggctcccgctcccaagcgcgtcaagaaagccaagaagaagtaagctctggccttacctattcgctgaaagcgggatatcgacatcggtatcccgtttttcattggccgtacatatccgctgaggcacatcgccgaatcatattgtctacaccccaagtcagggctgatttcgcgaagaacgtacaccgggatccatccatcgcgacaaacggaaaagggacgctgcgtgcaacagcgtccctttcggaggaggaatggaactcaggtccatccccgtggccaccgggcgggcccggaggccaggtttagctcagcctttctttttcttggagagcaggtcgtaggcgacggcggcgatgacgacgaggcccttgatggtcttgacccaggcggcgtccacgcccatgatggacaggccctggttgagcacgcccatgatcagggcgccgaccatggcaccggggatggtgccgatgccgccggtgacggccgtgccgccgatgaagcaggccgcgatggcgtccatctcgaactccatgccggtctgcgcggagagaaaggagaaagaaggaatggaaaggtgccgtgcggacgtaacataacgccgcgcatggcaaaactaccggatcagcccatcgggcgcactggcatcataattgatgtgtacacgcccgatggagcgaattcaatcggtcagaccgatggtcactcgacctcagccagggcatcaatgatgtagttgttgatggtggccttgacggactcgaggtgatcggacttggtggcggcgatgagctcggactgcggcttgtcgaggctgtaggcttcgaggtcggccaaggtgacgttgccctcgtcgatgtccttgccgatgccggagtcgtaggagctgtagcgctcggcctgaagattctggatgaagccgtcctggttcatcttgtcggcaaccagcaggccggcggcgtaggcatccatgccggcgatgtgggagcggaacaggtcctcctcgtagaaggaggtacggcgcggcttggcgtcgaagttcagaccaccgtgaggtccgatggagccggcctgcaggacttcccacatgacggcgacggtctcgtacagatcggtcgggaactcgtccatatcccagccgatgagcttgtcgccctggttggcgtcgagggaaccgaggaagccggactcgcgggccacgcggatctcgtgctggtaggtgtggccggccaggttggcgtggttgccttccaagttcagcttgaagacgtcggtcaggtcgtggttgcgcaggaactcgatggcggtggcggcatcgaagtcgtactggtgcagcgtcggctccttcggcttcggctcgatcaggaactgggcctcaaagccgatttccttggcgtaatctgcgcacatgtggaagaacttggcgatgtggtcggtctcgcgcttcatctcggtgttccacaggttctcgtagccttcgcggccaccccagaacacgtagttctcggcgcccaggcgcttgccgatctccaagctcttcttgagctggccaccggcgtaggcgtagatgtcggcgaacggagaagtggcggcgccggacacgaagcgcgggttggtgaacagggaggaggtgttccacagcagcttgacaccggtggacttcatattctcgtcgatcttgtcaacgaccttgtcgaggttggcgttggtctcgcgcagggtgtcgccttcgggggcgatgtcacgatcgtggaagcagaagtactcgacgcccagcttctggaacagctcgaaggcgtagtcgaccttggccagagcctggtccatcggatcggtgtacttgtagtacgggcggtgcgcggtgccggtgccgaacggatcaaccagttcctggttgaaggtgtgccaccaagcaacgccgaagcgcagccaatccttcatcttcttgccggcaacgaccttgtcggcatcgtagtaatggaaggcgaagtcttccttcggtcctttggcgcggccgacgtactcgatcttgtcaacatcccacagacccatttgggcgctcctttgcagtaggcgatattacggattgcaggaccaataataaaacgaacgaactaagtttgtcaaatgattgaattaatacgccgcgtctcagcgtgttgctagtcattgcaatggttttcgaatgcagtcaaggcacagatagtatgggcaagccaagaaagacaactcagccaagaaaacgagacttgataattgacgtcacgcaattcctcgccggccaccgctgaggccggctccaccaccccgccaactccaacagcaccacccccgccaacaccaccgccatggtcatcaccctgatgatcggctcgtttgtggccatcctcaaccaaacgctgatgatctccgccctgcccacgttgatgcacgagttcgacgtgcccggcagcaccgtgcaatggctgaccaccggattcatgcttaccaacggcatcatgatcccgatcaccgcgttcctcatcgagaccttcaccacccgccagctgttcctgcacgcgatgggcatatttgcagaatgatcttggcgttaatgcactggtgtccggtctggtgatgatgccgagcggcatcgccatgggcatcctgaacccggtggcaggcaagatgtatgaccgtatcggtggccggccgctcgccttactgggcttcgcgatcatgacgtctgcggctgtgctgctggtcaccatcatgaacacgcacaccgcggcggccatgcgcaccggagtgccggaagcggcggcatcggccattggcgtgcgggcttcgttccgcacggtcgccattgtgtgcgcggtctgtttggttgcgtcactcttcattcgtgatcgcggccgccgacttggacagcagcgttaggcgaatccttcaccgattgctggccttcttgatcagcgcgcccaaagtaccggcttggcgcgcggcttccacatcttcccagtcgagaccggtgtctttggccctcccgtagaaaaaccgcaccagaccggcaaagtccggtttatatccggtttcccggaatgaacgggccagcgaatcaccgatttgcgggtcatcaggccttcgtgcctcatagatcgggatggaacaggatcgccacacgcctctcacatgtgcgatgcgattgacgatcatgccgccgtgcgcaccatcgtattgcgaggcggcatgtacgtccgccacctcgtagacaccaccatgaatgatgtcctcaactgtcagacgacctttgaccgcgctggcatcgcgaatccagaacatcgaagcgaaattggtgtcatcaagttcgcgaaaatcacgtatctcgcgtgtgccgatacgttcgtccttgtcatacatgaattcggccaaggctaggaatggcgagatacctgcgcccggaccgtactgcaattcgatacgtaaatcttcggattcattgccggtcagtccaataccgctgacggcgcagtcataggcaaaccaatcccagaaccaccattcgatcctttgcagcacctgcttcggatactttttgcatgggttcagattcacttcgcgataatatatgcgtctcgcttcggcatagacggcgagattgcagcgtttgaacatctcggctacgtctttggtgtccagcattgctggcaaaccggcattttcggcagtagtagtggttgcggtgctcatggtgtttccccttcatgtgatgtggacggcgggctacgttgcccgccgtgaggcacactgtatgacgttcgtgcggcggcccgcaagcccgcatggcgagatggtggataagtggaaaacccaatgattccaaggggtatggaatgtgcataacagtggctaccgtcggtggataaccgcactttcttgcaggttatccactgatcgcgcagctgttatccaccgtctctgggttatccacatcgtctctggcgtgtcgtccactgtcagcagtcgatttctgcttcgtttggcgtgtataagtgcacggtgaagtgtataactccgcgcattaggcatatttgctactgagaaaggtcccgaaatcgccttcgaacgcatagctacactcagcagatgtattcagcatggcaatagacccatttaggcaccggcgaatgattttccctcgcttatagagtcggcaaaggcccaacacctgtcccaacgccgacgctactgcactggcagcgtcggcagaggaccacaacttggcacagcaacgacgctaaaaccgcccagcatcgttacacgtccaagttttggccgctaacgacgcttaatgaacgcttagcgtcggcagcaggtcacgcactggttctccaccgacggtaacgctccttagcgaagccagcccgccactctttggcacatcaccgacgctgagagaacctccagcgaagccaaccagccaaccgctggcaacatgacaccacccacacccctcagcgaagccaaccggccagcgcatggcaccccaacaccgctgagaacacccaccccaccagtgcacataaaaaaaaactggtcatagcggttgcgatgtaattgcatcgtaatcgcgatgaccagcctcgggggggggtgggccgcaacgagcaccgaatgaatcagatgatgatgccgttgcagtgatcgacttcgtgttggatgatctgcgcggtccagccggtgaaggtggcgtggcgggcgcggaaccgacggtcctcgtagttgacctcgatacggcggcagcgcagtgtgcggcgttcaccggtcagcgacaaacagccttcctgggtgtcgaaggcaccatccgaagcggtgatcacggggttgagcatcaccgtgatacggccaccgagatcttcgtccacgaagacgatgatgcgcttgctcacgccgatcatgttggcggccatgcccacgcaccgtgaacggttggcctccaacgtatccacgaggtcctgaatagttgcctcgtcgccgggcccagccgcttcagacggcgtgcgcaaaaacgaccgcgaagtcataatagggcgttgcatgttggaatcacgcttcttcgtgccagtggatgttggtgataagcggcagggagatgccggtgccgagcgacatgaccagtcgggcggcgagcagcatcgggaagttgaccgcgagcgcgcccagtaatgtgccggcggtgaaaatcacgatggccatgatgaacagtgttttggtggcgaatttgcgcaccatgaacggcgagctcggaatcgacaccgacagcaagagcagataaccggtgacaagccactgcaccaccgaggcgccgatggagaactcctccaccggcgtggagtaggcgatgttcagtgacgtttccgataggatgccgaggaaggtcaggatcgcgagcgagacgaccgcgatgacgagtttgttggagaccggttgcttgccgccgttaggcagctgtgttgcggaatgagtcacgatcttgttctctcctccattcattcagatattctgactacgacgttggaagtcttcctgcatgagtcgcagagcctcggtcaaggtgcgtaccgtggtttcgcactggtccgaggtcaatccgcccagcagttggctcaaatgcgcgtgatattcctccacatagatgcggcggatatccaagccgcgttcggtgagcgtgagcgtcaccgcacgccgatcggcggcatcggcgtgtttgacgacgagtccgaggtcggccatttcgccgacgagcttggtgatgctcggcgtagtgacgccgaggaatgcgctgacgtcgcccacgcgcgcggtgccggtatcttgcccattcggttcgttgatatgccagacggcgtcgatcacgtggacatagcgcggtttcatacctttcggcaatgccggcatcagttcggtgatggtcttggccttccagcagacatccaggaggctccgcacctcattcaccggaagcaagccggtcttggtatcggttcgggaatcgcacatcgctggcccaacctccaattagttaccaatagtcattaccataagtaactatatgcaggctctagacaaacccaacgacctgcgcgcccgtgtcgagttccgtttcggcataaaaaagccaggggatccctggcttgcaatgcacatatcgctgcaggtttgccgggacctatatgttcccggcaacaacagccgtatatacgttaccgatcagtgctgccctcatcatccttggcacccgccgtggcagcctcagcctccttggcgttccacccggtgacggcattccaaccactccatccgatgaccactagcaagcacagcgagaagacaatagtggcccaattgaacagcgagccatcgttattggcctcgaccagtgactgccagagccagataacgcaggccaagcaggtcaatgcatacatacgggaggtggagcgcgcggtgagtttcatggcggaaaaagtcctttgattacaagaatgacggcagataacagtgtgggatccgcaccagcggcaccggcacgaatcccacatcgaggaggagaaaggggaaggtcagctcttcttgcgcttggatatgatgtccacggcgacggccagcaggagcacgaggcccttgatggtcttcaccacggcggtgtcaacacccataatcgacagaccctggttgataacacccatcacgaatgcaccaatcacagcgcccgggatggtaccaataccaccggtgacggccgtgccaccgatgaagcaggcagcgatggcgtccatctcgaactccataccggcctgagcagttgcggaagccagacgggaaagcatgcagacagcggccactgcggacaggaagcccatgtggacgaacagcaggaagtccacgcggcgggtgttgataccggagaggatggcggccttgcggttgccaccaacggcgtacacgtggcgaccgaacacggtcttggtcaggatgaagttgtagatgaagaccagcacaccgacgatcaccagcatgatcggggtaccaccctgatcagcgttaccggaggaagccagcaggtaggtgacgaaggcgatgacgaccgcgacaagcacaatcttgagggcggtcaggctcatcggctcgggcaccaggccgaccttggccacacgggcgcgcttgcgcagctggctccaggcaaagccgacaatgcacaggatgccgagcacaatggtcagaccgtcgaacggaccccaccagccaaggatgttgggcaggtagttacgggcaatgccacggaattcgagggaggtaatcggcacggattcgccgacgatcacggtggcgagaccacggaagatcaacatgccggccagagtggtaatgaagcccgggatgccgatgacggcgacccagaagccctgccagacgccgacgatcaggccgacgaccagagcgatgacgatggcgagcatccagttgactccggcgcgttccatcagcagtgcacacacaccaccgatgaaggctaccaaggaaccaaccgaaaggtcgatgtgggtggcgatgatgaccatcaccataccaatggccaggatgatcacgtaggcgttctgctggatcagggacacgaaggagttcggcttcagcagcacacctccggtcaggatctcgaaggccacgacgatgatcagcagtgcgccgacaataccgtattgacgggcattgttggcgaccgtggccagcaggccggtcttttcttctttctttgcaggtgttgcagttgcggcgctcatcaggctgccacctccctttccttggtcatacccttcatcaggtattcctgggtaaatccattcttctcgacattgtcggtgacgacaccgtaggacaccgtgtaaatgcggtcgcagataccgatgagctcaggcagctcggaggaaatcacgatgacggccttgcctgcatcggcaagcttatcgatgatttcgtagatctcatacttggcgccgacgtcgatgcctcgggtcggctcatcgaggatgaggatgtccggctgcgagataacccacttggcgagcagcactttctgctggttaccaccggagagggtggagacattcacatcgatgtcatgacacttgatgttgaagtccttgcggtactgttcgacttccttgcgctcaaggttgtcgtccacaaccccgcccttgctgatcttggtcagggaggccagggatgcgttctctcggatgttctgcagcaggttcagaccgttgcccttacgatcctcggtggcgtaggcgagacctgcgtcaatcgcggactgcacgttgggcatcttgacttccttgcccttgacgaacaccttgccggagatgttggaaccgtaagagtggccgaagatggacatggccatttcggtacgacccgcacccatcagacccgccagaccgacgatctcgccggcgtgcacgttgatgttcgcatggtctacgatcacgcgctccgcgtcgagcggatgatgcacggtccaatcctcgacgcgcaggtattcctcgcccggggtattggaggggtggttcgggtacaggttgtgcagcggacgacccaccatcttgcggatgagttcttcctggtcgagcggcgtctccggcgtcacgtacatcacaccgacggtcgaaccgtctcgaatgatggtgacattgtcggcaatggcggcgacctcgttgagtttatgagtgatgatgatgctggtcacgccctgctcgtcacgtagctgacgaaccaggtcaagcaggtgggcggaatcctcatcgttcagtgcagcggtcggctcatcgaggatgagcagcttcacgtccttggacaatgccttggcgatttcgacgagctgctgcttgccgacgccgatgtccataaccctggtatccgggtcttcgggaagtcccacacgatcgagcagcttcttcgcctcggcgcgggtcttgtcccagtcgatcacgccacccttggcctgctcgttgccgatgaagatgttctccgcaatggacaggaacgggctcaacgccagttcctgatgaatgattacgatgccgtcggcctcggaatcattaatagtatggtatttgcattccttgccatcaaaggtgattttgccggaatagctaccgtatgggtacacacccgaaagcacgttcatcagggtcgatttgcctgcaccgttctcgccgcagatggcgtggatctcgccgcgatcgacggaaagattcacatcggtgagggctttgaccggaccgaacgtcttcgtgatgttttccatcgtcaagatggtgtcatttgatgacatgtcatcactcctcgtcacagttctgtgttcatggacatgcggcgcatatcggctatgcgccgcatgtcattgtgtttgtttacggattgcctgatgaggactacttagtcagctcgtcgaagcgatcctgggtgatgtagttggccgtgaccagatcctggaggttgtccttggtgatgttctgggggtcaagcagcttggacggaacgtcgatgttgttgttgttgaacttgccgttcaggccggagacttccttgccctcggcgatctcgacgaccatgtcgtacacggcgtcagccagcttgttcacgtccttgaacacggtctcgccctgcttatccttggcgatgttggcaactgcgatctccatggcgtcctgaccggtgatgtacggccaggagtcggtgcccggcttcatgtcgggacgcttggattcgatggcgttgatcacaccctgggcgatgccgtcgtacggagtgaggaccgcgtcgagcttctcgccgtgggcgtaggtggagtcaaggatggattccatgtccttctgcgcctgctcggtcttccagctcatcacggagatcttctgccaatcctcaacggtgaagtccttggtcacgccaccctgaccgtgctgggacggggagacgagcacgcccttctcgaagtacggctgcagcagatcccaagcgcccttgaagaagtacttggcgttgttgtcatccggggaaccggtgaacagctcgatattgaacgggccggtggcgccatccttaagcttgagctggtcaatgagccacgtggcctcgagcacgccgacctgctccagctggaaggtggcgtagtagtcgacggcgtcggtgttcatgatcagtcgatcgtaggcgatgaccttggcacctgcatcgcgggccttctcaacggcggggcccactgcggtgccgtccttggaagcgaccacgacgatcttggcgtcgttgttgaccatgttctcgatgtcagcgttctgctgggccggcttatcgtcggcgaaggacaggatgaccttgtatccggccttctccagcttggccttcaggttgttgccgtccttgttccaacgctcttcggacttggtcggcatcgaaatgccgatagtggcgcccttttcgatcttggcatcaccgccagttgcctggccgctacggctgccaccgcaggccgcgaggcccgcgcacatggcaacgcctgccaccacggcgacgatcttcttagtgaacttcatttgttctccttcatcttcgaggggatggcgaaccctccttggtcgcccgaacctgagaataacctcaggttcatctcatagaataccgtattgagttaagttgtcaaactcaagaaagcgaatttcctgtcgtttatgttcaaccaatgaacgcaatgtcgatttttcgcgcatcacaaggcgacacgccgaaaaatccacgctctgcgcctcgctgtgcctcatgccggtaacgactacactgaactcttatggcaacaaggcttttcggttcgcagacctcgcttcgcgaggcaaaccgcgccaacttgctggccagcatccacaagttcggcgccatgacacaggtcgaactggcagaggtgacaggactgtccactgcgaccgtgtccacgctcgtccatcagcttgtcgacgaagaccagctggagaccaaaaacaccgttcgcaacggtcgcagagccactctggtgacccttgcacggcatcagggcctcggcgtcgggctttggatcgcgcgacgtcatcttacgctttctatcgttgacttctcgaagtcaatcatcgctgagcacacgctccccctgccgttgggccacaaggcggacacaacgctggaacgcgccatgctgctcatcaatgagaccctgagcagcatcgacgccgaagccagcgagctggtcggcatcggcgtagccgtggccgcaccggtggccaccagcgaccacaccatagcgattcccggcattctgcccggatgggacggcgtcgatatcacggccccgttgcgcacggcgttcaacgttcccgtatacgtcgataatgacgcgaatttcgcggcatacggcgaatcccgtatgggcgtggcggcaggcaaacgcaatttcgtatatatctcagccaacgacggggttggcgcaggcatcgtcatcaacggcgaaatcatgcatggcgtgaccggcctggccggtgaaatcggccatatccaggtcgacccgctgggtgccatctgttcgtgcggtaaccgcggctgccttgacaccgtcgtggcggaaaacaggctggtgcagttgctcagcgtcacacacggcaatatgacgctggatgatctggtgtcctttgccaacgaaggcgaccccggttgccgtcgcatcatcgccgacacggccgtgcgtatcggtcaggtggcggctgatctgtgcatcagcgtggatccggaggtcattgtgctcggcggcaagctggccatgaccggcgacgtattcatccaaccgttcaatgaagcgttgcagcgcatgctgttccctgatgccgtggcacccatcgatgtactcgtgtcatcccacccgaacgacaactgcgcgctaggcggcgcattatgcgccatcgagttctcggttcgcaatgacgtcagccagtgaccggtaccaggagaagagtgagaagaaggaacacaccatgaggaattcgagcacaccccctctgctgcggctggaggacatctgtgtgaagttcggcttcgtcgaggcgttgaaatcggtgaatctgtccatccaacgccaggaggtcgtcgccatcgtgggcgataacggcgcaggaaagtccactctgatcaaggtcatcgcgggatttctgcagccgggattcggccatatctatctcaacggcgaacaggtgaccattccctcgatcagggaggcggaccgcatgggcatcgcatcggtgttccaggggcaggagttctgcgacaacctggacgtggcctcgaacctgttcctcggcaaggagatcaatcagattggcatacgcgatgacgattcgatgaactcgcgtgcccgttccgtgctgaagaccctgagctcggcgattcgggtcggctcccctatcgcatccttatccgtcggccagcgccagaccgtggccatagcacgcacgctgctcaatgacccgcagcttattctgctggacgaaccgaccgccgcactgtcggtgatgcagtcggcggaagtgctcgcatatatcaagagactgcgctccgaaggccggtccgtggtgatggtctgccacgatctgccggatgtgttcgcggtatccgaccgcattgtcgtgatacgtcaggggcacgtcaccggcgtgcatcgaaccgtcgaaacgtcctatgaggagattatcgccgaaatcgccggcgtgaccaccgaacacgagtacgaggaaatcgctgagaacccggaattcgattccatggtcaggcagcggaaactcatcgaccgcactatcagcgcggcagtgagccatggcaccggccatgactcaccattagactaacgtcccgttgccggagcgacatcgtcagcgcagagccaggttggccgcgccgatcagaccggcatcctggcccgcagtggccgcgacgatcttggcatggccgcggtaggcgctgccttccaggaaacgctggtagttgtagcgggccggctccagcaggatgtcgcccacggccaccacgccgccgccgatcacgaacaggtccgggtcaagcacggcggaaacggcggccatggtgcggcccagccattcgccgatcttgccgaacgcatacaggccaagtacgtcaccttcctgagccgcttgggacaccatcggcccctccagtttggtgatgtcgccgccgcacagttccagaagacgcttggcgtcctgaggacgacggcgcacggcggacttggcgaagttctccagcgaggttcccgaagtgtaacgttcggcgcagccgcgcaggccgcagccgcagtggtcgccgtccgggaccatcggcaggtggccgagctcggcggccatgccgaaggagccgcggtagagctggccgttgatcacgatggcaccgccgaggccggtgcccacggtcagcgcgaccatgttggagctaccctggccggcgccgtgcacgaattcgccccatccggcgcagttggcgtcgttttcgacgatgaccggcacggcatggtcaatcagcgcgccgacgtgctcggacagatcgtagttgatccatgccggaatgttggcggagaaggtgagcgtcttgcgatccgcgctcacattgccggcggcggagatgccgacggcctcgatatcggtgtgcccggcggccacagcctcgcggtacacctcggcgatgtgctggttgatggcgtcggcgtccatcggcgtggggacgcgccagcgctggatgatgctgtcattttcatcgcagacggcggcggcgatcttggttcctccgatatcaatggcgagcgtggtcatggcttactccttgaagactttcgtaacatgcgagatagcgaaaatagtagcgagccgccatgacctcccaccgcggtttttccgtggtgcgccatgcgtcgcgaacattccaccgatgcgcttcctcatgcatttcacccgttgcaaacgggcgcccccttaacgccggcatcggtgcggacggcgtgtcgaatcggatgcaatcactttcaccgtccttgcggatggcatcgaagaacggcaggaaacaaaaaactcccgacatgcatcgggagtttggtggcgaccccggccggacttgaaccggtgacctccgccgtgacagggcggcgctctaaccaactgagctacggggccgtgcgtgcctcgctgaggcacaagaggatatgttacagcatcatcggattacgacacgccgtctgatacatcgttccttccaccggcgaaccgaccgcaggtgtggtggacggtatgcggaccatatcgttcgaccgctcacgaccgctctccccataagacagtagccgtcatgcgtcaacgcacgttgtgcgacaacgcggcacgacgcacggccaccgaggccagcaaaccgatgaacagcatgatgccggcgaccagaagcgtccactggccgccttcgacgaaccctgaagtcatcgcatcggcaatcttcggcgcctcgtcgccgaattgggccgccggtccatcaccgctgcggaacacgccgatcactccacccgccgaaccactgaccgcttgggccagaccgtcgccgaccttggcgggcagcccgagggattcgagccgcgccggcaatgttccgttgacggcca

SEQ ID NO: 3284 - DNA, 4265 bp, Unknown
  R151_18m  MAG No. k141_699
gaactcatttacaacaacgtctacacgagcgtggagcaactgcgctcggacgtcaaccggtacgtgtggtggtacaaccaccaacggctccactcgaccctcggatacctgagccccgtggagttcacacaacaaggaaaaaccctctagaaacagtccaacacaccgttgccaatccaccgagcccctcgcggttgcgcaattcgtcgatccggatccgttcctcggccgacaggtgggaatacactttcctcatgagcgcgacaccttcttgagttaggacttgaacgcttccaaccatagaacaggtgttgcgcctctatatagaactcaggttaaacccgacaaagtagtaatcgtagtaccatataaccgtctgattatcagaagaaatgagaattctaaatatgaataacgatactctcgctaaaataaaggctccacggcagcctcgggataacccagtggttactgctgaacgcgtccgccaagaaacaaatgccccccttccaagaaccaaaagaatagaatggattgacattgccaaggccttgggtattctgcttgttagcttcggtcacctaagaaacggtgatggccaaagcgtatggctaccggcactcgactctctgattgatggcatctatctgtttcatatgcctctttttttcctactcggtggtttgacattcagtactagaggcggtttcaaagcgttcttgattcgcaaaattcgcacactgctcatcccctattacgtattttcactgtacttccttgcaaagcctgtcgctattctgctgatcccaaacctgcgagcatcatttcagactagtcatgactacggtgttgcacatcaattttatgatgtgctcattgccgggaatgggttatggttccttatggcattcttcgttgcggaacttgtcacatatggaataaccaaatacgcaattaatagtccactgaagatagtcatagggacaatcctgatagtaagcacatttgcttggacctcattcgggctacccgacatcatgcctttccaaattatgaagggcattcaaattagtggattcatgctgctgggaatcgtaacgaaaaacacatggctttatatgacgaagagaacggccgtcatcactatggtgcctgcaatcctcatagtcgcgatatgccagattgttatcagacaaaaattactgattgatgatccactgtttcacaccttcatcctcatattcgcagcttttaccggtgccgttggttttatatgctttgccatagccatacaccagtgtcagtggttgtcccaaatcggacaagacagcatcgtctactatgccttgaacgcattaactctcaatgtcgccaaaatactggttttccgaattcttggcatagatgcgacccatttgccatatattagtcaactcattatcggtacgttgacaacagcattagccattgcgctgctcacagcagagaatataatcattcaacggtggctttggtggacaataggtaaatcgcatcagaagtaataaggagattccaaaaagacttttaactttttcataataccggctgactgcggtagtgcccgatatcttgcgcactttggtcttcgcccgtccctgcgacgatgatcagttcgctgctggtacgctcttaccgagccttgacatgtcgaagtagcgtcgtgtcaaccactcgctggaggtcacgtagcggatgcgcgcgcatatgagtgattattgggaggtttgagcaccggatgttattccgattcggcactggggttattgtgggacggcaccggcgtgctcggtattgggcactgccggtgccgttcctgtttgcgagactggttggcggctaccggccgggtgcgtgttccctcatgttgtagtcgccggtttccagccaggtggtgttgtgcactcctgtccatgatggcgtcggcgtgggtgccgccaccgagtcgttgatgccggtccttctgggggtattgggtggcgaacagggtgcttccggtgtcgtggcggcgttccatgagctcgaacaggaaggctcggaagcgttcctcgggcgggtcgaacagccattcgtcgagcgcgaggaccgtgtaggcgctgtagcgtttgagcagtctggaccgtccttggggtttgtccgcggcctgccgccattcctcctcgaggtcggggatgcggatgtagcgtgcccggtaccggttgcggcacgcctgtcgggccagggcgcagatgatccagctcttgccggacccgcaatagccctgggcgacgatgttgcggtgtcgctcgacccacgagcagtccgcgagtgaggcgaccagctcgcggctgatgccgcgctcgtcgagcatgtcgagggtgcgcaggtcggcttgcgggtagcgcagacgggctcttctggcgagcccgccgatgcgtttgtccgtgaacgccgcgtgcgcctcgtcgaccgcgagcctgatgcgttggcccgcgtccagtgcggcgcatgcgtcttcgtcctggttcacgaacgcgtcgaggagctccgtgcatcccatgtcgcgcagctggcggcgggtctgttcgtcgagcctcatcgcttcgcctccctcgcgtagtagtcggcgccgcgcacgtatcccgtggccggttcggcatcgagtcccttgaccttcaaggtctcgtcctccatgacctcgtggtcctggccggtgtcgaggatcgtcttcagctgccggtgacggggcgtgttcacgaccctgcgggccacgtcgcacgcgttctccagccgttgccgcccatagcggcgcgatagtctcagcaccgccaacgcagggtcgatcgcctggtccggggttcctgccgactggaagatgcgggcgatgacgatgacggtgttcggccccacttgagcggcccacgatcggacccattgttcgtcccattcacgccatttcgccttttccggcaggtccgcggcgcgggtggagacgcggttgatatggccgtgatcgaacaggcggtggacggcggtccgttcgcctccatgccagacctcgagcagggtggcggtctcgcgcagctccaccctgcgtccggccagccggtgcggcacggaataccggttgcgtttgtagacgatatggcagtcgccggtgaccttcctcgacccgacccattcgccggtctcgtagggcacagcgggcagcgggatcatcgccggccgctcctccgattcgaacgaggcgagacgactgccttcacgtttccggaaaggcgcggcgttgtacgcgtcgagccattcgcgtatcgccaggttcagctcatcgagagagtggaactccctgtcgcgcatcgctccgatgacggcgcgttcggcgtgcaggacgaggttctcgccgctgggcttgtccttcggcttcttcaccctgcccggcagcaccgccgtggagtagtgttcggcgaggttgcggtagtggtcgttcagcacgatctcgccatcgcggggatggctcacgaccccggtcttgaggttgccgcacacgatcctggccggaaccgcgccgaaatagccgaacatgagcacatggcagtccagccacgaggattcgcgcatgtcgccggtcgcatgcacgaacgagtaacggctgaacggcaggcacccgacgaacaggtacgccttcgacgtctctccggtgaccgtgtcatggatcggcacgatcgccccggcccagtcgacctcgaccgtacgcccggccttgcgctcgaccctcgaggtgacgcccaggcgcagcacgtgatcggcgtacagtttgcagaaccggtcgtagcccatgaacggaacccccttcacccggcacgagtccgcgtactccgcatgcagcagcctcaatgtgacgcccacacgccccaattcgctgtgcacgcgcgtccagtcgggctgctcgtaggcactctctattacgcccctgccgggaaacagcagggcgtacacctcgtcatcggctttgccctccacgtcactgtaggagacgttaagccggtcggcggtgtcgaacacgtcgatcacgctgtgcttcgacataccgtagcccacggctatcgcgttgcgcgacaatccttgctcgcgaagcctgagcacgagcttcgccttgattctgcgtaccatcgttggcactcctttcgccatgcgtccatcgcatggatggaaggagcctaacccaaacggcgccgaaccacaataac

SEQ ID NO: 3285 - DNA, 12824 bp, Unknown
  R151_18m  MAG No. k141_757
cctgaaacttatcaatccaccattgttcgatttcagacgccgccattacgcacctccttccacgctgtcaccagtgtacgttacctgtaccgaaatcaatccaaaaaacagtgttcatgtgaaattcactgcgtatttgcgctttcgccggcttaccgagattagccttagacaaggaataacagagtagaagcagaaggtatgcgcgtattcgatttcgacggaaccatctatgatggcgaaagcctgttcgacttgtacctgtattccgcccgccacgacccgaaagtgttccgctatatcgcccccgtgctgcggtacgcggtcaaatacaagcttggccgggccacgcttgaacaaatggaatacggcgtgggcaagatgaccgaaggctatctcacggaactgagccgatccaaacgggtggcgagcgtcgaacagctcgtggacgatttctgggaccgatattacgcacgtatcaagccttggtaccagcctgagtcggacgatgtgatcctcaccgcatccttcggtctggcggtgggggaggcctgccgcagactcggcgtgaggaatctcgtggccagcgaggtggatgtggagacgatgaaggtcacgtacctcaacttcaacaccaacaagaccaaacggttccgcgaactgtacggtccggacgccgtcatcgacgagttctacaccgactccaagttcgatcagccgatgatcgacatggcccggcatgcgttcatggtcaaggggaacaccattacgcaggtcaagtaggaaacagcagaaaacaacacaacgtaaccaataacgaaagaggaatccatatgagcatgccgctcgatctatacgtaatccggcatggcgaatccgaagcgaacgtcatcgtccaggcgggcgaacagggcgacaactccctgtatacgcaggacaacgtcaccgtacccgaccgctcctggagactcaccgccaccggacgcaagcaggccgactgcatcggacgctggctcgtcagccagcagcagctgttcgaccgttacatggtctcgccatacgtgcgcacccgcgaaaccgcggccaccatggccctgcccaaggccaaatgggaggagaaccgtgtgctgcgcgaacgttcttggggtgaaatcaacaccatcaccaaggacgaattcaaaaacaactacgcacgcaactggaacttcaagaataccgatccgctgtactggcgtccgccggcaggcgagtcgattgccgatgtggccgaggaccgtgtgcacaacatcctgacctcgctgagccgcaaatccgattcggaatccgtggtcatggtcacccacggcgacttcatgctcgccctgatgctcaccatcgaggatctggccgacgaggaattcctgcatcgcgccgactcggacgactggaagatcaccaactgcacctgcctgcactacacgcgccgcgacccggaaaccggccgcacctccaagcgtgtgcgctgggagcagaccgcccggcccgtgctcgacgagacgaccggccgctgggaggtcaaggtggagccgtggcgcgaattcaagcgcccgtacctgtccaatggcgatttggtggatgtggtgcaggccgtcgatccgcacctgctggagtattacggcaaatagcctttcccggaagagagacttcacaaaatcttcgtgagctagaatggcgcgtagtgcggctggttgtgaatgccgtgccccaagcgagagcgaggagagtagtaatgtccaatatcttccaatggcaattgcatggcgacggcaagacgctggcgcccggcgaggtcgtcgagcccgatgaacgtctgacttgggtgcgcaccgccggtatcggcgcacagcacgtcatcgccatgttcggtgccaccttcctagtgccgattctgacgggcttcgacccgtccaccaccctgttcttcacggctatgtccaccgcactgttcctgcttatcaacaggaacgtgctgccgagctatttgggctcgtccttcggcttcatcgcaccgatcaccgcggtcaccaccgccaacaagggcattgcggtcgccagcttcggcatcatggtcaccggtattctgctggccctgattggcgtgctcgtgcattacgccggctccaaatggatcgacatcatcatgccgcccgtggtcaacggcgcgattgtggccatcatcggtttcaatctggcaccttccgtgtggaccaacttccaagccgcgccggacaccgcactggttaccctgctggccgtgctgctcgtggccgtgctgttcaagggcttgctgggtcgcctcaacattttggtcggcgtaatcatcggctatgtatatgcctgcatccgcggccaggtcgacttctccgccatcggtgacgccgcatggatcggcttcccgaagttccacctgccgcaggccgatttttccatccttcccatgttcgtccctgttgtgctcgtgcttgtggctgagaacgtcggccatgtcaagtccgtggcccagatgaccggccgcgactacgacaaccagatcggcaccgccctcatggccgacggcctgggcaccacgctcgccggcttcggcggcggctccggcaccaccacctacggcgagaacatcggcgtgatggccgccaccaaggtgtactccaccgccgcctactggtgtgcagccgccttcgccctgatcctgagcctgtgcccgaagttcggcgccgtgatcaacacgatccccgccggagtgctcggcggcgtgaccacgctgctgtacggcatgatcggcatgatcggcatccgcatctgggttgagaacaaggtcaacttcgacaagccgctgaacatcatggtggcagccatcaccatgattattgccatcggccaattcgcgttcactgttggtggcatttccttcaacggcattgccattggcacgatcgtgattcttgtggcctaccacggcctgaaggccattggcaaggcaaccggcactatcgccaaagacgatccggatattttgtagtgtgttttagggcttgtggctcagcccttttgcacaatggctcctaccttcacgggtaggggccatttgcgtgttccatggggcggtgctcgccttacgtggtggtagaacccatggggcggtaattggcccatggggcggcaaacatcccatggggcggtaaaaccctcatggggcggtaggtgaaaatggctttattctgcggtttcacaatttcttcaaaccgcctcatgggcaagttaccgcctcatgggcgagttaccgccccatggggtcataagtaaagagtggaatgacagcgtggcgagcatcaagcaaagtagggggcttacgctaagctcggaaagcttgcgtaatttgcgtaacctttgacatgaaaggccactgtgccccgtaataatttcgatgatcgtgacgattccgctgatttccagatgaacgacagcgcggaatcccgcccccttacctttggcgaacttggcgtacccggaccgctggtgcgcgtacttgcggcagatgacaagaagaccgcattccccattcaggccgacaccctgcccgattcactggccggccgcgacattctcggccgagggcgcaccggctccggcaaaaccctcgctttctccattccgctggtcacccggcttggctcctatgattcgcttggcgaaatcgcgatggaggagttccgcaaggaaatcaagcgtcgcaagaaggccagcttggaagagcgccgcgctgacgatttcctgccgcacccgcgcggcctggtgctggcccccacccgcgagctcgcgaaccagatcaacgacgtgctgatgccgctggcccacacgttcggcatgaacaccaccacggtgtacggcggcgtcaagtacatccaccagatccgcgatctgaaggccggcgccgatatcgtggtcgcctgcccgggccgccttgaggacctgctgcgccagcaggcgctcacgctctcgtccgtcgaagtcgtggtcatcgatgaggccgatgaaatggccgatatgggcttcctgccgccggtcaagcgactgcttgagcagatctcgcccgacgcccagcacatgctgttctccgccacgctcgatcacggcgtggatgaagtggtgaacaccttcctgcatgatcccaaggtgcacgaggtcgattcggccaccaccgaacctgacctgatgacccaccacgtgttcgagaccacgcgcggcgacaagcacgaactcgtgcgtacactcgcctcgggcgaaggtcgccgcatcctgttcacccgcaccaagttccaggccaagaagctcgccaagaacctgacgcagaacggcattccggccgccgagctgcacggcaacctgaaccagaaccagcgtgatcgcaacctcgccgcattcgattccggcgacgtgcgcgtcatggtggctactgacgtggccgcccgtggcatagacgtcggcggcgtggagcttgtggtgcaggtcgagccgccggctgacccgaagtcctttgtgcaccgctccggccgtaccgcccgcgccggcaaggcgggcgacgtggtcaccctcgtgctacccgaacagcgccgcgaggcgcgccgcttgctgaaccaggctggcatcaaaaccaagatgatcgaagtgacccacgattcgcccgaagtgcttgagcttgtgggcgaccgcgccgagcgcgtggatggttggagcctcgacaagtcgcagcccgtgggcaacccgcgcaagggcaagaacaggggcgccaagaacgcggcgggcgatgagtccggccgcagcggcaggcgcaagcacaatcgcaatcgcgaccgcgccgagcagaacgttgccgagaccggattccagcacgagaacgcaggcggcgagtttgttgccgaaggcgagccgcagcgcaagcacggcgacaaggccagcaagaaggccgtgaagaagaaccgcaaccgtgcggaacgccgcgccggcatgagcaaccccgaggccgagcgccgcgactatctgttcgagcatggcgatgaccgccgtaagggcggccgtcgcggcggatacggcaaaaaccgttacgacgagcgccaggacgatggccgcaacgagtacggcaagaaccgtcgcaatgatcggtacggcaagggcggaaaattcgacaagcgcatccatcgcaagaacgagaaccgcatcgtacgcgacgagcgttcagaaggtgccaagcgtcacgaacgccgcatgatcgccaaatacggcaacacggaaggcccgaaccgccgccattccaagaagaatcgcaacaatgcgccattccgtatgaagtccggacgccgttagtccgacagcgcgtatgaatcaggcccgacgacctttgatggtcgccgggcctgattgtgttgtaggtcggtgttttcgatgcggatgcctgttcccgacatgatgtgtatcattgtttcataaatatgttatattaatacacaacttgatgggagccacgctgccatccatcatcgggttgttcgacggatcgcctatgcgtgggctggccgtcggactgtgggccggcatatccggggtgggcatagtgctcggcccggtcatcggcggcatcctgctgcaacggttcgcatgggatagcgtgttctgggtgtgcgccgtcatcggcatgctggccatttgcgccgccttcctgtgcctgttcggtttcatcttcctcacaacccaatggttccaggcgctgcgtgggtgttcggcgctcgagacggcgattgccacactgccgttcgcggtcgtcatggcagtgatggccgcaggcatcgccctcgtccagggtcccgccaccgacgcgctgatgacggccgtgccggttggcgaggagggtatgggcagtgccgtcaacgacacgatccgcgaactcggtggaacgctcggcgtcggcatcatggggtcgctgcaggccggtgcgtacaccaccggcctgacggacgcgctgcggggatcccacctgccccagggcatccttggcgtatccaaggaatccgtgatggctgccgaatccatctccagctccctgccgggcaccccgcgcagattgctggatgactcggtcgcatccgcgttcatggacgggctgcacagcgtctgcctggcggccatgacgattgcacttatcgccgcggtcgttgcgatcgtggccatgccaaaacggcggtaatggcctgtacgcaccctagaataacggatatgacgcaatcgcagccccgatccagacgcacgccaacccttgaaatccgcggaagaattcttgacgcggcgaggcagatcgtggaacgggacggcgtggacggtctaaccatccgtacgctgtccgcgcaggccgacgtgtcgcccaccagcatctaccagcacatcggcggcaagcaggcggtgtccgatgcgctcatcgacgcatacttcaccgatctgcgcgaacagctcatcgccattgacgaatccgaccccgtgctgcgccttcgcagggcgggcatgatctaccgcgaacacgcgctggacgcccccggtatttacacgctggtctggatggggcaggcgtcggactcggcccagcattgcctggaagccatcacgcagatcattcgatacggccaggcggcgaccgtgttccgtgacgatgacccccacctgattgcatcctccatctgggtgtccatacacgggttcatccaattcgaactgcgttccgcacaaccccgcacacgtggccgcgaacgggtcgaccggtcgtacgggtacctgctcgacctgctgatccgaggcattcggcggtaaatggtgagctccctctgatgaggtagctcagtattgatacgctgtactgccgtcggcgttgcggatggtgaaagtgggggattgctcgatgttgaggtccacggtcagggaatgctgggcgtcggtgctcgtcgaacgatagacgaagtgcttgttttccagcttcacggcctcggtacgcgcatccatcagccatgggttgtgacggcgcagtgcgatcagcgcctgatgcagccggtatgtcggctctcccagcgtggacagttcggcaggggagtcggggaacttcggacgtacgtcgtcatcgccgccgaaacgctcctgcttgacgcccacatagccctgctcgtcgccgtaatagatgcttggcacgccgccgaccgtcatgagcaccgccaatgccaacgccgccttggccgggccaatctgcgatgcgatacgcgtcacgtcatggttgccgatgaacgtctgcggcacgaaggaatccaggaacgcgttgtgccgcttgagattccaatccagctcgaagaagttctccgtctccagcgcatgctggatcgacttccatagctcgtattgcgtgatcgaatccatcgtggattcctcgatgatgcgcgggtaatcgccatggatcacctcaccgaaaatccacgaatacgggtgtgcggctttgacctgcggcaacacgcgcgcccagaacgggctcggcacggcatatgcggcgtcgaggcgccagccggcggctccgcgatccagccaatggctcatcacatggaccacatagtcaacggtctcgtcagccgaatggtcgagcgccaccagatccccgtgcccctcgaacacatccaaagcgggttcgtcattatcaccgacatgcgcgcggaccagaccatgccacgggttgtcggccggattcaagcgtccggcggtctcgtcaagcgccgcccggacggccggatgattgcggctcacatgattgaacacgccatccagcaccacctgcaatcccatgtcccggcaggccgcaatcagctggtcgaacgcggcatccccgcccaatcgcacatcgatgtgcatatggtcgagcgtgtcgtatccatgcgtcgccgactcgaacaccggacccagcagcaggccggacgcgcctagatcgcgcacgtactccagccaagggatcatcgcgtcaaggccgcggccatggaactggcgcgggccggcgggcctgatatcggcaccgcagaagcccagcggatacacgtgccagaacaccccgtacttcacccaatcgggcattgtgcggctcgaatccgtgcttacaaccactgtgcacctcctgattgacaccgtgtccattttcgcacacgcatgaccgaatcctcggtagatgacgagagttgtcgatgcaggcgccgaatcgaagcatacgactgtcccgctctgttttcacgaaaggatgcgcggcgcgcaacataacaacaccatataatccgcgcgccatgggaactacgtagccattcttccgttacaatcagtgtgacggcttccgcccccgaagaagaaggtgttgattccccttggacgtctcactggcgcatttcctccaacaagtgctttccaacccggctctgaccgtcacaacgttgctgacgctgggagtcatcttcgtcaacggctggaccgacgcacccaacgccatcgccacctgcgtgaccacgcgatgcatgcgcgtacgctccgccgtcatcatggcggccatcttcaacttcctcggcgtcttcatcatgacgcagctcaacgcttccgtggcctccaccatcagcaacatggtcgatttcggcggcgacacgaacgcggcgctcatcgccctatgcgcggcgctgttctccatcgtcgtatacagcgtgggtgcctcgctgctcggcatacccacctccgaaagccacagcctgatcgccggcctgtccggagcggccatcgccatccaaggcggcatcggcggcatcaacatgggcgaatgggtcaaggtgctctacggtctggtcgcaagcctcctgttcggcttcgccgtcggctggttggtatgcaaggccgtgaccctgatttgcgctggcatggaccgccgccgcaccaacgggttcttcacctacgcgcagatcgtgggcgcggcggccatgagcttcatgcatggcgcgcaggacggccagaagttcatcggcgtgctgttcctcggcatggcgttctgcaacggccaacccagcgtgaccggtgtgatgattccggtctggctcatgattctgtgcagcaccatcatgggcgtaggcacgtccgtcggcggtgaacgcatcatcaaatccgtgggccaggacatggtgaaactcgagaaataccaaggcttctcggccgatctgtcaagcgcgctgtgcctgctcgtcatgaccgtgctcggcatccccgtctccacaacgcacaccaagaccagcgccatcatgggcgtgggcgcggtacgccgcctctccgccatcaacttcggcgtggtgcgcgacatgatgctcacctgggtgttcaccttccccggttgcggtctcatcagcttcgtaatggccaaactgttcatggtcgtgttctagaaaggaatccacccatcatggcgagacaaaaagacgtgttctacttcgacggattccgccgcagcgcggactacgcatgccaggccgcgaagctgctgtccgaggtcatgcacgacttcaatccggaccagctgcgcgaacgcatggacagcatgcacgcgattgagaagtcggcggacgaggtgcgccacgacatgatggacgaactggtgaccgcgttcatcacgccgttcgaccgcgaggacatcgacgagcttggccacgtgctcgacgatgtgaccgacagcatcgaaggcgtactcaaccgcatgtactacgacaatgtgaccgacatgcgcgacgatgcggtccagatgtcggatatggtggtgcgcgccacggaaagcatctgcgagctggtcaacgaactgccgcgattccggcattccaagacgttgcgcgaactggtgttcgccatcaacacgatcgaaacggacgccgaccacctgttcatcgagtcgatgcgcacgctgcacaccacctgcaccgatccgctgcaggtgttcgcctggcatgacgtgtaccgtcacctcgaacagtgctccgacgactgcgagcgcgtggccaacaccatcgacagtatcgtcatgaaaaacagctgaggttggtttttcacaacctccctctgatgagccgagccgtgaagaaaacgccggaggtgtttttaggcaagggtgagtgacaacgagcgaataagaggtcagctgcaagctgtcctgaatcgcgttcgaggtggcatcgcgaagcgatgacggagggagagacctacttgaccaaaggcccctcaccgatgggcgttgagccagaggatggcgagttgggtgcgattggtcaggccgagcttgtccagtatcgcgctgatgcgattgcggaccgtgccttcgctcaggaacagtctggcggcgatgtcgcggttatcgaggccctcggcgaccaacgcggtgatctcacgttcgcgctcgccaagcaggccctcgatggaatcggcggtatctctggaatcgtcggaatcggcaggatccggagtccgttcggtgagcttgccgagcacttccgcgccgagcaccacctgacctgccatcaccgcctgcagcgcaggcccgaccgccgccacatcctgtttgatgagatagcccttggcgccaagccccatcgcctgcgcgatatacgactggtccgaaaacgtggtcaggaacagtatgcgcgcggccgggtccgtggccagaatctcacgcgcggcatccaaaccgctggtgccgggcatctgaatatcgatcagcagcacgtccggtcggctcgccggcgtctcgaaataacggcgcacggcggtatcgccgtcatttgccgtccatagcacctcggccgtgccggtggccgtcagaatcgtctccaacgactggcagacgatcggatcatcatccacgattgcgattctcatcaatccctcgattccatggtccaacgcttcttcggcacggatacgaacacacgccagccgccctcatacggcccgcaaaccgcagtgccgccaagggcgcgtacgcgcgattcgatatccgccaaacccatgccgcgcatcagctcatcggccgaaccgcgcatatcggcaacactgtcggcggcgagtcgcgagccgacgcgcgtggcacacatcgcacgcgggcggacagcggccgtccgggacccatcggactcggacacggccggccccggatcctgaatgaccaactgccagaacgcggggaagtcgcgcaacgtcacgctcgcctcgtgcgccgcactatgatgcaccacgttcgacaatgcctcgcgaatcacggtcgtgaaacagcgcgagaccggcgcgggcgccttggcgatatcgttggccagcgtcacggcgaaaccgggggagatgccgtcgaacgacgtgacggcatcatcgatctgcgcggcgaaatcagtgccgtcatcctcaagatcatgcaccgaacggcgcaccatcgtcatcgcatcatccaacgtcgcacccaacgtggcgaacccttgcgcagcgaccgtatcgttcgtcgcctcggccaccgtcctgccggcctgcgcctgcatgatcgcgcgggtcagcagatggcccacattgtcgtggatctcccgggcgatacgcgtgcgctcgccgagggtcgccatgcgaatcgactgggcgcgttcctcatcgatgtcggcgatgcgcgaacgagtggcccgcgaggattcgcgcgccctgtcctgcgcgtgcagcaacgcgcgccgcgcctcgtccgaggaggcgcgggcccggcccagaacgaatccaagcagagcgaccatcgtcatcaccagcgtctggagacggtcggtgccacgggcgaaccagagcgcgatcagcggcaacacccatatccagcgcgcggcgaccgaaaaccacggggccgaacgtattgcatcggcaagggaacggcgagaggccgcggtccgcgagacactgggggagcggccgcttgccgcagtccgtgccccagcccgggctccggtcgaggcgagggccggcagctgtgcagtatcgtaggcgatgagcggcatgaacgcgcaccatgaaggcaccgtcacggcgatgacgagatacgccgtacacaagacccaagaccattgcgcgggacgcagccattccaccaatccggcgacggaaacggccaacagcaggccggcgatgaacacgccatcggaccgtagcccgacaagccaggccaaagccaggcccaacacgagtagcaagcccatctcggccaacacgcgcatggcacctccccggctcgacgctcttccaccaccagtctagcggtgtgcggaacacgacgaacttgacgggcgtgcggaattattcgcatgacggtccaagacaacgggtcacacttcccgaatagatgaggcacaagcgtcggatgctgtcgacacaaccgtaaagggatgataccgatgattgcgcaaagccacagggcgtccaactattcgatggacgagatcagcctgatgccggtcgataaggtgtacaaggccatgcagaccgacgccgaaggactgtaatgacaaatgtcacgcctgtacggccaagtcgtgacgtttgcctgtggcggcgtccggccccttcttgggatgatggaatcgccaaggaagggagtgactatgacaaccgacaacagagcttccgaacacgactcgacaaccaacccggctctggccgtgcacgtcagccaactggtcaaacgctacggcgac

SEQ ID NO: 3286 - DNA, 8115 bp, Unknown
  R151_18m  MAG No. k141_1263
cgcggcacatcatcgaacacaatcactcatccaatccattcatccacaaccacaaggtgagaccatgaccgactcaaccgacgactacggctacctgctcgtccacttcatcgaggattcggacggctatgctgagaagatttacatggatatatcggacggcgacaatccccatcgttggattccgctcaacggcgggcgaccggtactgacatcggatatcggtactaccggtgtgcgcgatccgcatatcatccgcaatccgcaaaccggcatgtggtatatcatcgcgaccgatttgcgcgtattcggcggtgacaacggcggatggtacgaatggtctcatcatgcgagcacgaatctgatcgtctggcaatcgccagatctgctgcattgggaaggccctcgcatgctggacgtctcccagcgcgccgacggcacgcatatgcaacttggcatggcatgggcctgcgaatgcctgtgggtgccggactattatccggaggaatatgaaggcgattgcggcgcattcgtaatgtactggtccagcaccgtattcgacgatgcggatacggcgcatgatgataattctgtgaccagttccgtgctgtggggcgcgaccaccgacttcacacaggatacgttcgaattcggcggcgtgctgatcgacaccggtggcgattccatcgacaccaccatggtgcagcgtccattgccggacggcgggctgcgcacgtatcgcatcaccaaagacaattccttcggcaacggcatttggatggactacaccgatgcgcggcgctggtgggaatccgacacgcaatggcatgtcatgcaacgtcatatcggtgcgaattatgtggaagacggcaatcccggcggtgtggaaggtcccgcggtattcgctaaccatcacaacaacggtgggccggacgacgaatggtatctgttcgtggacgtcataccgtcaatcggctacaagcccatgagcacgaaggatcttgacgccggctggcatccgctaaacgccgcggattatttcctctcgccgcacaccaagcatggcggcgtcgcctcgctgactcgcgaggaatacgagcgtctcatccaagttctctgattcgtaaagcccctctaattcgttaaaaccacgcggttttaacgcttgatggtccctagacacgcaatccccgtactgcttccattttcgccctttttcgggccacgaaaatggaatagcagtacggggattacggttttcagactttaggactgggactcggaactcagccgaaatctactgcgtatttccgttggttccggtctggccgttggattcgctggtggagcctccgccgctagtatcgccgccggctccgccggaattgtctccgctaccgtctccgctgttgctgccgttgctgacggttccgccggttccggaattgtctccgtctccgttaccgccgctgttctgatcgctgttctgcgtcggatcaggcgtggtctgctcggtgttctcctcgaccttcggcgtctcctgattctgccgtgtctcggtcttctgcgcgccggtgccccatgtgccgtccgggccgccgattttgccgttgtcggttggctcggtgaaggtcatcacctcctgattctgcagggcgagtgacatgaactcctcgaacagatgcgacggatagccggtggaggaaacgccatagcctgcgaacggtggcacttcctgcgcgctgccgtcttccgcaggattccaaatggcccacacattgagcagttgcggcgtatagcctacgaatgaggcggccttctcatcgtttgcggtgccggacttgccggccacctggcgtccgagacgtgccgaaacaccggccgcggtgccgtacgtggtggtgccctgcatggccttctgcaccaagtggcaatcgtttgcgtcgaatacctgctggttctcctgcgtcgtcttgtacagttccttcgaaccgtcggacgtgagcaccttgtcgacgatgtgcagcgtgtttttcacaccatcgttggcaatggtggagtggccctgagccagatcccatacggtaatgccgttgatgcccagaatgttgtaggtggtgtcttcggcaatgtctccctcaatgcccgcctgatgcgctattttggcgagattcgcggcgccgagatgcctgttgacatccatgaacacggtgttcaccgaattcgcggtcgcctgatagaggttgatatacccccagttggtgttcagtgcgttcggcacctgcgcggtggttcccggagtcgtctcaaacgtcaggccggaattaccgttgaacaacgtgttgaaattcacaccctcctgagcggctcccagcaaaccgaacggcttcatcgtggaacccggctcgaatgtggcctgtgtggcgttgttgagctgcttggtgaggtaatcgttgcctgcatacatggccttgacggaaccggttttcggatcgaccacaatgccgcccacctggatgctttccggcatgccttccggccgggtgtcgccgacctgttggatctcgtcctgcatgcccttgtcaagcgtggtgacaatcttgtagccgccggtttccaaatcatcggcggtgaacgctttggaattgaccagttcgttcttcactgtggtcagcagatacccattggcgcccgccatctggttgttctgctggatttccgacacggcggggaactgcgcttccgtcttttccttggcggtgatgtagccatcttccttcatgatgttgagcacgcggtcatatcgtttttcagcctgcttagggttgacggccggatcccatgagctcggcgcgggaatgatgccggccagcatggctgattccgacaaggtcagatcgctggcgttcttgttgaaatacgccttcgctgccgcctgaatgccatacgcgccacgaccaaggtaaatcgtgttcatgtaattgcaaagcacctggcttttatcttgtgcctgcgcgatcttgatggccaggaacgcttctctcagcttgccggaatacgacgtggtttcgcccaaatagtagcgttccgcatactgttgggtgatggtcgaaccaccttgcctgctgccggtggtcaagttcgtatacagtgctcgcgcgatgccatacaggtcgatgcccttgttggtgtagaaggatcggtcttccgatgcgacgatcgcgttgcccacgtaatcaggcagtaccgcgcagtcgatgatttcgcggttttgctccgcgtagctgccaatttccgtagtgccgtcggaatagtagacggtggttttttcggcgagggcaaacttctccggttcggggatttccgtggtgatatacatgtaggcgaacaggccgattcctgctgcgagcagtgccgcgaagatgccgagtacccacttcagtacgagatgcttgcgtttgttctgctttttcttaggtccgttggcgcggtgcgatccatggttctgcggcttgggcgcgctatggaatgcgttgctgcgattgctgctggcgccgccgttgcgggcgcttcttgagcgtgagcttacgcttcgtgtgtgtgaaaccatagcttccaccgtagctgattgacttgagaaatcaggtggaaataggtgcgtttgccttggcgggggcattttttgcgcagctcttttacaaatcgacagtttgcaggacgttgtctcaatatcggctgattttcagggttttgtcagtttttcaggtgccttttcgctgtttcgcaggtatgcttgagaattggtacctgtaacgcatacacatatacagaggagtcgtttacagatgagcattcgtgtggctatcgccggcgttggcaattgcgcttcgtcgctggtgcagggcgttgaatactacaaagacacgaaggacgaggataagattcccggtctgatgcacaacaatttcggcggataccgcgtgcgtgacattgaattcgtcaccgcgttcgacgtggatgcgctgaaggtcggcaaggacttgtccgaagccatcgaggcgtcgcagaacaacacgatcaagtttgccgacgtgccgaacctaggcgttgaggtgctgcgcggcccgaccaacgatggtttgggcgagtactaccgtcagatgatcgaagagtctgacgccgagccggtcgacgtggcccaggtgctgcgcgacaagaaggtagatgtgcttgtttcttacttgccggtcggttccgagcgggccgacaaggcgtacgcccaggccgccatggatgccggatgcgcgttcgtgaactgtctgccggtgttcatcgcctccgatccggagtgggctcagaagttccgtgatgccggcgtgccgatcgtcggtgacgacatcaagtcccaggtcggcgccacgatcacgcatcgcgtgctcgcccgcctgttcgaagatcgtggcgtgcgcctggaccgcacgtaccagcttaatgtgggcggcaacatggacttcatgaacatgctgcagcgttcgcgcctggaatccaagaagatttccaagactcgcgccgtcacttccgtggtgccgcacgatatggacccgcacaatgtgcatatcggtccgtccgattacgtggcatggctggacgaccgcaagttcgcgttcgtgcgtcttgagggtaccacgttcggcgatgtgcctctgagcttggaatacaagctgcaggtgtgggattccccgaattccgccggtattgtgatcgatgccgtgcgtgccgccaagatcgcgctcgaccgtcatctggccggcccgattctggctccgagctcctatttcatgaagtcgccggccgtgcagcacgaggatggcgaggcccgccgcttggtggaggagttcatcaagggcgaggttgaaggcagcgaagagcagcttgacgccgatgtcgccgccgccaaggcagctggtaaggatgtgtggcgtgcctgatttttggttcgcctgatatgaggaatccccaatctaccgtcggtggattggggatttttaattacgatttggaaacgatgcgtattgtcacttcttgagaaggggttcgacctgttcctcgtacgcggtcaacgcggtgtcgatcacgttgtgcatgtcgtagtacttgtacgtgcccaaacggccgccgaacaccgtcttcggctcggccttcgcgagctcctcgtacctcgcgtacagcgccttgtcggcctcggtgttgatcggatagtacggctcgtcgccgcgctcggcgaaacggctgtattcctcccacaccacggtcctgtcgggattctgcgaggcggcgcgttccggattgaagttcttgaactcgatcgcgcgcgtgtacggcacgtccgcgtcggagaagttcatcaccgggcagccgaaatggtcgccctcgtcgtagcggacctccttgaagtcgaccgtgcgccacttgagctcgcccagcgagtagtcgaagtagcggtcgaccggacccgtgtacaccaccggcacgccggccgcggccaaagccttcttgttgtacggctgggactcgtcgaagaaatcggtctccagggtcacgtggatgcgcggatcgtcgatcatgcgctccatccaggcggtgtagccgtcggccggcaggccctcccacgtgtccttgaaatagcggttgtcgtagttgaagcgcaccggcaggcggttgatgatgcccgcgggcaggtccttcgggtcggtctgccactgcttgcccgtgtagttcttgatgaacgcctcgtacagggggcggccgatcagcgagatgcccttgtcgttgaggttctgagggtccttgccggccagctcgccggcctgctcggccacgagcgccttggcttcggcgggcgtgtagtgcgcgcggaagaactggttgatggtgcccaggttgatcggcagggggtagacctcgccgtcgtgcgtggcatacacgcggtgcacgtagtcggtgaacgaggtgaacctgttcacatagtcccacacgcgctgattggacgtgtggaacaggtgcgctccgtacttgtggatctccgcgccggtctcctcgtccatgtagctgtacgcgttgccgccgatgtggtcgcgcacgtcgatgatctccacgcgcacgccgagcctctccacggcctgctgggccacggtcaggccgaacaggcccgcgcccacgaccaccagatcgggatattccaccgcttcagtcataagaacaaccttccgaacttaaaacaaacacacaatattcgtgtgcgattcctcatcaagcatacccgtccatcctcctcatcaagcatacccgtccatcctcctcatcaagcatacccgtccatcctcctcaacatggggtgcagcatttttgacgttcgattttttcgtatggcgatgcctgcatggcgacctgtggcatggcctacgtgggtttccggcgcggttcggtccgggcatggtgtacactggtctttgcctccgcgtggcggtacgtcacccaactcccccagggcaggaatgcagcaagggtaagtggcctcttccgggtgcgtggaggttttcttatatcttcttgccattcctgcataccgtagagccgatgtcgtattctcgatgattatgaccgacgaattcaagccaatcatccgagacccgcataagtccgcgaatatgttggaacagccggtcgcgcccgttcctgcaccgcagccgccatcgtcgcagacggcttcccaacaatcatcgccgcagtccgcaccgattcccgcgcaatccgcgtcggatcaacaatcctcgcagtcttggcaaaaactggaattttccgacaccgcgcaggttgcatcagccgcaccggtctcgccgattgcgcaaaccggccaagtcgatccgatcgaacaggtgctttccccacgtgaagtgaacgcaggactcgccaaagtcgatccgctgacccgtcgcccgcgcgtatcgagcatcgtgctcagcgtggcgttcggcctgctgctgcttgccgccgcagcgggcgtctggtggttgggcgtgcgcacgatggaaggccaaagctatgaggatatggtctggtcgaaattcgacgcggccctgccgggatggctggaaccggtcgtgcatgtcttcaccatttccaccgttgtagtcgcaacaagcgtgattatgtcgataatcgccctcgtcgtgctcatcgtaagaaaacgatggctgttgattgcgcaactggcggcattcggcggaatctgctttgccgcggcggagttgctgaagccgctgctgccacgtccgtacctgattaatctggaatcaaatcccaataattccgcgccttccgggcatgtcatactcgctgcgacggcgggggtgatcctgttgtgcgccgtgcctcgcatgtgccgtgcattggttgcggtgattggttgggcgtacgcggtgcttgtcggattgtctgtgatcgcggggcagtggcaccgcccgactgacgtgatcatggcactgctgatcgtcggcggagtgggcatgctcatgctcgccgcaacgtttgcgaacggtatggatgagcccggatcgcgtgcgtcgtcgccttccgtgcagattgtcggcagcgtgttgctgacgttcggcgtgcttggaaccctgtatggcgcgtacattatttggcagattcagccgggacttgcgatgagtgcggaatggacgaattccggtgcgcatctttccacggtgattttgactgcttccatcgcgtcgctggtgttcggcctggtgctggctatgcgtcagctaaccgcctcgccactgacgaaacttgggctggtgggggctcctccggcaccgccgaaacgctgacgtccatacctgcgagtgcaccgaaattttacggtgaaggccgctcgcgccacacgggcggtttgccaactgcatacgatcagtgagtattattgcgttgcaaacgctagtaataaggagtggctatggctaccggcagcaagctcgtgattgtggagtctcccaccaaggccaagaaaatcggtgggtatttgggctccgaatatacggtgatggcctc

SEQ ID NO: 3287 - DNA, 5627 bp, Unknown
  R151_18m  MAG No. k141_1981
ggtcgtgagtccaattctcactcggggctctctggcggggtagctcagctggctagagcgtacgactcataatcgtaaggtcaagagttcgagcctcttcctcgctacaaatcgcgcccgctaaccggtgggcgcgcactatacctaagaacacagaggtgaatgacaatggctaagagcgccgacatccgtccgggcatcacgctggcctgcaccgagtgcaaggagcgtaactacattacgactaagaaccgtcgtaatacgcccgaccgtcttgagctcaagaagttctgcccgcgctgcggcaagcagaccgtgcaccgcgagactcgttgatcgcaagcatcacagctttacaaaacccggctcattcggccgggtttttgcgtattgactccagagccgagtggtagggtgcggaatcagtatccgcatcgcgtgagaaacggcagaaatcccgcgtctgaacgaacccctcgcgggcgttctgccgtttcagccgatgattgccccgatatcgcacctgcgccactaagataggaagtcatgacaagctttgcagacatcaccaccatgggcgtgggcggccccatcgcccatttcatcgagccgaccacgcgcgtggggctcatcgaagccgtggaggatgccgattccaaaggcctgcccttggtcgttatcggtggcggctccaacctgcttgtttccgataagccttttgacggcgtggtggttcgagacgcccgacgcctcatcactgtgccggacgaggctgcaccggtagagggcgaggatcgcaccgtgcatgtcaatgccgaggccggtgccaattgggatgatttcgtggccttcaccgtagagctcgggctcgagggcgtcgagggactgtccggcattcccggcacagtcggcgcttccgtggtgcagaacatcggtgcctacggacaggaagtcgccacttcggtcgaatcggtggaagtctgggatcgagacaccaaaacaacgcgcgacctcacacccgccgatcttcgattcggctatcgatactccgcactgaaggccagcatgtacgccggtcccggccggccggccgaccgattcttcccgacgccacgttacgtggtgctctccgtcacctttgccctgacccactcggccgaaggcacggtaggttacggacagcttgccaaagcgcttggcgtcgaagtgggcgaccgtatggccaccgccgacatccgcaaagccgtgctcgcagtacgtgccgccaagggcatgcttgaggatcccactcgctacgccttgcccgacatggccaccgccaagcgcgaggccaatatcctgaccgatctggagcgtctggcctccctcaatgaggccgccggcgttcccgttggcgatgacggcctgcctgctcccgactacaatcgccacagctgcggctcgttctttatgaatccgattctgaccgccggccaagcggcggccctgcccgaagatgcgccgaagttcgacgcgactctgcccgacggcactcccggcaccaagacgtccgccgcctggctcatcgaccatgccggctgccataagggatataaggtcgatgcggacgcgccggccagtctatccacgcagcacacgctggccttgaccaatcgtgggggagcgagcgcggccgatatcgcagctttggcgcgtgcggttcagcaggcggtcaagagcgcgttcggagtggacttggtgcccgaaccggtctgcgtcggcgtgctgtaatcgcgctattgatcgatggagttggatattaatcccatatattgcggactctaagtcttattaatagacaagacacgcgggctcttctatactcgattgtcggtattgtgcgcattcggtgcgcaaacaacagagaaaaagaagagcactatgcaactgttccgtacgaaatccgtcgaacagaccattgccgaaacgggtgaagagggccgcaagctcaagcgcaacctgacttggtgggatctgtcaatcatgggcgtggccgtagccgtgggtgccggcatcttctcggtgggcgcgcaggccgccgccttccacgccggcccggccgtgatcatcagcttcctgatcgccggcatcgtgtgcggcgcagccgtgatgtgctacgccgaattcgcttcgatgattccggtggccggctccgcctacaccttcacctacaccacggtcggcgagatcatggcctggatcatcggctgggatctgattctggaaatgctgatggccggctccgtgatttccaaatattggggcgtatacctcaacgatttcatgcgcctgatgggctggaacgccaacaccaacctggcgttcggctccttccatatcgatatcgccccgatcatcatcgtggcgttctttaccacgctgctcgtattcggcaccaagatcggcgcccgcgtggacggtgctatgaccgtgctcaagatcgccatcgtgttctttgtggtggtcgtcggcttcttctacgtcaaggcctccaacttcaccccgttcattccgccgagccagccggcctccaccgtggaaggttcctccgccgtcaccggcgtgatgacccagccgctgtggcagttcgccaccggcatgaccccatccgtgtacggcgttcccggcatcctttcgggcgcggcgctcgtgttcttcgcgttcatcggcttcgacgtggtggccaccgcctccgaggagaccaagaacccgcacaagaacgtgccgctcggcatcggcgtgggcatgctgctcatcatcgtcatgtacatgctcgtggccgtggtgaccaccggcatggtctcctatgccgatctcgccaagcaagacagcccctcgctggccaccgccttcgaactggtgggtgccgactgggccgccaagatcatcagcttcggcatcgtgctgggcctggccaccgtggtcatggtgctgttgctcggcctgacccgtatcgtcttcgccatgagccgcgatggtctgctgccgcgcggcctgtccaagaccggcaagcatggcaccccggccgctctgcagatcgtcgtcggcgcggtggtggcgctcgtggccgccttcttcgacatcggcgtgctctccgacatggtcaacatcggcaccctgtccgccttcacgctggtggccatctccatcccgattatgcgcaagaagcgccccgacctgccgcgcgccttcaagatgcccggcgacccgtggattccgatcctcatcgccgtggccaacttctggttgatgctcaacctgtccgtgctcacctggattcgtttcgtggtgtggctcgtggtcggcgtcgccatctacttcggctacggctactggcatgcgcgcctcggcaagggcgacctgaccgaaacgctgtccgccgaaaccgataaggccgttaacggctgagagcgaggagcgtcccaacgggcgcgtacccttgtatcagtatttgttaaggaggattccatgccatatgtgatcgctcagccttgcgtggatgtcaaggacaaggcttgtgtggacgagtgccccgtcgactgcatttacgagggttcccgctcgctgtacatcaaccccaacgagtgcgtcgattgcggtgcatgcgaaccggtgtgccccaccgaggccatcttctatgaggatgatctgccggacgagtgggcttggtacaaggatgccgctgtcaacttcttcgctgaagtcggcgatttgggcggcgcttccgccaatggcccaatcggcaaagacccggaacaggtcgccgcgctgccgccgcagaaccagtaagctgatttgcggataagcgctgcacacagcgcatagttcggattgaaccctcggtctatcacggccgagggttcgtcgtatcttaggaacataccgtccaagaaaggggttctcatgggcttccacgcatattcgtcgccatacgactggtctcgtatcgccggcttcaaagccaccgccaaaaccgtgccgggtggcatgatcgacctgtccgtaggctcgcccgtggacccggtgccgagcagtgtccagcaggcgctggttgccggcgcagacgcccccaacgcccatggatacccggtcaccgccggcagcgccgaccttaaggccgctatcgatacatggttccgcgaactgcgcggtgtggatctgaagtccatcaacgctgccgccgtacccaccgtgggttccaaggaggccgtggcgctgatggccagcctgctgcaccttggcgaaggcgatgtggtcgtccaaccggccgtctcctacccgacttacgaaatcggtacccaacttgccggcgccaccgtggtcaaagtcgatgatgtgaccgacgtcgattcctgggtgaatattccgaatgtcaaggccatctggatcaactcgccgtgtaatccttccggcgaggtcatctccgctgactggctgaccgacatcgtggctgctgcccgtcgcatcggtgccgtggtgctctccgacgaatgctatgcgttgatggactggcgttcggtgcgccgcaatacagcctcgtcctctgcgcctgccgcgtctgcatctgctgcgtctgtgcctgccgcaccggtggccgaatccaacgagcccgcctccgataccgcattcagtctctccgccacgccatgtgccctgaatccacatgtgtgtgaaggttcggcagctggcatcctggtgctctactcgctgtccaagcagtccaacatggccggctaccgtacggctctgattgccggcgattaccggctggtcaaggaaatggccgaataccgcaagcagatcggccagattatccccggaccggtgcaggccgccatggctgcgggtctgaaggacacagccgccgtgcacgagcaatggggtcgttaccgtcgccgtctatccgcgctggttgacgcgctgaaggcatatggttattcggcacaaatgccctccggcgcgctgtacgtatgggtcaaggccaagtccggcgactgctgggccgatatggccgagctcgccaagatcggcatcatccccagccccggcgaattctacggcgctcccgcctacctgcgtttctccgccaccgccaccgacgaggccatccgttccgcctgcgaacgtctcacggcgtaatgagatcgcaagtggcgttgagccgttcacgccccaaactgggcggccttgctgccaaatttgcggcgtacggcatccagtgcggcctcggcatcatgcaaacgtgcctgtgaggtctggccgcgggcattgtcggcctcttcgagcatgtcatccagtgaaggctgcacggccgtagccgccgcctcactgagcgaagacgtgctcataccggccaagcgaatagttttgggcaggggagtggcagactccgccgaggccggcagccccagcatgactttcagctgccgcacgcattccgggtacaacacgccggccgtatcggtcggccgctccatcgtaaaagaccgggtctgatagctcaggtcggcgaaccgcaacttcaccgtcagcgtgcgcgccaccagccccttgcgccgcagcgtgctggctacttcgtcgcaggccga

SEQ ID NO: 3288 - DNA, 3577 bp, Unknown
  R151_18m  MAG No. k141_2079
ctcaaggacacgttcacccccggcacatggaactccgtgaacatcaacggcggcctgtacgcgatgcccgccgactcgggccccatggcctacttctacgacaaggacgtgttcgacaaggccggcatcagcgaaccaccggccacctgggacgagttctacgaagacgcgaagaagatccgcgccaccggctcctacatcacctccgactccggcgacggtggcctgttcaacgcaatgatgtgggctatgggcggccacgcctacaaactcaacgacgacaaactgaccatcaatatcaccaaggacaaaggcgcccagcggttcatggacctctggcagaagatgcgcgacgaagacctcatcgacgtccacacgaagagctggaccgacgattggatgaagtcactgggtggcggctccatcgccagtctcatcagcggcgcatggatggccaacaacctcctgcagggcgtgccccaagccaccggcaaattccgcgtagccctcctgcccaccatcgacggaacgcccatcaacggcgaatacggcggcagcggactggccatcgccaagaagatccccgatggcaaactcgacgccgccaaaaagttcgtcgaatacgtcactaccaacgacgaaggcatcgacgcccgcgtatccaacggcagcttccccgccaccaccaagaccctcaaccagaaggacttcctcgccaggaccacgctcaagaacaccgacggcagcgacaacgagttcttcggcggccagaaatataacgaggtcttctcccaagccgccaaggatgtcaccggcaagtgggagttcctgcccttcgaaccctacgcccgctccatctacagcgacaacatgggatcgttcttcgagggcaaaacctccttcagaacagctgcagacaactggcagaaggctctaaaggattatgccaaggatcaaggcttcaccgttcagtgaccaatactccaaacggtgaataacgtcggtatcttccgtcgacaaagataggcaccctaccccaatctccttccggggtagggtgcttttgcattcattattatcggagcggaaacacggccccgggccatgcgctgcacgcatggcaggcgggtggtgtccgaaatggaaaccacatggaaaggtccgatggacatgaacgacatgatggacacccgcacgacgggaaccgcaacggcgtgatccaccgctacctgcccaaacgctcccgcatcgaaccgtccatggccgccgacgtgcaggccatcgtggacgagaccaataaccgtcccatgtgggtgctcggctaccgcacgccggccgaggcgttcgccgacgaactgctagaattaaccgacaaacaagggcgttgcacttctaaatagacagcggggatcatccaataggcatgccgatatgtcggattagtgcgattcgggcttggaacgtgtctggtgtgggtcggctgatgtcgagtgtggcaccgatggcgtccgcgcaggctttggtgatggacaggccgaggccgtggccgggttggttggccatgcgggtggcgtcgccgcggtggaacggttggatgaggtcggccgttgcttcggggtttgtaggcggtatcgtggtgttgccgatgccgatggtgacgtgttgcccgtcgtcgtggatggtgcaggtgatggcgccgtggtcggtgttgtggacgatggcgttgcggatgaggttgtccactgcgagcgagagatagcgtgggttcgtttcgacggtgccgtcgtatgcggcgagtttgtcagcgtcgatgcgcaggtggcgtgcccgggcctgctcggcgtgggtctcaagcgcgtcgcgcacgatgcgggcggggtccgtggactcggttccggtgtcgtgcgcggtctggatccgggagagttcgagcaggctgttgatgagttcgctgcttttgcggttcgcttcgatggcgtggcggatggcgggtttgacgtcgtcggggaaccggtcctgggccatgagcgcttcgaggccggtgccgatggtggtgatcggggttctcagttcgtggctggcgttgcggatgaacgagcgttgcaggtcattggattgttcgatgcggtcgagcatcgcgttgagcgcggcggcgaggcttgcggtctcggcgtcgggatggtcgaggctgatgcgtccgacgggatggtccgggtcgagccgggcggtctggcggctgatggaatcaaggtgcgcggtgagcttgcccgacagtcgccagacgagcagcacggccagcaacgccgcggcggcaaacacggcgagggacccgtagcgcatccattgcacgacgccgtccctgacggtgagcaccacgccctccgcgccggtctgcccggaaggcgtggtcgggacggtaccggtcacgtcgcaggaatccgcgttgcatgagtcggccgtgccgggaaccccgttcggtggcgtggaaggttccgtcgtgatggtgttccggctgctgccggtggcgatggtatcgacctgatgctggaacgcccagtcgagcgagatgttctgcacgaggatcacggcgaggagcatgacgagcaggagcagtcccacggtgacggcgagacgcgtacggaaactgactggtctgcatggacgcgcggcatgcgtggccggttgtgttgtcttgtcgatgccggtcatggtatgcggtatccctccccgcgtgacgaggcgatgagtgtggggtcgggcagtctgcggcgcagcgagtacacggcggtcttgacgaggtcgggctggccgtgcgtctcggacggccacagggattcgaggagcgaacgggtgtcgatccatccgccgtcggcgcgcagcagttcctccagaagcgcgtattcgcggggcgcgaggtcgaggggtcggccgtccgcgtaggcgagccgtcggacggtatcgaccgacaggcggccgcgggagagcatggtgggcgcgtcgtccgtgtcgccgcggcgcaggagcgcgcggatgcgggcgaggagctctgggtaggcgaatggcttgggcaggtagtcgtcggcccccaggtcgaggccctgcacgcggtcctcgacaccgccggccgcggtgagcatgagcgtgcgcacgggcagacgcagccggtccacggtgcgcatgacctcgtcgccggaaagcaccggcaggtcacggtcgaggagcatcacgtcgtactgtccccgcgagagcaggtccaacgcctcgacgccggtgccggccagaccggtcgcatacccctcgtgcctgagacagtcgtccagcacggccgccagatcggcgtcgtcctcgacgatcaggatcctcgccatattccattgcctccgattccgattcatggtctccatgcgattgccttcggctctccattgtgcccggtgtgggtgtgcgttaggtgagcgcgacacgcacccatcgcacacggagagccggctgtaatgggcatcgtccggcaaccgccgggccaaagcatcgccccggcagcggcgaacccatgcaagggaggaacacatgcgaacca

SEQ ID NO: 3289 - DNA, 26792 bp, Unknown
  R151_18m  MAG No. k141_2107
accgcagacgtggtgccggttcgcggtccctgggacgagtacgaagccgtcgtgctgccgagcctgaccatcctgtctgaagagaccacgcgccgcgtgcgcgagtatgtggcgaacggcggcaagctgttcgtgacctactacactggtctggtggacgacaaggatcacgtctggctgggaggctaccccggctccatccgtgacgtggtgggcgtgcgcgttgaggaattcgccccgatgggcaacgacttccccggtgccatggaccacctcgacttggacaacgggaccgtggcgcacgatttcgccgacgtgatcacctccgtagccgataccgctcacgtggtcgctgcatttaaggccgataagtggaccggtttcgacggcgctcccgccatcaccgtcaacgatttcggtgacggcaaggcggcctatatcggtgcccggcttgggcgcgaaggtttggccaagagcctgcctgcgctgctggaggaactcggcatcgagacctcggccgaagacgatcgcggcgaagtgctgcgcgttgagcgtgcggatgaaactggcgagaaccacttcgtgttcctgttcaaccgcacccacgatgtggcgattgtggacgtggatggcgagccgctggtcgcctcgctggctcaggtcaacgaatccgagcatacggcggccattcagccgaacggtgtgctggtggtaaagctgtaaagaggtctatttgtagcgattcaaatgcgatggcgggcgtgttatcgataacacgcccgccatcgcatttgcgatttgttttgagatgtgtatactaaaagatgttatcgcaaccatagcgaaagaaatggcttcataaagccacttctcagtgtcgaggagaaattaataattgacactaggtaacacgcaatgattgcgagcgacaaaacagtttgaatcgttctagacgattcgaggaaggagaacagaacgatgaagttcactaccgccaagaaggccgttgccctcaccggtgcggttgccatgctggtttccgttgccgcctgcggctctgatagcggcaagtccagccagccggctcaggattccgacgtcaaggaaattaccgtctgggcttgggagccttcgctgacccaggttgccaaggacttcgagaaggagaccggcatcaaggtcgacctgaagaacgtcggtaccaacaccaaggaatacactcagctggacaacgccattgaggctggctctggcgctccggacgtcgctcaggttgagtactacgccgtcccgcagtacgccatcaagggcaacctgctggacatcaccgacaagacctctggctacaaggacttctacacccctggcccgtggacttccgtgcagttcgccggcaaggtctacggcctgccgatggattccggcccaatggccttcttctacaacaaggaggtcttcgacaaggccggtgttgacgccgagcagatcaagacctgggatcagtactacgacgccgccaagaagattcacgctctgggcgacaactactacatcacctccgacaccggtgacgccggcttcttcgactccatgacctggctggccggtgcaaagccgttccagacctcttccgatggttccgaagtcaccgtcaacctgaccgaggacaagggcgtcaagaccttcaccgacttctggcagaagctgctggacgagggcctgctcgacaccaagaccgctggctggtctgaggactggttcaagggcatggtcgacggcaccatcgcctccctgttcactggcgcttggatgcctgccaacctggccaactccgctgctgacggcgctggcaagtggcgtgtgacccagatgccgaccgctgacggctccaccaccaactccgagaacggtggttcttcgctggctgtgctcgcctccaccaagaaggctgacgctgcttaccagttcatcgagtacgccaaccacggcgacggcgtggccgcccgtgtggccggcggtgcattcccggctgacaaggcctccatggagtccgactcctttaagaacaccaccactgtgaagaacgccgatggcgaggacgttgactacttcggtggtcagaagtacaacgaggttctggctcaggctgctgagaacgtgtcctccgactaccagttcctgccctacgaggtcaaggcccgcaccatcttcggcgactaccttggcaagtcctacaccggcgaccagaagctgactgacggtatcgccgcttggcagaaggcactgcaggattacggcaaggatcagggcttcaccgtgaagtaagccttgaaccctcgctgagactgcctagctaatctcacctgatacacaaagccccgtgacgaatcccgtcacggggcttttaccgttttaagccccgcctagtacactcgtcaccatgcgagtgatcggacagcgaatcaaaagaatggcaaccatagcagtgactgccatcctttccgtatccctggcctcgtgcgggcaggccacggacgacaaccgtacggagatcagcgtatggagctgggaaccgagcatgggggaggtcatccgccgtttcgaaaaagccaatccggacatccgcgtgaaatggaccaatatctccggctacggcaatcttaataccgccattcaagacggttacggcacgccggacgtggctcaaatcgaatactatgcactgttgcagtacgcggtctccggccaattgcttgatctgaccgacaaaatcggctcggattattccaacttctttaccctcggcacatggtcgtccgtgcagctcgccggccgtacctatggactgcccatggattcgggcccgatgggcttcttctacaacgaagacgtgttccgccaagccggcgtggacgccaccaagatcaagacttgggatgactattacgaggccgccgaaaagctcaaggagatcggcgcgtatatcgccgccgactcgggcgacggcagtttctatgacgcgatggtctggctcgccggtggtcagccgttccacacgtcggccgacggcaaaaccgtgaccatcgatttggatgaggatgccggcacccaacggttcaccgaattctggcagaaaatgatcgatgaggggcttgttgacaccacctccgccacatggtcggatcggtggaaaagcagagtgggcaccggcaccatcgcctccgtgttctctggggcttggatgccgtcgttgctgctgtccaatgtgccgggcgcggccggtctgtggcgcgtggctcccatgcccacctatggtgggcagcctgccaacgccgaaaatggcggctcggcgctgaccgtgttgcaactgacccgtaagccggatgcggcctatcgtttcgtggactttgtggcgcatgacgcccaaggcattagcgcgcgtgtagacggcggtgccttcccggccgattacgccaccctgaattccgctgattttctggataaaaccacgattaccaatgaccgtggcattgaaatcccgtatttcggcgggcagaagttcaaccgggtactgtcggaggccgccgaggatgtgtcggtcggataccagtatctgccattcgaagtgtatgcgcgcagtgacttcaaatcgacggtgggccaggcatacgagtggtccggcagtttccacgcctatcagcagcgacaggaagccattgagatgggcatgaaggacgaggaaggcaacccgctcgaaccattggagaagcctggcaagaaagtcagtctctccggcggcctggcccaatggcagaaagacctccgagaatacggcctcaatcagggctttacgattaagtagggttttgagtaggtttttcggggagggacggaattgactgcgctatgcgcggccgatgcctgcacaccgcgttacttcacattgcgcgagtagatgtatgccatgcctttgaagatcaggtctgaatcgtagacgtcgatcatgtcggtgtcgtttttgaaaatgcggctgagccctcccgtggctaccacttggaacggctcatcgatttccttgcggaactgctgaatcgtgcgctcaatgccaccgaggaacgtgtaatacagtccggcctgcatagcagtgcgcgtattggtggccagaatcgactgcggttgcgtgatctccacttccggcagctgggcggtctgcccccacaacgcctcggccccggtgcggatgcccgtggtgatgaagccggagcgaatcgtgccggaaccgtccacatagttgaacgtggtggcggtgccgaagtcggccaccagcaccgggccgccataggtgtggtaggcgccggcgcagtcggcgatgcagtcagagcccaaggttttggggtcgtcgagacgaatgttcatgccggtcttgacgccagggcccaccaccatcggttccaatccgaggaatttgatcagcgaggcgcggaaggaatacatcaccttcggcaccaccgagcagacgatcacatcgtccacatcgtcggccgtgtaatcgctcaaagccaggaactgcgtgatcatcagaccgtattcgtctgaggtgtgcgtcgccttggtggtgatgcggtaggagccgacgatgcggtcgccctccagaaaaccgatcacgatattcgtattgccgatatcgaccgccatcagcatgggtcaggcctccttgttctcgtcatcgacattgctcgcgccgccggaacgcaacgctgcgagccgcagcaacagtcgttgcgcaagcacggttttgtccatcttgtcccaatgctcgatcttcggggtgccggcatcctccgctccggacgtgagcacggtgacaacgttggtgtcggtgccgaacccggcaccggcgtcgcgcagattgttggccaccagcatgtcgcaatgcttggacgtcagcttcttctccgcattacgaatcagatgctcggtctccatcgcgaatccgcacaggatctgcgagccgtcgtcgcgcttgcgttcgccggcccacgccagaatatccgggttggaaaccagctccacggtgatgctgctgcggccggccttcttgattttctccggcgcaatctcggccacgcggaaatcgcccacggcggcggccataatcgtgatatccgccgccgggaaggcgtcggccaccgcatcgaacatatcctgcgcggtcgtgacgcgcaccacatccaccgcatcgggcgcggtcaaggcgactggaccggagaccagcgttacgtcggcaccaaattcggctgcggccgaggcaatcgcataccccatcttgccggtggaatggttcgtcagatagcggaccgggtctagcggctcctgcgttggcccggcagtgaccagcacgcgcagccccttgagcggggaagatgagggagcctggtcatcctgcgcatccgccagcagccgagcggccacttcctcgatgcgcgccggctcttccatacggcctcgtcccacgtcgccgcaagccagattgccttcctccggctccacaatctgccagcccaattcggcgcaggttttcagattgcgctgcgtggccggattgttgtacatatgcacgttcatcgccgggcataggatcttcggcccctcataggccagaatggtggacgtcagcgtatcgttcgccaatccacaggcgatgcgggcgatgacgtcggcgctcgccggggccaccaccagcagattggcccaggccgcatcggccacatgattgatggtcgttggcacggtcggattggccgtcacgtcgccgtgcgcggccggataagcggggaacatcgtggtacgggtgggttgatgggtcagtgaggtgaatgtcaggggagtgacgaagccttcggccgctgtggtttcgataacccgcacctcgtggccggccttggtccaatcggatgccagatgacaggccttgaacgcggcgatgctgccggtgacgcccagaagaatatgtgccatagctgcctcccggccttatgccaaggccgcacgtgtgcccacgccagcgcttcccgcgtcgttgcccgacgatgcgccgcgtgttgtggtcgccgcggaccctccgtcggcgccgcaatccagtatagccattgcctccggcgtgtccggggatatagtagaacgtggtgatcgacccgaatgggcggtcaaccacgcaagataacaacgaaaccatattcgggcgtaagcatgcccgaatacatcagggagtatccatgtcccagaacaatggtgtgcacggcgagtccggcgcaaccgaagacaggaacatcgacggcgcgaatcaagccgccagcaccgacgcgagcctgaacgcgcgcgcgaaatcatcagacaagaagaacggcggcccgaaatggtggctgtggacgctgatcgcggtcgtcgtggccgcggcgctcatcgtgggcgtcaccgtcttcggagggaaaggcaagggcaaggacgcgaacgcctccggctcggccagccgatccgataccgtggccgtcggcctcaaactcgccccggtcaatcttgacatccgccaccagtcgggttcggcccttgagcagatcctcatcggcaacgtgtacgagggcctcgtctcgcgcggctcggacaacaaggtccaccccggtctggccaagagctgggagatctccaaggatggcctgacctacacgttccacctcaacgagaagatgaacttctccaacggcgacaagctcgacgccgaggatgtggcgtggtccatcaacgagctcaaggcccagaagtactacgactacgagcaggtcaagagcctggacaaggccgaggccgtggacgccaacacggtcaggctcaccctctccgcgcccaactcgaacatgctgtggtacctcaccagccgtcccggcctggtctacgacaaggacgccacctgggatcagaagaacggcgcgttgggctcgggtccgtacaccgtggtctccttcgacccgaacgacaagatcgtgctcaaggcgaaccccaagtattggggcaccgagcacaaggcgaggaccgagaacgtgatcgtccggttcctgccggacgagaacgccagcatcaacgccctcaagagcggcgacgtgcaggtgctttcgcccatctccgccacccttgccgatccgttccgcaaggatccgaactatgtggtcaagtccggtgacggttccgacaagttcgtgctcgccttcaacatggccaacgacaagctctccgacaagcgtgtccgccaggccatccgatacgccatcgaccataagcagatcatcgcctcgcgcggcggcgtggatgcccccctcggcggtccgatccccaaggtcgatcccggttacgaggatctgagcggcctgtacccgcatgacgtggccaaggccaagaagctcatggagcaggccggatactccgagtcgaagccgctggacctgaccctcacctacgccaacgtgtacggcaccgagctcggcgaccagctcaagagccagctcaagcccatcggcatcgacctgaagatcaactacgtggagttctccacttggctgcaggacgtgcacgccaacggcaactacgatctttcgctcgtggaccatgccgaaagccacgacttctacggatggaccacgccgagctactacttccactacgacaacaaggacgtgcaggccctgtacgccaaggcgctggaggccacctccgatgacgaggcctcgaagtatctggccaaggccgcgaagatcgtctccgaggacgcgccggccgactggctgttcagctggaaggtcaccgtcgcctacgccaagggcgtggacggcttcccgcagaacctgagccagaccgtgctgcccctctggcggatcacctacaccaagtagtcccggaacccatcggtcgggcgcggcgcgggagtgattccgtggcgcgcccgaccgtggacggcccatccggccggtgacgccacgggcggtggcgagggaatcgataagggaggcgttatgcggttcttgatgcaacgcttgctgctgttcgcggcggcgctgttcggcatttcggtgctggtgttcgcgatgctgcgcatcctgccgggcgacgtggcggtcgtgatggccggcatgaacgcatcgccggcgcgtgtggcggccctgcgcgccgaattcggccttgaccggccgtatgtcgtgcagtatctcgactgggccggagggctgctgcacggcgacctcggcgtgtcggcgctgaccggtcgggcggtgacctcccaggtcggccaacgtgcgacgatcacgttcccgctgatcgtgatgagtctggtcatcgcgctcaccctcggcttgtccatgggtgccgccgccgtgatctcccggtcgccagccgtgcgcggtttcctgcgcgtgctgtccatcgtgggcggcgccgtgccggccctgtggagcggcctgctgctcatcctcctgttcgcacggggcgtgggccttgtcggtctgctgccctcgcaggggttccccgccgctgggtggggcgctcccgggcgggcggtctcgtccctgatcctgccggcgctggccaccggattcgtgtccggtgcgggcatcatgcgttacacgcgctccattctggaaggcatcgccgatgagggagggccgatcgatatggccatgtcctgcggcatgacccgcacccaggcgttgctgcgcgtgggattgagattggcggctccgcaactcgtctcggtggtggggctggcgttcgcctcgatgatcaccggcgtgatggtggtggagaacctgttcgccctgcccggtctgggcgccctgttggtgggcgatgtcggcaaccgcgatctggtggccgtgcaaagcgagctgttcctgctcgccgcgttcttcctgctgatcggcctggcggtggatctgctgcacgcgctgcttgacccgcgtctggccgccggaaaggaggaatgatggttgatcgcaatggtcgatggcgtcgttcgggcgtggttctgggcaccatctggtcccggggcaccggccgctactcgctgatcgtgctggggttgtggatggtcgtcgccctggtgtcgttgttctggaccccgcagtcgctgctggccaccgacggctaccacgtgtgggacaagccgtcgtccgcgcattggctgggcaccgacggcaccggcgcggatgtgctgagctggctgatggccggatcgcgtacgaaccttgccatcgccctgctcaccgttgtctgctcggctgccatcggcatcctactggtcgggctgatggtcgcccgttcttcggcgctcgcttcggcgtcggtcgccgtggtcgacgcgctgatctccatccccaccgtgctcatcgccctgctgctcgccgtgccgttcggcgcatccgcggccgtggtgatcggcgcgtgctccatcggctacgggctgcatctggcgcgcgtcgcccgtccggccgccctgctcgccgcccgctcgggatacgtgcagtcggcccgggcgaacggcgccagcgggttcggcgtactggtcagacacatcgtgccgaacatcacgccggtgctgatggtgcaatcgtcgatgtcggcgggcacctcggtgctggccgaggcgggcctgacctatctgggcgtgggcgtcggcgcgggggtgccgagctggggccattcgctggccacctcggtcaaactcatcaacgtgtttccgttgacggtggtgtggcccggtctgatcgtcaccctggtggtggtcgcgctgaacctgttcggcgacgcgttgcgcgacgccaccgacccggtggctaatcccgcgttgcggcagatgactgtgcccggtgcggttgtgccggtggctaggggagccggtgacactgcggcgcagtccgcagtggcagcgccgaaggagacggatgatgagcgttgaaattcacgggctgaatattgctatcggcggcaaaccgattgtcatggatgtcgatctgtccatcgcggacggcgaacgggtcggcctgatcggttcctccggttccggcaaatcgatgatcgccaagtcattgctcggcctgttgccgcgcgaggccgtgctgtccggcaccatcacgatgggagaaaccgccatcctgtccggagaaaccgccgagtcgcggcatgggcaggaagatgactcaggatctgacgaagaacgcggcgcggcagataggcaccatgttgccggtgaacgcagggttgccacctcgggccacgattccgctgcgtacgccgacgagcatacgcttgccgatctgcgcggccggtatgtgggtacggtattccagaatccggcccatgcgctgaacccggtgatgaccgtggcgcagcagattgcgttgccgttgagactgcactacgatctgaccaaggccgaacgtgctgagcgagtgaataccatgctggacaaggtcggactggaccgtgacgtggccggcacatacccgcacgaactgtccggcggccaacagcagcgcgtgggcatcgccacggcgctgatcacctcaccgcgattcatcattgcggacgaacccaccaccgcgctcgactccatcacgcaacgtcagatcgtggacctgctgacctcgttggtggacgacgccggcgcatccatgctgttcatcacccatgatttctccgtactcgcgcgtgccaccacccgctgctacgtgctggacgccggccgcatcgtcgaatccggacccaccgccgacctgcttgctgcaccgaccacgccgcaagcccaacgcttggtcgccgccgcccaaaccctcaccctccacacccccaaggaggattcgcatgagtaacagcagtgtgccactcctctccgcccactccatcaccaaatccttcggaccgcgcaccgcacgccaccaagtcctcttcgacgtctccgccgacgtccacgccggcgaatgtctggccgtgatcggcggctccggatccggcaaatccacgctgacccgcattatgctgggcttggaatccgcggactccggcagcgtggaatacgagagccaatccattgtcggcggccgaaaatcgccgggattcgcgaccctgcgccgcgaatcgggactggtgttccaggacccgttctcatcactcgacccgcgttggcaagtcgccaaatcggtggctgaaccgctgagtctgcagcgacgtgatctgaacaacaccgatatcgacgagcgggtggtcgcggctctgaccatggcgggtcttgaaccggcggacttcctgaaccggtacccaatcgacctgtctggtggccaggcgcagcgcgtggtcatcgcccgcgccatcatcaacgagcccaaggtaatcctcgccgacgaaccaatgagcgccatcgacgtggccgcgcgcatccagatcctcgacaccttcgccgctatccgtgaggcccggccgagcaccgccatcatcatggtctcccacgatctcggcgtggtgcagcatatcgccaaccgcatcctcgtgcttcacgacgggcgcgtcgaagagacgggtcccaccgccgaagtgctcggcaacccccaatccgattacacccgtcagctcatcgaggcagcctcgttatagacctttttggctcccctctctgaggggagctgtcgaatgcagtgaggctgaggggagttacgggtgccgtcgtactcccctcagtccgccggcgacacgcgcttgtcgcgggttgtgctatggtgtgaggcatgcagattatctcatgttgttgtcgctaaccgacgcccctgggcgagcggtcagtgacgcataacttgagatggagcattcgaatcgcggcgaatctgccgcatacttttcatgtatccgatggcacaagcgtaatcgtgtaatgcgcgagccgtggttaacatgaaaaactgattcacttttcggattcaccgtacagtgagcgggaatactcgattttcaaaccaaagccacagtccattcgtctgggaacgtcggttcacgaacgcaacgcagcaaacccccacaaccccagcaacgaaggacttcacatgaccatccacaacagcctcgcagaactcatcggcaacaccccgctcgtcaagctcaaccacatcccgcaggcggccggcgtcaaagccaccatcgccgtcaaagtcgaatacttcaaccccggcggctcctccaaggaccgcatcgccgagcgcatcatcgacgccgccgaacagtccggccagctgaagcccggcggcgtgatcgtcgagcccacctcgggcaacaccggcgtcggcctggccctggtcgcccagcagcgcggctaccgcacgattttcaccctgccggacaaggtttccgaatccaagcgcgcggtgctgcgcgcctacggtgccgaagtcatcgtcacaccgaccgacgccggcccggacgacccgcgctcctactaccaggtcgccgaacgactggccaacacgattcccggcggcttccgcccgaaccagtacgacaacccgaacggcccgctgagccactactacaccaccggccccgagatctgggaggctacggaccacaaggtcacgcacttcgtggccggcattggcaccggcggcaccatctccggcaccggcaagtacctcaaggaagcctccaacggcgcggtcaaggtcatcggctccgacccggaaggctccatctactccgcttcctcacgcgacgaagtccaccagtacgacatcgagggcgtgggggaggacttctaccccaaggctttcgaccggaacatcaccgacgacatcgtgcgcgtatccgacgccgaagcctttgaaatgacccgccgtctggccggcgaggaggcgttgctggtcggcggctcgtccggcatggccgtggccagcgccatcaagtacgcgcttgccaatgatttggacgagaaccagattgtggtggtgctcgcccctgattccggccgcagttatctggagaagatcttcaatgacgactggatgcgtgccaacggctacggcgacatcgtggaacgcaccagcaagccctccctcgccgagcagtaccttaacggaactccctctgatgagggagctgcggatggactccataactagctatcaaaagaatcaataccaacatccgcactaactaaccgcacctgttttaccttcgaatacggaacaatcccgaaaggaacccaatatcatgtccgctgaatacaacgccaagttcgccaacaccgacatcgccactcgcgccatccacgccggccaggagcccgacccgaccaccggtgcggtcgtcacgccgatcttcgccacctccactttcaagcaggatggcgtgttgggcctcaggggaggccatgactactctcgctccatcaaccccactcgcaccagcttcgacgagcagctcgccgccgtggaaggcggcaagtacgcgctgagcttctcctcgggcttggccgccatcgacgtgctgctgcgctccaccatcaagcccggcgacaacatcctgctcggcaacgatgtgtacggtggcacctaccgcctgctctccaaggtgttcgtgccgtggggtgtgggcctcgacgtggtggacatcaccgatctgaaagccgtggaaaccgcattggcctccaagcactaccagtatgtgtgggtcgagaccccgtccaacccgctgctcaacatcaccgacatcgcggccaccgccgaagttgcccacaagtacggcaccaaggtcgcggtcgacaacaccttcgcctcgcccgcccttcagcacccgctggccgatggcgccgatgtggtggtctactccaccaccaagtacatcggcggccactccgacgtggtcggcggtgccgtggtggtcaacgacgaggagacccgtgagaaggtcgccttcctgcagaacgccgccggcgcagtgccctccccgttcgactcctggctggacatccgcggcctgaagaccctggatctgcgcgtcaagcgccacagtgccaacgccctgaaggtggccgaatggctcgaatcccagccctctgatgtgattgagcgcgtctggtacccgggcctcgagtcccacccgggtcatgaaatcgccgcccgccagatgcacggcggcttcggcggcatcgtctccgtgcagctcgcggccggtgccgaggcggccaagcacttcgtggaccacacgcagatcttcacactggccgaatcgctcggcggtgtggaaagcctcatcgaggtgcccgccgccatgacccacgcctccgtggccggcaccaccctgcaggtgcccgccaatctggtgcgtatttcggtcggtatcgagaacgccgacgaccttatcgccgatctcaagcaggcgttggatcgtatctgaccgtactgacggtactggtgacaccgtattgacggtgccaccacgcttatcggcggactcgctatcgattggtacctacaaaaaatccccggcccacaagggtcggggattttccgttatcgattgaacatggatcgaatcagctggcgttgccgccctgccatccggtggcatccgcaccagccgggcgcaacgcctgaccggaagtcggtgtggtgccatcaacgaccacacgagtgccgatggtggcaaagtcgtacatccacttggcgtcggccacctgcatgttgatgcagccgtgcgagcctgggataccctgctgcacatagatggggtgctcgccccacatgtatgcaggaacaccgtgcagggcctcgccgccgttatagtaggaaatccacggcgtgcctggctggttgtagccttcgccaaccatggtctgcgattcgtacttgagatacacgtagaacgtgccggtatcggacagcatggaaccatcggcggtgggcttgccagaagcgatgttgaacttcttgaccaccgtggtgccctgatatgcagtggcagtctggttcgtcagatcaacatgaacccacttatcgccatttgccgtatcgaagttatgaggcacctcgacctgcttgacatcatatgggctgtctttcacagccacagtggaatcagtggactggttctgctcgatggcggtagccagacgttcgggggcgtccccggcaccagtcacttcaataccatccacaccgagtgtcttatcggcaccaatttccacgccgccttcgtctttcggcgtgatgtagacctcgcgtgtcaccttgggaacagtcagttctttggttacgctgtcactggtgacgtacttggtgatggcatcgcggtcgactaccagactcatggtgccacccgccttattcaccgtgggcttgaggaatgaggcaatggtatcggccgggatggtgacgctcttgttcacgccgttgtccacggtcagtttgaggccaagcttggcattggcgtcaaactgtgtttgctgtgcgctcgcgtcatcaatcggattctttgcagtctgtagcttgaccggcaccgtcgcattttcgcccggggtcgcgacggcctccttgactgcagcattgacaacattgatatccgggcccttgccatcctgacccgcggtgtaatcgaactgcttggtgctcttgttgtagacaacggtggcaatctgcgctcggtcggcctcatcgaccaggccggcggtgacgaattgttcggcagtctctttgtccctggtggcggtcagagcgatatgcggctgatcgaaaatattgagcttggccacgtcgccggtcttcgcgttcaacagcgcatctacggttttatccgtgtcgacggtgacgccaaggtccttcagcgaggctttgacgctgttgccttcggcggtgaacgtcactgtggtgttattcagctgctgcttcacagtattcgcaagttcttcgcgggtctggcccatgacagagacattgcccaaatgaacaccgggcgcagccttgtcttggaagtaccaacgtccgacgaagaaataggctattaatgcggcaagcaacactgcaaatatggttatgatggcaattcgtgcggccttgccatgtgatttagcggtggtagatgccataacatgttcacccacataggctgtattgtcggcatggttattggtgccattgtcgctttgctgtggcgtggcggtacctgtggccgcggctgcgaacagcccatcggcggccacaggctgcagcaccgccgtctcctgatcgtcaggagaggagaaggaaaatgtattgttggccataaaatgccccgtcttagttctctcaaagcggcatatcgtgtgatatgccgggaatagcgttcctcgacgcataataatacggaagggctacgtacatcgttacgaggtattccgttatacgatgaaatccatccgcggtcggcctacactggtcgtttatgacagcacatcaggcggcgctggaggcgctcacacgatacttcggctatgactcgtttaggcccggacagcaaggaattgtcgaggctttgcttgccggacgcgatgtcttgggcgtgatgcccaccggcgcaggcaagtccgtgtgctaccagattcccgccgcgctcagcccgggtgtgactctggtcgtatctcccttgatttccctgatgcgcgaccaggtcgatgcgctgaacgacctcggtctgccggccgcgttcatcaacaccactcaaactcccgacgagcaggcgatggtgttcgcccaagccgccgccgggcagatcaaactgctgtacgtggccccggaacgcttggaaaccgggcgattccgcgactttgccgcccgtacgccgatctcgctgatcgccgtggacgaagcccactgcgtctcccagtggggtcaggacttccgctcgtcgtacttaggtatcggcgatttcatcgccgggctgccgcagcgtccaccggtgggtgcgttcaccgccaccgccaccgaacgggtgcgtcgggacatcgtgggactgctgggattgcggaatccggccgtcaccgtcaccggattcgaccggccgaacctgtattttgatgtggtcaaactggagaccaaatacaaggccgcatgggtggcgcggtatgtggccgaccatccggacgaatccggcatcgtctactgcgccacccgcaagaccaccgaagcgctcgccgacacgctgaaccagatggggcatccggccgtcgcctaccatggcggcatgtcgccggacgcgcgtgaggtggcccagcgcgacttcatcaccgacaaggtgccggtggtcgtagccaccaacgccttcggcatgggcatcgataagtccaacgtgcgttacgtcatccaccacaatctgcccgaatccattgaagcctactatcaggaggccggccgcgcgggccgtgacggcgagcccagccgatgcacgctgctgtggaatgagtcagacatcgtcacccggcgtcggttgctggataacgattatgagaacgagcgattgactcccgaagagcaggagatcgttcgccagtccaagcgccggctgctggacggtatggtcggctactgccgcaccaccgactgcctgcaccggtatatgacccggtatttcggtcaggaattgtcgccgaatgctggttccgcggcgggtgaagacattgcggcggactcttcgcagtccggcagatgcggtgcctgctcgaactgcgaaagcacgttcgagaccatcgacgtgacccgcgtggcgcaggcgatcagccgttgcgtgcatgacgtggggcagcgcgtcggttccggcaagatcgtcaagatcctgcgcggttcgcgggcacaggatctggcatggctgaacccggagcggatgcccaccttcggcatgctcaaggacgtgaacgaggctcgcgttcgcgacgtgttgagccagatggccacggacgggtacctgtcaatcgccgaagggcgtatgccaatcgtcatgttcggtgcgcgggcggccgaaaccgccgctcccgacttccactatgagatcaaacgggtggaacgcaagtcggcggcggccggttccggtcggagcgggggagtggctgatactgccgattccgccaatgttcccggcgatgcgctgggctcgtatatcccggacgatgacgaggaatcgctgttccagaagctacgcgaactgcgacgcaccatcgcccaggaaatcggcaagccgccgtacatcgtgttctccgacaagaccttgcgcgacatggcccgcatcaagccggttaccaacgcgcaatttctggcggtcaacggcgtcggtcaacacaagctcgacctctacggccagcgcttcatgcaaaccatcgcctcgttcaatgccgggagtgcgtcataacaatctcctatagcgaaccgcggagtatttgcgggcgttcttgggctggcgcgactacgatgactgttcgatacttcatgaccgaacactcagcaagtagaaaggcaacagcatggcagaagacaaggccgaaaagcccgtcgtcgaatcattccagcttgatcacaccaaggtcaaggcgccgtacgtgcgttacatcgacaccgaaacgggccctcacggcgacgtgatctccaattacgatctgcgcctgacccagccgaacgagcaggccatccccaccggcggcctgcacaccatcgaacacaccatcgccgtgctgctgcgtgaacgcattcccggctacatcgactgctcgccgttcggctgccgcaccggcttccacctgctgacctggggcacccactccaccgaggatgtggccaaggcgttgaaggaatcgttggagttcatcgcatacaaggccacatgggatgacgtgcccgccaccaccgagaagagctgcggcaactatcgcgaccacagcctgttcaccgccaaggaatgggccaagcagatccttgaggaaggcatcagctccgacccgttcgagcgcaaggtcgtctgattcgtctgattcgattcaattctgattcggctcccgctggcgggagccgggggcgaagccgactgagggtggctgtcctcaactcggctggactgtccggctcctgcggacgggagtcattgtttattagtgtccgtcatgcaacgcggacgggatttcttgtgcctacggcatggtaggttggccgtcagttagtcgccggtcaccgtgccggcaacccggcatgtcggagaggtgagaagtgactcagtcgaacgctgcaaacaaggcgacaggccgccgtttccgccacgccaccatgcgcgatctgccgcagatgcagaaaatctacgcacgcgcacgcgcgttgatggccgccaacggcaaccccacccagtggggcaacgaatttccgcgtgaatcggtgattgaagacgacatcgccaaccagcgtacgatgctgctggtcgacacctgcaatggccacgaacgcattctggcccagttcgccctgtgcccgggcaaggatccgacctacgccaaaatcgacggcgcctggctggacaacgacacctatgtgaccatccaccgcatcgccgcatccggtctggtgcgccacgcggcccgcgactgcatcaggtgggccctgaagcactacggcaacgtgcgcgccgacacccaccccaataacaaggccatgcagcacgtgctcgaaagctccggcttcgcccgttgcggcctgatccagctgctcgaccggccggtcgacaccaccagaatcgcctatcagcgccacgagtggtgagtgtggctgtcgccaccgtgttcggttccgcggtggagctggtcaggtaaggtccacgtcgtcgcgcacgtacggtccgtcggccgcccgttcaaactcgtgcatatcgcaaaaaccgtacgctgaaagtaactcagcgtacggttttcacgaaagcagccatcgactatcggtcagccgatagacctcagtcctcagtcgcagcgaccttggtgtcagccccggccttctgctcaaggccgagcttggagcgcttgcggctgtagccgaagtacacgatcaggcccagaccgaaccagatggcgaaacgcacccaggtctcccagttgagaccggcgatgagcacgaagcagaatacgatggccagaatcggggtgaccggcacgcccggcgcgcggaagccgcggggcgcattcggctgggtcttgcgcatccatagaataccggccgacacgatgatgaacgcggacagcgtaccgatgttcaccagctcgaacagcacgttgatgttgatgaagccgccggcgaacgcggtcagcagaccgaagaaccaggtgcccttgaacggggtgcggtacttctcgtgcacgtggccgaagaacttcgggaacaggccgtcacggctcatggcgtagcagatacgggactggccgtacagctgtacgagcatcaccgtggtcatgccgatgagggcgcctaggttcacgatcaccgcgagccagttcatgccggtctccagaatcacgccggccactggggcgtcgatgtacttggcgaactccttgtagggcaccacgccggtcatgatcatggtcatgacgatgtagagcacggtggaaacggccagggacagcaggatgccgcgcggcagtgtcttgttcgggttgatggtctcctcggcggaagaggacacggcgtcgaatccgatgaagctgaagaacacgatggatgcggccggcacgatgccgtacggctgggtggagccgggctggaaagtgtagatgccgtacggggagaacggctgccagttggacggcttgacataccacacggcgcacacgatgaacagcacgatgatggcgagcttgatgagcaccatcacgtcattggtgcgcttggtctggttgatgccgatcgagagcacccatgtgatgatcagcacgatgacgaaaccgggcaggttgaagtaggtggtgacgtccgggttggtgccgtaggcggcggtcagctcgaccggcagatgcagtccgaagccttccaacaacttgttgaagtatcccgaccagccggcggacacggtggccgcctgcagagcatactccagaatcagatcccagccgatcacgaaggcgatgagctcgccgaacgccagataggcataggagtaggccgagccggacaccggtgccatggcggcgaactcggcgtagcacaggccggcgaaaccgcagcagacggcggccagcaggaacgatacggacagggccgggccggcggtgagcgcgcccttgccggtgagcacgaagataccggtgccgatgatcgcgccgataccgagcatcgtcagatcgaaggtgcgcatcgtgcgcttcaggggagtggattcggcgacaagctgatccacgcttttcttacgaaacagatccatgttcttctctcatgaaacttaagatatggggctagaccggacggatttccgggatcccggcacgcctcaacgccgggaatcaaaggcggcttccgagaaaccgcatatcggtcattagtgtacgactgccgggcgaaaacaaacgattgtgaccacacgtcacattcctgcgcaacaataggtgcctatgagcatgaacgcagcacccgaaatcgcattctcgtccgagcagggcaaggccaactatgcggccgcccgccgccaataccccgcacaggccatcgtgaacctcaaaaccatgcgcgacaacatggcccacctggtctccgtggtcggcggcccgaactccggcacggcggtgatgggcgtggtcaaggccgacgcatacggccacggactgctgcccgccgcactggccgcgctcgccggcggcgcgacatggctcggcaccgcgcaatcgcatgaagcactgctgctgcgcaaactcggcatcggccccgaccgttgccgcattctgacttgggtctacaacggcaccgaagcgccattcgatgagctgatcgctgccgatatcgacgtatcggtcggctccctgcccggcatcgatgccgtggccgccgccgcacgcaagctcggcaagcccgcccgcgtacacgtcaaggtcgattccggcttcggtcgcaacggtttcacgccggccggattcgacgccgcgctcgccaaactcgtgccgctcgccaaagagggcgtgttgcatattgtgggtcagtggagccatctcgccgtggccgattcgcccgatgtgcccgaattcgtgtcctccaccgaccgccagatcgaaacattcaaggacttcacgcgccgcatggaacaggccggcattccgccggagatccgtcacctggccaacacggcggccactttggaccgcccggagattcacttcgaacttacccgccccggcatcggcctgtacggctacgagcccgatcccgcgatgggcaccccgcgcgactggcatctgaccccggccatgcgcctgcaggcgcagctcggcacggtcaaggatgtggaggccggccatggcatctcttatggccgcacctacctgaccccggacaacacctcgaccgctattgtgccgctgggctacgccgatggcatccaccgctccgcttccggtttcgatatggaaggtgccaagcacgtggagaagccgggcggcccggtgcgcatcatgaccactgaaggtccgaagctctaccgcgtgtgcggccgcgtgtgcatggaccagttcatcgtggacctgcacggatccgccgccgaactcggcgttcacgagggcgacacggtcgaactgttcggcccgggccgcggcgaggattacgttgagcctaccgccgacgattgggcccgcgccgccgacaccatcagctacgagatcttcacctgcctgcgcaaccgcatcccgcgcctttacgagcatgccgccgaagtactgcccgccgccgacctcgccaagctcgaccccgccacgctgctataaggtgcattaccgccatacggtggcaccccgtaatcccttcttcccgaatatgtgccgttgacatgtgctgagcgtcacatattcgggaaatcggccccaatctcccgaatatgtgccgttgagttgacgtcagtggcacatattcgggaagtcgggattactgcggccgatatgtgtgcctatgcttggcatatggaaacaacgttggatggggaacaggtgctgagcgatgagggctacaacgccttcgacgaggagcgatgggcacccgagccgcccaaatccaagtcgcgcacggctttcgaacgcgatcgcgcgcgactgattcattcgtccgctttgcggcgtttgggcgcgaaaagccaggttctgattgccggtaccgacgatttcgcccgcacccgactgacgcatacgctggaagtcgcccagatcggtcgccaaatcggcgcattgctcggctgcgatccggacgtggtcgactgcgcctgtctggcccacgaccttggtcacccgccgttcgggcacaacggggagcgtgcgctcgccgacatcgccagcaatatcggcggcttcgagggcaacgcacagaccatgcgtatcctgacccggctcgaacccaagatctttcacccggacgggcgttcggccggtgtgaacctgacccgtgcggccttggatgcggctgtcaaatacccgtggaccttggccgaagccgaccgacaccccaagggggagcggtcgaagaaattctgcgtctacccggatgacgaaccggtgttccgctggctcaaaatcggcgcgccccaggccgccaaacccatggaatgccagatcatggacctttcggatgatgtcgcctactccgtgcatgatgtcgaggattccatcgccaccggcgcgttcgatccgattgtgctcgccgatccgaagatgctggaccacatcatcgagcagacgcgcgcatggtatggggcgaagtgggatgccgacaagctgctggccgcgttcatgcgattgcgccgagagcatttgttccctgcacatttcaatggttcgcgcgaatcgttggcacagctcaagaacatcacgtccgatttgatcggccgcttctgctggtcggtggaaaccgccacgcgcgacacgtatgggcccgggccgttgacccggtattccgcgaacatcgtgattcccgaggacacgaattacgagatcgtggcgttgaagggcatcgccgtgtacttcgtcatggcgcctcgcgagcgcgagccattccatcaggaggagctcaagatcgtatcggatttggtcgatgtgcttatggccgattcgccgctcccatccgacgctttggaaagccagttcctggccgattggaatgaatccaccaatgacaacgagcgcctgcgcgtcgccatcgatcaggtcgcaagcctgaccgacaactccgctctggccctgcactccatcttgtgctgagggcgtgttggacgggtgcttccctcagtctcgctgcgcgagccagctcccctcgggtgaggggagctgtcgctgtaggcgactgaagggagtttcgcggaagaaatgataaccgacggtaaaaatttaccgtgtctcaggtgaggcggtactctagagacttatggtcggaatgattaggaaagaagatgtcgagaaggtgcgcgccgccgcggacctgtatgacatcgtatctgcgaccgtaacgcttaagccctccggcaccggcaccttcgtgggcctgtgcccgttccacgacgagaaaaccggcagcttcaacgtgcgcccctcactcggcgtgtggcactgcttcggctgcggcttgggtggcgacgtattcaaatacgtcgaacaatccgaaaacatcgacttccgcgaagccgtggaactgctcgccgacaagtaccatatcgagctgcactacgagaacagcggcaacggcccgaaccgcgagaacaccggctccaagcgcacccgactgctggaagcctgcgaggaagcccaacgcttcttcgtctcccagatcctgaccaaggaagcactgcccgcccgcaagctgctcggaggccgcaacttctcccaagccgactgcgaacgtttcggttgcggctacgcgccccaaggttgggataatcttgtgcgccacttggcctccaaggggtttacgcagaaggaaatcctcgacgcgggcttggcccgccaaggccagcgcggcatctatgactatttccgcggccgcgtgacgtggcctatccgcgattcgaccggccgcacgctcggcttcggcgcgcgcaaactatacgaagacgatcagatcgccgccaaatacatcaacacgccggacacgcagctctaccgcaaaacccaggtgctttacggcatcgatttggcgaaatccgccatcgtcaagaagcgacaggtggtgatcgtcgaaggctatacggacgtgatggccatgcacttggccggcattgacaccgccatcgccacgtgcggtacggcgttcggcgccgagcacgccaagattgtgcgccgcctgatcgccgacgattcgctgggcgcggtccagctggtcgggccgttgaaggtcaaggaccagccgttgagctcgcgcatcgtgttcacgttcgatggtgacgccgccggccagaaagccgcgctgcatgccttcggccttgattcggccttcctctcccaaaccttcgtggccgtggccgacgacaatctcgacccgtgcgacctgcgcatcgagcgaggcaacgaggcggtgcgctcgctgatcgcccgcgccaaaccgttgtatgacttcgtgatcgacgccgccatcggccggttcgacctgacctacacgcccggccaagtgggtgcgatgaaagccgtggccccgctggtggcgcagattcgcgaccgctccctatgggacgcttacgcgcgcaagtccgcgggccgtatcggcgtggatcttgaggtgatgcgccgcgaggtgatgaacgcgcgccggcagatgcatgtacgcgatgaggacgcctacgcgcccaaacgtcgattcgagcgtgacgagccgcgtgtggaacccggcaccaacccatacgccaatccggccacgcgcaaggcgttggagcgccgtgacgccgccgaacaggcatatttcaagatcgacgacgccgtattcatcgccgaacagcagttcatggccgtgctgattcaggtgccgcgcgccatcgaccgcaccatgttcgggcagctgaccatcgaccatttcatgacttcggtgttccgcaccctgttccaggcgatcgcggccgccggcggactgccatccgacgataccccgcaggggctgtggatgcacaacctcaccaaggccggcgggccgatgctgaatcaggtgatcaacgagctggccgtcatgccgttgccactgcctggcgacgacggtggtaatggcgcacaacctccgcagtcgaacgtgcctgggggagtcggcggtggtgcggccgccgtgcagctacgccctgccacgccggaagagcagcgctatgccactgagcttctcacccgattgttggacatgggcttcatgcgccagatcggcttggccaaacgccgcatggcccagctgcccgacggcgaagagaagataaccctcctcggccagatcacccgcatggaaaccgcccgtaaagacctccaagcccaaatctacggcaacaccgtcggctaatacctcccactg

SEQ ID NO: 3290 - DNA, 9271 bp, Unknown
  R151_18m  MAG No. k141_2131
agggcatgaccgacgaaggcatccatatcaccaacgtcatggattggctctgctcgtaggaacgcgccggatacgacgacacgccgaaggagtgctcgcagaacggcggataggtttcgcacaatggcggaattccaatggctgcctttcagcaacaacggttctgtgagcaccccttcggcgtgtcgcggagtcggaagagcaagcaagcagttccgacgtcactgcttgacggcaccggccgccaaaccggactgccagtaccgttgcaggaacaggaacgatatcgccagcgggacgacggcaagcaacgacccggtcagaataagattgttcggcacctgctgagccgaaggatcggaggccatcttgagccatacgttcaaaccgacggtaagcggatagtcatccgtgttggacaacatgatcagcggcaggaaataattgttccatacgctgaccaacgcgaagagcagcacggtcacaaaccccggcgacaacagcggaaaagccactttccagaaaatcgtccacgtattggcaccgtcaagacgcgccgcctcgaccagagattgcggaatggatgtctgtgcgtagatgatcatcaggtataagccgaacggattcgacagctgcggtatgatgaccgccaacggcgtgttcaccaatccgatcttcgcatacatcagaaacagcggaacggtgatgaccgtggatggaatcgacatgaaaatcagggtgatccacagcagcatattgcggccgggaaatctcatggtcgcgatggcgtacccggcgaaagcggcaagaatggtggagcccaagccggcgacgaccgcataaagaatcgagttcagcagccatcgcgtatacacgccctcctgaaaggtaaatgtgtccacgatgttccggaagaacacgttttcgtcatcgaaccataagccgaacgacgcgtataggccttcattggttttcgtggaggaaaacaccagccagatcagcggaataacgcaatacagcaccatcagcagcatgatgagatggaggagtacgttcatgcctttttgttggggcgtcagcttgatgagaggaccatccgtttgacggttcttcagtttgcgctcatactccttgtgcctccatcggttgaccaggcgcgtcccccatgacgcagcagaggcattcgtcgttgccatattaccgttcctcccaacgtgaaccgaacagcttcactgccgccacgatcagcatcgtgatggatccgacgacaagcgacacagctgcggcataattgatatcctgcccggtgaacgccaaattataggtgtacatattgggcgtgtaataactattgatgacttcgggaaccagcgtcttcaaaatgttcggttcgttgaacagctggtatgagccgatgatggaaaacagcaatgtcatgatcacggtgctgcgaatcatcggaatcttcaccgaccatgcgatgcggaattcggacgcaccgtcgatgcgcgccgattcgtataactcgccgggaatgacgcgaagcgaagcatagaaaatcagcatgttatatcccataaagcaccaccgtgcaatattggagatggaaaacagcatggcgtcggcggacagcaggttcggcgcctgcgctccgaacatttggaaaaactgaccgatcaggccattgcgctgaccgtaaatgtatccccacatcaatgccgcaatcacaccgggcaccgcatatgggaggaacaacagcatacggggaatggcgatgtgacggatcctgccggagtcgagaatcagggccgccagcaatgccagcgccagcatcagcggcacctgaataaggaagtagaggctcacccgcccgaaactctcccacagtttcgcgtcgctcacagcgcggacgaaattcttgagaccgacgaatcgtgagccgccgaccatccgttccttgaagaaactgaggtataaggcgtacaggatgggaagaatcgttcccatcagaaatacgaccacgtatggcaaacagtagagcataccgacatactgctgcttttctttcctgagtggcatccgcacgtctccatcggctgcgtgagtcatgctcattctccttcattgccgcaccctcggatggcggccgtcatcgcgaccgcctcccgagaatcacgaatcctacttatcaacgacgttgaatccttggtcttcggcatacgtctccagattcgactgccacttgcccaaggcgttgtacaggtcaccgtcctcagtgagttccggcaccaccgtgtccacgaattcctgagcgtattgggagttgaaaggaagcacgtcccaatcgtcgttgatcttcgacgcggattcgaagtacacggccttgaccttctcccctcggaagaagtcgtccgtgatattggcctgttcggagtcggtctggaaggacttcgccgcattgaaatagctgccgccgtaggactgccacgcttcgatggcgtccggatcggagctgacccagttcatatacgctatcgccgcggcctgtttctccttcgggcatgctgaggtcatggccagcatgcttccgccgatggtggccgttttcaggtcggcggaggagtcgccgtatgccggtggcagttccacggtcatcttgccttcaagcgagggcatgttgctggcgatcagcgcgccgcgccagcaaccgtcgatccatgtggcgtagcgtccgtcgaggaaatcccgggtgaactgatcggtgccggtcgccgtcgcttcgatgacgccttcgtcgatcatgcgctggatgcgttccatgacctccttggtctcgtcgttctgcatgtcgaaggacacgttttccgtaccgtcaacggaataggttttgacgcctgccgcgcggaagaagtagtccatgaaatgtgcattgctggtgtcgaagactcccatgtattttgtcgggtccgcctcgtgcagcttcttgccggcttcctcgaactcgtcccatgtggtcgggacgtcgatgccatattcctccaggatgtccgcacgcacatacatcgcgacaggggcctgatcggagggaatgccatagagtccgtcgcccatgtggaccgcattccaggccgcatcggcgtagagcgagccgaattccttctctatcgactcttcggaaatattggcgagggatccggtcgcggcatattgcggcatcgagtcataatcggtctgcacgatgtcgggaatgcccgatccggctttgacgacgttctggaatttggtgtaatgatccgacgacgtgccggtcgagaccagatcgattttgatgtggggatactttttcataaaggcgtcagtgctctttttgcggatgtcataggcccacgtccacacggtgagcgtgatatcctcgttgctgtccaacgccgcttggacatcatcggcggtaatgccgctggcacccgtatctccgccgccactgccgcacgcggcaagggggaacgcaagcgcagcggccgccacagcgcataccgccctatataaacccttgttcacatgaacctctttcgtcagcttctttactggaccgatacgaatgcagtgtcatcgcatctccatatcgtatcgttaagataacgtaacacagtattcgccgaaatcaaaacccagccccctccggcgcgccacacggcgattgcgtcaatatgcatggaagaatacggaaccatagggtacacatttcgtgattcacggatgatttccgagtaatatcacctttcataaagcccagagatatgccatttctaggcatctcatcgaaatacgtgaatctgtcgttgccaactgtggacaccacgcgacccccttgccgccatagcgctgttcctcatcaccatccccgccacattcgcagtagaagacgacactcacgatggtttaacgttaagatttatgctatagtacgaaggagctgaaatcggcaccgcgggggcgtcatcacaccggactcccaacccgcgaacctatggaaaaggagctatcgtgtcatcagacatgacccacgattcgcgcagcgacacggaaaccggcacgtcgcgccccaacttcctcgtcgtcatgaccgacgaccaaggcccctgggcgctgacccggaccatgcccgaactggtcacgcccaccgtcgatgagctggtagagacgggcacgatcttcgataatttctattgcgcctcgcccgtctgttcacctgcccgggcatcattgctgaccgggcgcatgccatccgcacacggcgtgcacgactggctcattccgggcgaagagcaacccgacccgcacgaggaggagtatctcggcggattgcttaccctgccggaagtactgcacgaagccggatacgtttgcgcaatgagcggcaaatggcatgtggggacgtcacgtcgaccggcaccgggatttgatttctggtatgcgcatcgcaaaggcggcggcccgtatttcaacgcgcccatctgggacgaccacggcaacaaacgcgacgaaccgcgatatttcaccgatgcagtggccgatgaggcctgtcgcttcctcgacgactatgcgtcaggcaatgtcgcgggaagaacgacatcgaactccccgttctatatgcaggtgaatttcacggctccgcaccacccatgggtgggaagccatcctcaggaactctgcgacctgtacagcggatgcgatttcgcatcggttccccgggagccgccgcatccgtggtccaaacctcgcacggaattctatgaggcgttcgacgatcccgtaccgcaactgcgcggatacgcggcgtccctttccggcgtggaccgtgcactgcgtctgctactcgacaaactcgacgagcatgatctcgcctccgacacggttatcgtgtatatggcggataacggtttcagttgcggacatcacggcatctggggcaagggaaatggcacctatccgttgaatttctgggagaattccgtgagggttcccttcatcatccgccttcccggccaaaccgaagcacgcgaggtgagcgatcatgtatcggcgaccgggttcatgtccactatctgcgaactcgccggagttgatccggccgacgatccgttacgcgccggttcgtcattcgcgaatctggcgagaaacggagtcgatgacgccaaacgcgaatcggtgatggtgttcgatgagtacggcggcggacgcatggtacgcagcggcgattacaagctgatcgaacgctatgacggccccggcgagctttatcatctcggcaacgatcctgaggaacgggagaacctgtacggcaccgccacccatgcgcatatgcaaaacgaattgcacgaccgtctgcgagagtggttcgcccatcatgaaaccgcggcggacagcgcctgggcgcatgacatccagggatggggacaactcgtgcccttacgtcgcggctacgatgacaagcacatgtacgtccatggtctacatttgagatagcggttcgttcagcatccgaggcgaacttggcggaaagaaagggatgatatggcaacgacgctcaaagacgtggcacgtcaggcgggcgtgtcccacaccacatgctcagcggcgctgcgcgggcttccgaacgtttctccacgcaccaggaaaaaggttctggccgcagcacaggcattgcattacaacacgaatctctccgcgcgaatgctccggtcaaaccacagcggtcttatctcattcgtcgtgccggatctttcccccacctattattcgatgctttccgtggagttggcccgggaagccacttcggccggcatgcaactggtggtgcagcagtcccagcattcggcgtccgaggagaacagcatcatcgggtccgcgctctcctcgttggccgatgggtttttcgtcgcgccggtcgcgcattacaccgatgaagacctatccatgctgatcggggataaacctgctgtgattctcggcgatttcacacaaaccacgcgatatgacagggtgaaatccccgaattccgaaggtgtgaacagcgcgatccaacacttacgccagcagggctgcacgtccatcggcatcgtcggcggcatgaccgacgacaaggaggccgatatcccggaaggttcttccgtactgacactccaaggattgcgtatgcatgccgcgatggatgccttggccgacctgtatcacgaaaaccgcgaatccatcgtgaatgaacggttgatcgatgtcgggtggaattccgacgaaggcattcgcgcagcgaacctcttcatggaagccggaatgccatatgacggcttgttctgcttggacgacgaaatcgcattaggcatgcttcacggattgcatgaagctggagtccgggtgccggagcaggtgaaaatcatcggcttcaacggtattcgacacagtgccatcagcacccctactctaagcaccgtcgaagtcgacctgcccggcatggcgtccgccgtcgtttccttgttgcgcagacgcatcgaacatcccgacgtggaaacgcttccgcaaaaagtgaccgtcggcacgattctgcgcgcacgggaatccacggcggcaggcaatgtctgacggcgctgaagacaagtgccatcaggagcattcggagactctttgtgcaaccactacataaggcgcgttttgatgaacgatacgatgaggcggcctcgcctcccctttaccgtgatagccaagccgacaggcgcggcctgcaatcttgactgccaatactgttttttcctctcgaaggaattgctctacgattcggcccgtcagatgatgagcgaagaggtgctggaatcgtacattcgccagttcctggcggcaagtcccgatggcgaggtgacgatgctgtggcagggcggagaacccaccttgcgtggcatcgatttcttcagaaccgccgtcagcctatgcgaacgataccggcgcaagaaacaactcgtgaaacatgccttgcagaccaacggcaccctgatcgacgacgaatgggtcgcctttcttcgtgaacatgatgtgctggtgggcgtatcaatcgacggcccgcaggactgccatgacgcctatcgattgaatcgtggtggcaaaggcacgcacgcaatggctgtgcgaggttggcgattactgcacgacgcaggagtgcgctgcaatatcctctgcacggtgcatcatgcgaacgaaacacggggttcggaggtataccgatattttcgcgacgaattgggcgccgatttcatgcagttcattccgatcgtcgaacgggtggattcctcgcaactggaacgggtggagcgcaacggctggcgaatcaccgggacgcgaggcgaacgcgccggtctgctgtatcgtcaaaccggcgaacaggtcacatcccgttccacgtcgccgaaagcatacggacggtttttatgcgatgtattcgacgaatggatagcgcatgatgtcggtcgggtattcgtccaggatttcgacggcgcgctgggctcgctattcggacaatacgccgtatgcgtacacgccccggaatgcggatacaatttcgcgttggaattcaatggcgatgtatatgcgtgcgatcattgggtggaacccgattggctgatcggcaatgtggccaacgccgatttcttcaccttgtcgcaatcagcgcgcatgcaacgttttggattgaaaaaacatgcggaactgaccgatcagtgtcgccgatgcccgtatgtgcgcatgtgcaacggcggctgcccgaaagaccgtttcctgaaatccaaggatgggcaaaacggacagaactacctctgcgcgggctattcactgttctatgagcatatccgcccggacatcataggcatggcccgcctgattcgttccggccatgccgcatccgaaatcatggatccgcgtattcgcagtcgtgtgagggtcggcggagccctgccgtaatactcctccattcggcttgccgctgccggctgccccccctattgcacatgccgttttattcctcgaaaggttggtatcgatggctcatctctttctggcattgatagtcggcttcggtgtcggcatcgtcgtgggggcgctaggcgccggcggcggcattctatccgtgccggtgctggtgtatctgctgggacaggagcctcatgccgcgtcggccggctccttggtgatcgtcggattgaccgcggtggtatcgctgatgcctcgcgcccgcgaagggcatgtgcgttggcgagacggtttggtgttcggcgtggtgtcttcggtcggcaacgtgttggggtcgcgcgcatccctgatggtggacgcgcatatgctgatgatactgttcagcgtgctgttgatggcagttggcgtgtttatggtgcgtaaatcctgccgtatgagtcaagtcggtgacgccggaaccgtcgcgcatgccgattccggttcccccaacccgcatcggtccgtttggctgctggtggcatgcgcgacggcgaccggcgcattaaccgggtttttcggcgtcggtggaggttttgccgtagtgccgatgctggtgctggctttggggttcaccatgcgcgaggcctcctcgacatcgctgctggtgatgattatcgcatcggcggccggcctgatgtcgcgcattgggaccagcgtcagcatcgactggggaatcgtgatcgtcttcgcattggcctcaatgattggaggactggtcggagctccggcgtcacgcaggatgcgggaagtcgtattgacgcgattgttcgcaggattgttgttcatcgtggcgacgtacacgatgatttccacacttatcgaaatgctcgcctaacgacacgccgaaggagtgcttgcagaacggcggataggtttcgcacaatggcggaattccaatggctgcctttcagcaaccatggttctgcgagcacccctttgtcgtgtcgacgcggtttcaaccaccctcgaagatgcatacagccatcgttcggtttatggaatcatgatttagtaaattacgattccataaatggggaacagtgggacaacgcccgaaattttgcgtactttggtctgggcttgagataggggcatggcccgtgtcctgtgtacgattttctgtcgccagacaaaacaaatcgcgactggaaacgaaggcacgaagccatgccgcagcagattccacaggtccaccggcacgcggccggggcgccgaaaaaga

SEQ ID NO: 3291 - DNA, 3147 bp, Unknown
  R151_18m  MAG No. k141_2641
ggcgttcgcaacgctaccgctgctcactgctacggacagcccaccgggctgtccgtcctcaaaggagatgaatatgccctgcatattcatcaccgggcggggactacggcgggacgggtgtagccttcgttggcggcaagccattccacatcggccttcaccgtggtcggcgtggaaccgatctccttggcgatacgggtgttggcccaacccttatcggctaactcgcgcaccttggcacggcgatcggcacgaacttgatcagcagaagccttagcacccttagcagcagtcttcttagcagcacccttgcgaccgcgcctcttcgacggaccctgcgcacgcttctccgccaacagacggaacgcctcagccggctcgatcgactcgggagcatactgcttcggcaacgtacggttcgtttcgccatcggtgatatacgcgccgtagaagccttccttgatggtcacctgcttttgcgtttccggatcgacgcccagttcacgcagcggcggcttggcagcgccacgaccgcgcccacgaccatacttcggctgggcgaacagttccttcgccttgtccaaatcaaccgtgaaaatctcatcttccgaagcgagcgagcgcgtatccgacttgccatcggcaccggtcttcgtcaaatacggaccataacgaccattattggcttgcacagcaaccgtttgcacttcaccggtctgagagtccgcttcctcataagaaccaacttcacgaggcaaactcagcaaacgcaacgcatcatccaacgtcaacgattccgggctcatcgtcttgaacaacgacgccatcttcgggcgatcggcagccttcttagcgctcttgcccttcttcggcttgccatcaccagccacgtcaccgtcagcaccagcatccgcagaaggcatcaccaacgcaacatacgggccaaaacgaccattacgcacttcaacagtgcccccggaaaccggatcaacaccaagtgcacgcggaccgccggaatgattctcaatcaaatcatggccgacttccaccgtcagctcatccggagcgagagtatccggcagcgacgcacgcttcggattgccttcatcatccagatggttcacatcctccaaatacgggccatacctgccgacgcgcacatgcaaaccgtcgccgatctcaatcgtattgatctcgcgagcgtcgatttcacccagctgcgcgacctgctgctgcaaaccggcatgcgcctcgtccgcggattgcgcagcaccctcaccggaaccgaaatagaagcgggtcagccaattcctaccggtctcctgaccgctcgcgatctggtcaagaccgctttccatatcagccgtgaactcgtaatccacgtaccgcggaaacttcgtttccagcaatttgaccacggagaacgcgagccacgacggaatcaacgcacgaccacgctcatacacgtacccacgatcgataatcgtggaaataatgctcgcatacgtggacgggcggccgatttccttctgttccaacgttttcacgagcgacgcttcggtgtaacgcgccggaggctgagtttcgtgtccgtcggcgtcaaccgccaccgcggcgagcgcatcgcccggattcatcggcggcagcgacacattgtcatccgacttcttattcgctttgctggatttgccggattgcgcagcctgttcaacgctttcagcagcatcactcttcttcgattcggcggacgcgcggcggccttcaccggtcgccttcataaagccggggaattcgatgacagtgccggaagcctggaacatggcttccccattcgattcggtcggcgcagacagtcgcacggtcgccgtggaaccggttgcgtcggccatctggcaggcaagcgtgcgctgccagatcagcgtgtacagcttgagctggtcggccggcactttgcttgcgatttccgcagggtcacggaatttcgcacccgctggcctaatgcattcgtgggcttcctgcgcacccgcggtttttgtggcatattgtttcggcgcatccgacagatagttttcgccgaaatgcttgacgaccgcttcacgcgcagctgcgatcgcttcctgcgacagcgtcaccgaatcggtacgcatgtaggtaatataaccgttttcatacaatccttgcgccgcacgcatggtctgacgtgagctcatgccgagacgattgccggcggtctgctgcaatgtagacgtagtaaacggtggaaccggacggcgacggtacggcttcgtttccatcgacgcgacggtaaacgttgcaaattccaacgcctgcgcaatcgcggaagcctgcgcctcatccaactgcgtgacctgatccttcgcatcggtcgcagtcagcttgccatcggcgccgaaatccttggaacccgccaaacgacgcccaccaagcgacaccatacgagaatcaaacgcaacattgttgccatcggcatccggcgcttccaacgttgcggtgacatcccaatacgaagcacgcacgaacgccatacgctcgcgttcgcgctccacgatcaaacgcgtggcaacggactgcacacgccccgcggaaagacccggaccaaccttgcgccacagcaccggagaaagctcatagccgtacaggcggtccaaaatacggcgggtttcctgagcgtcgaccatgtcgtcgtcaacgtcgcgagtattgtcaagcgacgctttgatggcttccttcgtgatttcgtggaacaccatgcgcttgaccggcactttcggcttgagcgtctgtaccaaatgccaggcgatggcctccccctcgcgatcctcatcggttgcgaggtacagggtgtcggcttttttcaacgcgcttttcagctcggacacggttttcttcttgttgccgtcgacgatgtagtacggcttgaatccgtcttccacgtcaactccgaacttgccgaatttggttttgtcggcggctggcacctggcttggctgcgcaagatctcgaatatggccgaccgaggccatcaccgtatattcggagcccaaatacccaccgattttcttggccttggtgggagactccacaatcacgagcttgctgccggtagccatagccactccttattac

SEQ ID NO: 3292 - DNA, 7594 bp, Unknown
  R151_18m  MAG No. k141_2728
cgtcgggcaacgcggcatcctgtgaaacgcgaaccaagcgacggcgtaagccgtgtgagtcttggagctggcctcggcaacgaggccatgcagatgacttcgctctagcgacaagctaaaacaaagtcatctacaacggttttacactcaattccctgcagggcaaaaccgcacaccacaatccacaccccgagccgccttcccctcagccatccgcaggctctacgatgagagccatgactggtctggccgaacgactaccgcacgtcgccgctttccccgaagcgctgggcaccgggttgctgctgcataccgatgtcgcgctggacgacgggctcagtaactgcatcgatatgttcatcagcacctatgaagccgcattgtcccggttcaaggatgattcgacggtcggccggatgcgcacggccacgcatggcggcacgttcgattttcctgactgggcattgggtttatttggcctgtacgaccagctgtttgcgtcgactaatgggaccatcgacccatgcgtgggcgaggatttgattcggcttggctatgacgagtcgtattcgtttacgcctgcgccagatgccgctgaacatgcaggcgcgatccacgaacgagccatttggtcagccgacgttgagcggcatggcacaacactggtgacgcgcggaccggtcgcgctcgatttcggcgcgtgcggtaaggggtatttggtggatttgcttgtggggatgttgggtgatggcgcgggtcaccctcaacccattcaatacgtcatcgacgccgggggtgatttgctagtgcacacggacgaaccaatcaccatcgcccttgaagatcctgccgatccggccaacgccgtaggtacggtcgaaatcagccacggcgcattctgcgcgagctcccccagccgccgccactggtctgacgccgcaggtcaccaacttcaccatctgctcaacgccatcgacggactaccggttgacgatgtagccgccacatgggtggccgtcacgccgccatcgagcgccataaccacgaagacatcgacgcatggcagcaatgcctcgacaacggcaaaccgcgataccgacgattcgtcgaacaccgttgcggcacacgtccctgtcacactggccgacggcctcgccaccgccctgttcaccaccccggccacccagctgcgcgctcacttccccttcgaatgcgccattctcaacgccaaccgcaccgccgcccaatcccccaattttcccggcggctttttcacacactaatgcacgaaatcatcagtatcacatccctcgggtggaccgatgggttgctcccctcagtcagctacgctgacagctcccctcggagaggggagccgagtatagctaatccgctaatccgctaacgcaggaaacaatccgtcagtcagcgagtgcgaactggctgttgtagaggtcggcgtaaaaaccgcccgccgccagcagctcgtcgtgcgtgccgcgctcgatcacgtcgccgtggttcatgacgagaatcatgtcggcgtcgcgaatcgtggagaggcggtgcgcgatcacaaagctcgtacgccccacggtcagcgcgtccatggccttctggatcagctcttcggtgcgggtatcgaccgaggaggtggcctcgtcgagaatcagaatcggcgcgtcctgcaccatcgcacgggcgatggtcagcagctgcttctggccctgggagagcgacgacttgtcgtcgagcacggtgtcatagccgtccggcagcgagcggatgaagtggtcgaggcccacggccttgcacgcatcctcgatctgcttgttggtcacgccgggcttggagtaggcgatgttctcgcgcacagtgccgcggaacacccacgtatcctgcagcaccatggagaactggtcgtgcacgttccagcgcggcacggacttggtgtccacgccgtcaatcgcaatcgagccgccggaaatctcatagaagcgcatgagcaggttgaccatggtggtcttgccggcaccggtcgggccgacgatggcgaccttctgcccggccttgacggaggcggagaagtcgtggatgatcggcttgcccggttcgtaaccgaactgtacgtggctgaattccacgtcgcccttcacttcgtggccgttggtcccaagcaaagcggacttgccggattcgtcctccatctccggctcctcaaggaagccgaacacgcgttcagcggccgccgcgcaacgctgcaggttctggaaggcctgggcgaactgcgccaacggctgggtgaacaggcggacatacatcatgaacgccacgatcacgccgaactcgatctgcccgtcgagcgcgagcgccgcacccaccacgcacaccaccacgtagccgaagttgcccacgaaattcatgagcggcatcatcaggccggaaaggaactgcgacttccagccggactcgtagaggtccgagttgtacttctcgaagcgacgaatcgaatcggcctcgccgttgtatgccttgacgatgaggtgaccggcgtacatctcctccacgtggccgttgacgtcacccagcgccatctgctgccgggcgaagtacttctgggaggacttcatgatggccatcatgatgatcaggccgatgaggctggcaccgatggcgcacagggtcatgatcacgttgttgtagaacatcatcaccagcgcgcccacgaacagcgtcaccgaggtaatcagcgagccgagcgactggcccagcgtctggccgatggcgtccacatcgttggtgatgcgcgacagcacgtcgccgtagctaaccttgtcgaagtatttgagcggcagtttgttgattttgaccgagatggactcgcgcagtcgctgggcggtgcgctgggtgacgttggccatcatccagctttgcacgtagccgagcacggcgtagcccacgtacagggccaccaaagtccaggcgatgtggcccaccgtgccgaaatctaccgagttcatcaccggtctgccgttgacgatggcgggcagacctttgacgatctcgttggtcatgtccttgagcttgtccgggccgacgatctggcagacggtgccggccgcgcccaggatgagcgcgatgatgatgacgggaagatagttgcggcagtagttcacgagtttgcccatgactttgccgaaatcatggggcttttcgacggcacgcctgccgcccattggtcctcttggcatttgttttactccttaaaagtccgtattgacctccctctgatgagggaggtggcgcgaagcgccggagggagagaagccgtacgcgactacccctcagtcagctgtgctgttttattcgctcgcttatcagctcgtcttcgcctgggaacagcccactgggctgttccctttacggctcagcccctgacatggggagctaccgctgccgcccccctacgccgtaagctccgactggctgagctgggattcggcgatctggcggtatacgtcgcagttgtcgagcagttccttgtgcgtgccctgacccacgaccttgccgtcgtcgagcacgacgatgcggtcggcgttcatgatggtgccgatgcgctgggccacgatgagcttggtggaatccttggcctcgcgggcgagcgcgtcgcgcacttcgcggtcggtcttgaagtcgagcgcggagaacgagtcgtcgaaaatcaggatttccgggtgacggtacaccgcgcgcgcaatcgacaggcgctgcttctggccgccggacacgttcgatccgccttgggcgatcgcggcggaatacccgccgtccatgcgcgccacgaactcgctggcctgcgccacgtcggcggcggccttgacgcgattcagctgctcggccggtatatcggcaccttccgcggcctcgccagcggcgatcaacgcggcctcgcgcttgcgcccggccggggtggaggtatcggccatctcgacctccgccgggtcgcccggctgatcgccgtagctcacgttggaggccacggtgcccttgaacagcacggactgctgcggcacgtagccgatcttgtcgcgcagggccttcaggtcgtagtcgcgcacgtccacgccgtcgaccaacacctggccttggctggtgtcatagaagcgcggcacgagattgataagagacgacttgccggagccggtggagccgatgaacgccaccgtctggccctgttcggcggtgaagttgatgccttccagcatcgcctcgcgcgaatccgggtaggtgaagctgacgttgcggaattccacggtgcccctctggccggttttggccacgtcggcggcggttttggtgccgttctcgacgattggctcagtgtcgagcacctccatgatgcgctgcgcggacacgtcggcgcgcggccagagcacgaacaccatgctcatgagcaggaagctcatgatgacctgcacggagtagttggagaacacgaccatgttggagaacacggtgagcttgtccttgagcccggcggcgtcgatgaggtaagcgccgatccagtagacggcgagcatcaggccgttcaggacggtgttcatcaacggcatcatgaacgccatgacgcggttggtgaacagctgggtctcggtgaggtccttgttggccttggtgaatttggcttcctggtagtcctcggcattgtaggcgcgcaccacgcgcaggccggtgaggttctcgcgggccacgaggttgatgttgtcggtcagggtctgcatgaccttgaacttcggcatgaccatggccatcatgacggtgatggacaccagcaggaccgccacggcgatgccggtggcgagcgtccattcgaagccttcgccggcgatcttgcacacggcccatacggccatgatcggcgacttgacgatgagctgcaggcccatggtgatgaacatctgcacctgcgtgacgtcgttggtggaacgggtgatgaggctggcggtggagaacttgctcatctcggccgggccgaaggactcgaccttgcggaattcgagcgagcgcagacgctgggtgaacgaggcggccacgcgcgcagcgatgtagccggtgatgatggcacacgccacggatccgagcgagatgagcagcatcttgccgcccgcgatccagatgtccttcatgtcgctgcccggcgtctcgaccagcgtggtgatgtctgacatatagtcgggcagtttcaggtcgaagtagacctgcccgacgatggtcaccagggcgatgagcatctgaccgatctccgctttggagaggtatttcatgatgcgaaacattggtttccccttgtgttggttgggttggttattggttattggcgattggttcttaagttggctgggttatcggtgattatcggttcacgatgtcttaatagtttccattgtttgattacttacactgtgagatattatacgcacttctgtatgttcgctgtgagcgtcctcaattacctttacctccctctgacgagggaggtgtcaccgcgcagcagtgacggagggagagacccgccagcgggaggaagctagtctcgctcagcctccgcgcgcttagctgccatgtgttcagccacgcgcttgtcccgctccacgaatgcctcacgcacttgttcagccgtcggccgaggccgccccggatggcaaatcgacatatatgtggtgaactcagacaccaggtcaacgaattcgcgcgtgcgccgctcccccatttgcgagaaaatccagcaaattgcggaacgcatttcctctatcatccgatgagactgctcgcgcccggaatcagtgagattcacgcgaataatgcgccgatccttggaatcaatgtcacgcgtgacccagccttttttctccagagacgacagcacagtggagatgcggccggaactggcctgcagcgccgatgccaattgcgatggcgtttgcgtccccttcatggacagctcccggagcacgaactgctcaccatgggctccacgagtgaattccctctgcatcgtcgaacgattgccccacacgctggcatacagttcactaactgcttcctgctcaaatcccataagagcaccatccattcccattcgccacacggcagagcgccgcaaacatccccaagaatatctcacaccgtaaacaattcattactagaaactatttttggaacgcataatgcacacactccacgctctttgatattctgaaagccgcatagatattcacttcggggcgtcgtctaagaatatttgctgggccaacggtagcgacgttggcattgtgctccatgaggtatctggtcgaaaaggcggacgaagacagaccagttgggcggagcgcgcccatacctcaaaaccattgcaattattggctttgaccattttcgtggagtcacgaaaatggtcatgaaaaacataaggacacacccatgaactgcgacgaaatcacacgcaaaaccagcgaactcagcactatcgcacacaccaccgaggactccaaagttgagtattggtatgcacgcgagctaatgacctatatggggtacgacagatgggaaaacttcagcaaagctattacacgagccaagcaagcttgcgacaattccggcgtatccgttgaatcccatttccgtgacactacgcgagacgtgactctcggcagcggtgccacccgctccatcgcggacgtcaagctcacccgatacgcctgctatctcattgctcaaaacggtgatccaaagaaagaagaagtggcacttctccagagctattttgccgttcagactcgcaaaacggaaatcattgagcaacgcatgggagaaatcagccggctcgccggccgagaggcccttgccactgcagagaagaaactctatccgtatacccaaatcacacacaacaaaaccgcacaagagcacatgtacacgcccaaccacgccgcagaacgccggcaaggatgtgatacaggccacagaaagcgttgtaccgcctaggcaatgcaacaattgtccgctatgctctgaaggcagatggcggcacggatgccatcccaaagagggggtatgaccatgattcggggtatgaacctatgcagcatcgccggctgcacgcacgaagcagaagaagcgggcatgtgcaacatgcatttcacatcggcgctggttcacggagcgctgcactacactgcggacggacgtccgtcgcactgctgagcgcaacaacaaagcaaaacaaccagtaacgctcaacggcttccacatgttcatgctctaattgcatgtacttgcagacacaatggccggtctgagccagctgccctcgcatggagcagctggctcagaccggccattattgttgctttgtactgtttgcactgtattgcgcctgcattgcgcaagctcggggtagtgcccgaaaagttgcgcactttggatcgtggccgtccatggcgcgatagtcagttcgcttccacgaggttgtcaccgagccgggacatgtcgagatagcggcgggtcgaccattcgttcgcggtgacgtgacgga

SEQ ID NO: 3293 - DNA, 5635 bp, Unknown
  R151_18m  MAG No. k141_2762
cactgcgaatcgatacagtcatacaatctgtccattcccccgcggaacaccggtcgttccggttaacctcaccgcaaagcgtgctgttgacaataacctcagttggttacgcgggcagtcggttcacgtaaccgttcggcaacacaccagttgaaggagcgacgatgactaccacactgttcaccaacgcacatatcgtcaccggagaacccggcagcacggctgcaagcaccctgccattgcaggacattctcgtcacggatggcgtgttcaccgcattcggccccggactcgcgcaacaatatgaggctcagggtggtgatctggcggccattgaggtggtcgatctgggcggcaaacttgtctgcccaccgttctgcgatacgcatctgcaccttgattacgtattcacggcccgcaagcccggtgcggtgaatgaaagcggaaccttgtttgagggcatccagcgatggagtgagaccaagtccgacttgacggtcgacgagatcaagcagcgcgcgaaaatcggcattaagaaagaaatgctgcatggcgtgcagctcattcgctcccatgccgatgtgaccgacccgaacctgacctcattaaaggcgctgctggagcttaaggaggaattgaaggatacggtcactctccagatcgtcagcttcccgcaggagggcatgtactcctacgagggcccgcatggcgaatcgggggccgagctggtggaggaaggactcaagatgggtgccgactgcgtgggcggcatcccccatttcgaacagtgccgtgagtttggcgagcattccatgcacacggtagttgagttggcttcgaaatacgacaagctcatcgacgtgcattgcgatgagacggatgatccgaattcccgttacgtggagctgctttcggcgttggcatataaggctggcattggcccgaaggtcaccgccagccacacctgttcgctgggatcggcggacaacgcctacttcttccacctgaccaagctgcttaaggcggcgcatatcaacttcgcctgcgcccccaccgagaacctgtatttgcagggccgtcaggataccttccccaagcgccgtggcatcacgcgagtcaaggagctcactgaggcgggtgtcaatgtgtcattgggccaggattcaatgcaggacccgtggtacccgctgggcaatggcaatatgatgctcattcttgattatgtgctgcatttggcacagatgatgagctttgaagaaatcgacgatgcgttgaagttcctgaccgtcaacggtgccactacgttgggcctgcgcgatatgtacggcttggaaacgggcaagccagcaaacttcattgtgctggacgccgatagtgtgttcaacgccgtgtatgagcgctgctcggtattgcgttcggtgcgcgccggccgcacgctgtttacccgcgaggagaccatcgacaccggactcgccctgctgcaataacccgacaacaaacagtagttccccttgacaggggagctatcgccagaggcaactgaggggtagaccaaaaacgtgcacattatgtgtgcgtaggtctacccctcagtcagcttcgctgacagctcccctgtcaaggggagctttgctggtatgcgctagctacgctatcgaaacggactacttctgcggagcgtcaccggaatcggcgggagcggattcggctggttcagtggccggagtggcgtcggctggagtctcgccatcagtggaggcaccggcttcggacgaagtttcggcatcggtggcggcaccgtcttcggcgggcttatcggcggcggccggctcctcgaacttctcccccttgaaggtgaattcgccgaggataccctcgccttccgcatccacaatcacgcgctgaccgtcttcgagatcgcccatcagaatcttctcggagatggcgtcctcgatgtcgcgctgaatcacgcggcgcagcggacgggcacctagcagcgggtcgaagcccttctgcgcgagcaggtccttggcggcgtcggtgagttcgagcgacatgtgacggtcgaacaggcggtcgttgagctgcttgacgtccagatccacgatctggcgcacctgcggctcggtgagctgcttgaagacgatgatgtcgtccagacggttcaggaactccgggcggaactgctgcttcaattcggagctgacctggtccttcatgcgctggtagctggactcgttgttggcacccaagttgaagcccgtgttggcggccttggcgatgtctcgcgtaccgaggttggtggtcaggatgatgatggtgttcttgaagtccaccttgcggccctgaccgtcggtcaggtggccgtcatcgagcacctgcagcagcgtgttgaagatgtccggatgagccttttcgatctcgtcgaacagcaccacggagaacggcttgcggcgcaccttttcggtgagctcgccgccctcctcgtagccgacgtatcccggaggcgcgccgaagagtcgcgaagccgcgtacttctcggagaactcggacatgtccacgcgaatcagcgcgtcctcatcgtcgaacaggaactcggcgagcgtcttggccagctcggtcttgccgacgccggtggggccggcgaagatgaacgagccggacgggcgcttcgggtccttcaatcccacgcgggtgcgtcggatggagcgggacagggcggaaaccgcctcgtcctggccgatgatgcgcttgtgcagctccgtctccatgctgagcagtttcttggactcggcctgggtcagcttgaacaccgggataccggtggtggaactgatgacctcggcgatcacgtcctcgtccacgaccatcttgacgtcggactcgccttcgcgccaggagtcttccttctgcttgcgatcggcttccagcttctcctgcttgtcgcgcagttcggcggccttctcgaagtcctggcccttgatggcctcgtccttgtcgacggcgatcttggcgatcttctcgtcgagttccttgagctcaggcggggcggtcaggcgcttgatgcgcaggcgtgcaccggcctcatcgatcaggtcgatggccttgtcaggcaggttacggtcctggatgtaccggctggacagctctgcggcggactgcagcgcgccatcggtgatggtcacgtggtggtggttctcgtaacgggaacgcaggcccttgaggatctcgatggtctcggcgatggtcggctcgtgcacctgaatcggctggaaacggcgttccagagccgcgtccttctcgatgtacttgcggtactcgtcggtggtggtggcaccaatggtctggagctcgccacgggccagcatcggcttcaacatgtcggaggcgcccaatgcgccgtcggccgagccggcgcccacgatggtgtgaatctcgtcgatgaacagcacgatgtcgccacgagtcttgatttccttcagcaccttcttcaggcgctcctcgaaatcaccacggtagcgggagccggccaccatggaaccgaggtccagcgagtagacctgcttgcccttcagggtttccggcacgtcgccggcttggattttctgggccaagccttcgaccacggcggtcttgcccactcccggttcgccgatcagcaccggattgttcttggtgcgtcgggaaagcacgaccatgacgcgttcgatctcgttggtgcggccgatgaccgggtccagcttgccttcggcggcttcggccgtcaggttgcgtccgaactggtcgaggatggcggaaccggatttgttctgtttgtccgccacgccgccggcgttggccagttcgcccttgccgtcgccagtgccggagttgccgcggatcatatcgatggtcgcgctgcgcaattcgcccagatcgacgtccatcttgatgagcacctgggtgcccacgccctcaccttcgcggatcaatccgagcaggatgtgctcggtgccgatgtagctgtggcccagctgcagggcttcacgcagcgaaaactccagcacctgcttggcgtgcggggtaaaggggatgtgcccgttcggcgccgcgttgcccttgccgatcatctcttcgacctgcttgcgggtggcatccagctccacgcccttcgaggcgagcgccttggcggccacgccctcaccttcgcggatcaggccgagcagcaggtgttcggtgccaatgtagttgtgctgaagggccctcgcctcttcctgcgccaacacgatcacgcgccgtgcacggtcggtaaaccgttcgaacatgcttgtccttcctcaattgacattccgtcttactctaccgattcacgatgacgtttattcatcggattccatgaattgcgccgtgagaggagaagaaaacgatatgctggttcttagattcacccgtagtcgattacaaggaggctcgaaatgagtgaagctgcaaccaagcccgacatcgttgtcggtgtggatggttccgatgaatcctttgccgcgctgaagtgggcgcttgaggaggcttcgttaaccggtcagagcgtcaacgccgtgtttggctggacgcattcctgggatatgggatccgaaccggacagtgacgaggcctgggccaaggtccgccacgatattgccaacgagctgcgtgtgtgggtcgacaaggccgctgcaggcatcgacttcgatccggcgaatctgaagctcacctcggtgaaggcctccggcacttcggccctgctgcagatcggccatgatgcgcagcagatcgtggtcggccgccgctcgctgagccgtgtggcccgctggttcatggggtccctgtccgcttcgctggccgaggccgccgaagtgccggtgaccgtggtgcgcatcgccggcagcgaggatgagaccgtgaccgatgccatcgccaatgccctgacgccaggagaccagccggtccactacacgcagccacagcccgtggtcgaggtggctcgccgcccggtggtggttggtgtggatggttccgagacttcccgccgcgcgttcgacttcgcgctggaaaaggcacgactgcacgacgcgccgctgcatgtgatgttctgctggcagctcaaggatttgggcgttattccgggctatgagaacgccgtggcaccggtgaaggtcggtcagcgccgcgccgaggagattctcgccgggctgatggccaaggccgagattcccgatggtgtcaaggtcagcgcgaatgccttccatattcccgcgtccaaggggctgattgcggcatctcggtacgccagccatctggtggtcggttcgcgcggcctgtccggtctggacgcgcacttcctgggatcggtgtcccgtcagatcgtgaacttcgccgaatgcacggtgactgtggtgcactgatgcaccgaaatcggcatggagtgctaacgcacgtctcggtgatgggcttgcagggaggaattctttattcctgcaaccgttgtagatgactttgttttagcttgtcgctagagcgaagtcatctgcatggcctcgttgccgaggccagctccaagactcacacggcttacgccgtcgcttggttcgcgtttcacaggatgccgcgttgcccgacg

SEQ ID NO: 3294 - DNA, 3471 bp, Unknown
  R151_18m  MAG No. k141_3199
catctcgatctcgccgtcctgcggctgcttgaactccatgatctccatgagcgtggtggacttgcccgagccggactcgcccacgagcgccacggtctcgccttcgcgcacgtccagcgtcacgtcgtccacggccttgacttcgccgattttgcggcgcaggaatccgcctgaagtcagtgggaaggtcttgcgcatgtgtttgacgtcgagcaccatcttgcgttcgtcgcgcgggatgccggcaaacttcgactcggcggcctcggccaccgtgtacacgtcgtggaaggtcaggcccttgctcacgatttccttggtgcgatggcaggccacgaactggcccgggcggcccggcaccggctccatgggtggctcggtggtgcggcagatgtcggtggccaacgggcagcgcggcgcgaatgggcagcccttgggcatgttgaccaggttcatcggagagcccggaatcggcaccagacgactgttgcgttcgcggtcggagcgcggcacggcacccagcaggcccatagtgtacggcatggccgggtggtcgaagatggagtcaacgtccgccttctcgaccgggcgaccggcgtacatgacgacgatgtcgtcggccacgccggcgatcacgcccagatcgtgggtgatgaagatgacggccgcaccggtctcacgctgggccttacgcagcacttcgagcacctgggcctgaatcgtcacgtccagtgcggtggtcggctcgtcggcgatgatcacgtccgggtcgttggcgatggccatggcgatcatcacacgctggcgcataccgccggagaactcgtgtgggaaggacttgaggcggccctccgggtccgggatgccaaccagatccataagctcgatggaacggtcgtggatctgctgctcggtcatcttaggattgtgggtgaccagcgcttccttgatctggtcgccgatggagaacaccggggtcagggcggaaagcgggtcctggaagaccatggcgatgcccttgccacgaatctcgctcatctcaagatcggacttgttgagcagttcctcgccatggtaggtgatggagcccttgacactggcattcttgtccagcaggcccatgatggccatggaggtcacggacttgccggagcctgactcgcccacgatgccgagggtcttgccggggtacaggtcgaagttcatgccgcgcaccgcgtgcacggtgccggcttcggaagcgaagctgacggtgaggtcgcgtactgaaatcaccggttcggatgccacgttgtgcgctcctatgttgttggcgttggtggttgtgttctcgttgtcgctcatgatgttcgcctcgtttctcactcggccttaccgccggagcgggagtacgggtcgatggcgtcacgcagtccgtcgccgatcagctgcacggagaaggtcagaacgatcagcaccacggacgggaagatcagcacccacggggaggtctgcaccacggactggccggcgttgagcagcgtaccgagcgaggtgtcgggcgccttgatgcccaggcccaggaagctcagcgaggtttcgctgttgaccgcgccgatcacgccgagcacggtgttgatgaccagcaccgagcccaggttcggcaccagatgacgcacgatgatggtgaaggacggcacacccatgaacttggccgcgcggatgtattcgcgatcacgcaagctcagggtcagggtacgcagcgtacgcgcatagccaatccagccgaacgcggtcaggccgatggccagccacagccagtcgctgccgcccgttgccatgccgacgatcagggcgatgagcaggaaggatggcacaacgagtagcatatcgagcatccacatgccgaccttctcgaaccagccctcgaagaacgccacggccgtacctaccagcgcggcgatgatcgtggtgccgatggagctgaagataccgatggtcagcgaacggccgaggccccggatgatcatcgcgtacatatccgagccaccgaccgtggtacccagcaggtgctgagcggacggcggcgaggcgagggcggcgaaatcgggctcgtcgtagctccactgggagaatttcgagccgaaaatcgccaaaagaatcagcagaatcagcaccaccagacccaccacggccgaggggcggcgcatgaatcggcgcacatacagctgcatgcggccggtgcggtggaagtcgtcggcgctggaagcctcctgggcgttcttggcgtcggcggactgcggttcgctgccctgcggatcggtgagttccatatcctgggcggcggcgtcggagaccatgttctcgttgtcgttcatcatgtttgatcgtcctttgcgcgaggctcagctcagtcggatgcgcgggtcaagccaggcggagaagatatccgccagcagcgcgccggtcagcgtgcacacgccaccgaacgcggccacggccacggcaccgttgatgtcgttgttggcgatggtctgggtgaagtacatgcccaggccgttgatggcgaacacgttttcggtgatcaccgcgccggtgaacacaccggcgatggagaaggccacgtccacggcggtcgggatcagggaggtgcgcagcgcgtggcgacggatggccacgttgagcggcaggcccttggcgcgggccgtgcgcacatagtcggcgttcatcgtgtcgagcagatacgtgcgctgggtgaggtggtaacccaccatgcccggaatcgtcatcacgatggtgggcagaatcaggtgctgaaggtagtccagcacccacagcaccggattatcgccttgataggagtgcaaaccggtcacgtagaacacgcggctacccacgatgttgttgaagttgatggccagcagcaccaccatcaggcccatgacggcggccggaaccaccaggaagaacgtggcggtggagttgagcacgcgatcctgccacttgtactggcggatggccgtgtacacgccgatgctcacgccgaagatgatggagagcacggtggcaagcgtcacgagctgcagcgaggcggagatacggctggcgatggccgggcccaccggcgactggtcggggctcaggccccagttccactgggtgaggatgcccttgagccagcggaaatagcggatgacgaccggcgtctggtcgttgatgttggccagatcgagcgaccggttgatcgacgcgatcggcggatgcggatgccgcgacatgtagttcgaacgcggatccatgaatgcgctggccaggaaatacgtcatcgatactgccacgaacagcatgatcacgtagttcacaatgcgcttgatgatgtacttgaacacccaaccacctcccaaataactggaaaagtgataccccccccccgctcaaaaccccaaatcgagttcaatatatggactatgggtattgacttttttggccttc

SEQ ID NO: 3295 - DNA, 9699 bp, Unknown
  R151_18m  MAG No. k141_3217
atcagctggatgattacgccgacttggatgcgttgcaggcacgtatagacacgctgttcgagagctaccggcattccctgtacgacgatcgccgttgggtgttcgatcatttgcgctatcaggacgcggcccgcaaggtggtgggcgtgggctcggtgggccagcgcgcgtggacgtcggtgtggatcgcgcgtgatatcgacgatccgatgatgattcagatgaaggaggccacgtattccgtgctcgagcattactgcggcgcgtcgccgtacgccacgcacggtgagcgcgtggttcaggggcagaagctgattcagaatacggccgatgtgctgttgggttggtcgagctttatggccgaggatggccgaccgcgcgactattacgtgcgccagttgtggaatggcaagggttcgattgatatcgacaatctcaacgcttcgggattgagcgatctgtcgcgcatgtgcgcatggtcgttggcgcatgcccacgcctgcaccggcgattcgatcgcgatcgccaattacatgggtggcaccgacgaattcgatcaggccattgcctcgttcgccgtcagctacgccgaacagaatgatgaagactacaccgtcttcaaaaagctcctcaaatccggcgaccttccttgctgagccgttaagcggacagcccagtgggctgtccgtaggcgaggcctgagtgaagcgatagctgagcaaaggtagcttaacagtctcgctaaggcgagtcctttgcctacttcgcgactgcgagcgcttcctggagcgtgaacgcacgtgcgtataacgacttgccgaggatggcagaatcgacgccgatctcggccagttccttgatggcgcgcaaatcgtccagcttggagataccaccggaggccgtgaccttggcgtcggtgcgttcggcgacttcacgcagcagttggatgttcgggccggacatcatgccgtccttggccacgtcggtgaccacgtaacgcgagcagcccacggagtcaaggaacttcatggtctcaaacaggtcgccgccttcgcgcgtccagccgcgcgccgccagtgtgtgaccgcgcacatccagaccaacagccacacggtcgccgtacttcttgatgaccgaagcggtccaatccgggttctccaaagcggcggtgccgatgttcactcgggcggcaccggcctcaagggccgcgtccaacgaagcgtcatcgcgcacgccgccggacagttcgatgttcacgcggtcgccaagctcatgaacgatttcacgcagctgatcgcgattgttgcccgtaccgaaagcggcatcaaggtcgaccaggtgaatccattcggcaccggcctcaacccaggtacgggcggcctcaaacggcgaaccgtaatcggtttcggaaccggattcgccttggcgcaggcgcacggccttgccatcgcgtacatcgacggcgggcagcagagtcaacgacataagaagagcctttcttcagttacttatacataatttgagctctctcgtcagaggggagcttcatgctttttacagcgtggcgatccagttcttgaggagctgggagccagcgtccccggacttttccgggtggaattgcgtggcggacagcgggccgtgttcgtaggcggccacgaaacgcgaccggccgtacgagcaccagctcacgcgttcgggcgcaccgctcagatcaatgtcgaagcgggacgtatccgccggcttcacttccatcgcggcgtaggagtgcacgaagtaaaaccgttcattctccacgccgttgagcagcaccgaatcgggggcggcctcgatcgtgtcccatcccatgtgaggcaccacgtcggcgtccagcaggttcaccgttccgccgatcagcccgatgcccgcggcatgggctccgtgctccagaccgtgttcgaacatgatctgctcgcccacgcacacgccaagcaccgggcggccggcgcggatgcgatcatagatcacacggtcgccgtcgaccttcttcagtccttccatgcatgcggcgaacgcgcccacgcccggcacgaccagaccgtcggcctccaacgactgccggtagtcggaggtgagggtggtgtcgacgccaagattggcgagcgcacgcaccatggaacgtacattgccgaaaccgtaatcgaaaacaaccgctgtggtcatattctctcctatcccctactggttggttggcgtctattcgatgcgggagccgcgtccgccacgcccacgcttggtatggttggcgagaatctgcatcgcctggtcatggtcgagtccagcggaatccaccacttcgaacccttgggtcttgagttggttcagggttacgatgccgagcatcaggtcctcgacgaagcgcggtgtggaggtgaacagcacgggcggcgcgaaactctgtccggcctctccctgcacgtacatggccacttcgagcttgtcggcacgattgactgcaagaatcacggccatgccggataccacggtggtcaggtccttggctgcggcttccgggccgtcgccgtccagattcttcagcaccgcgacggccccctgattggcaccgacgcatgcggcggagatgtccgacagctggcagaacgcggccaacagttcggcggaggcaagacgggtgacgatcagcgccaccttcgccttgttacccaacagtccagcgagttcgttgtcgaagccgagcgaggggtcgaccacgtcggccatggcctcattcaccgcatcagcgaccgacccggtgacgtcgtcggtcataggctggccggaatcagcggcagccttatcagccgtatcatcattcgcgtcggaatcggacttcgctgaagcagcgtccgccgttttatcggcatcactggtatcaccggcatcgccggatgccgaatcgtccgcgaattctttctcgaatccggcgagcgcggcctcaagctcctcgtcggagaagtgcgattcgtccggatcgaacttgtcgtcggccatcacagggctcccttggtgctgggcacgccgtctacacgcgggtcgatttccacggcgaagcgcagcgcacgggccagcgccttgaattcggcttcggcgatgtgatgcggatcacggccggcgagcacctgcatgtgcaggcagatgccggcgtggaaggcgatggattccatgacgtggcggaccagagagccggtgaagtggccgccgatcatgcagaattcgtagccttcgggctcgccgctgcacacgcagtacgggcggccggaaatgtcgaccacggccttggccagcgcctcgtcgagcggcacggtggcgtcggcgaagcggcggatgcctttcttgtcgccgagggcccgcttcagagcttcgccgaacacgatggccgtatcttccacggtgtggtgcacgtcgatgtcggtgtcgccgtgggcgtggatggtcaggtcgatcagcgaatgcttgccgagcgcggtcatcatatggttgtagaacggcacggatgtatcgatatcggttttgccggtgccgtcgaggttcagttcgaggtcgatgtgtgattcgctggtttcgcggacgatgtgcgcggttcttgccatcatgtctcctgtgtgattcgtcatattggattgcggcgggactcgaatcgcttcgggtctcgccgcaatcggaaagaaacgtcccttatgctgcttccactatacgaagcacttcaacaagggcgttacggaaggtttccatctcctcgtcggtacccatgcacacgcgcagccaaccgtccggtccgaccacgcggatgagtacgccgcgcttcaggagctcgtcgaagatggcttcacgcttgtcgaagtgcccgccgaacagcaggaagttcgagccggattcggccacttcaagcagctggtccttgtaggtctgttccttgagccatgcggcggtggcctcgcgggtttcgcgcagatgctcgacacggctcagctgttcatcggtgtgttcgaaggcggccagtgcggcggcctgggtcacggcggacaggtggtacggcatacgtacgatgcgcacgcagtcgatgatgcccttggatgcggctaggtagccgactcgcgcgccggcgaaggcaaaggccttgctcatggtgcggcttacggccaggttcgggtggtccttgatcaggctcacggcgctcggggtgccgggcttgcggaattccacgtacgcttcatcgatgacgagaatcgggtgcacgccctcacccgcgccggccacttcggcggtttcgcaggcggcgagaatacactcgatatcctccatcggcaacggggtgccggtcgggttgttcggactggtgagcagcaccatcgagggcttgacctcggcgatggcctcaagcaccttgtcgacgttcagcgtgaagtcggcgttgcggtgggcgagcttccaaccggtgaaggtgtcgcgagcgtactccgggtacatggagtacgtcgggtcggcaccgagtgcggtgcggcccgggccgccgaaagcctggaacagctggagcatgatatcgttggagccgttcgcgccccacagctcgtccacgtccagacgggtaccggattcacgggccaggtaatcggagaatgcctgacgcaattcaatgtgctcacggtccgggtatcggttgagtgtgggggcgatttcacgcacacgcttggcgatggtgtcgcatacggccgggtccggcgcatacgggttctcgttgacgttcaggcacaccggcacgtccagctggggagcgccgtacggctcctcaccgatcaggtcgttgcgcagcggcaggttttcgggaatcgagctcatcgcagaccggctcccctctcctgctcgcgcagggtggccttgtcatacggatccttgacgaagcgggagagcacgcactcgccgtgggcgggcaggtcctcggacaccgcgaaggcgttgatgcgggcggcgagagccttgaggccttcctcgtcgtattcgatgacttcgaccggcttcatgaacgtgtgcacgccgaggcctgcggcgaagcgggcggtgccgccggtgggcagcacgtggttggaaccggacatgtagtcgcccagcggcaccggggagtacgggccgcggaagatggcaccggcgttcttgatacgcttgacgacagcatcggcatccttggtctgaatctcaaggtgttcggccgcgtaggcgttggccgcgtcgatggactggtcaagaccgtcggtcagcacgatggcagactgggtgccggacagcgacgtgtggacgcgctcggcgtgctcggtcttcggcacgcgatagttgaggttctcctgtaccttgtccgcgatgccggtggagtcggtgaacagcacggaaccggcgagctcatcatgctcggcctggccgatgaggtcggcggccaacaggctcgggttggcggtttcatcggcgatgatgccgatttcagtggggccggcgaccgcgtcgatgcccacgaatgcggagaccagtgacttggcggtggccacgaagatgttgcccgggccggtgatcttgtcaaccggatcgcacaggatgtcgccgtcctgcggctcgctgcccttggcgccgtatgcgaacatggcgatggcctgggcgccgccgaccgcgtatacctcgtcaacaccgaggatggcgcaggtggcgaggatggtcttgttcggcaggccttcctcattgtcgcgggcgggcggggtggcgatggccaacgattcgacgccggcggcctgggccggcacagcgttcatgatgacggagctcgggtagacggccttgccgccgggcacatacaggccgacgcgctgaatcggaatccagcgttcggccacgcgggcgccttcggcgagttcggtgtagaagtccttcggcacctggttggcggccacggcgcgggcgcggcgcaccgattcctcgatggcggcgcgcacttcggagtcgagcgtggtcagggcgtccttgatcgcctcgaccggcacgcgcaggtttttcgggcgcacgtgatcgaacttctcctcgaagtcgcgcagggccgcggcaccgcgttccttgacatcgtccagaatcggacgcaccagatcggtggcttcggaagtgcccattgcagcacgcggcatcgcggcgagcagttcggcacgggacaggttctgaccacgcaggtcaatgatttgcatgatgttctcactcataacgccccatcgtaccaacgtgcggggcctaagcggcgaggaacgcccatgttcacccgtatcgtgagattatcgtgcgtgatgtggattcgtgatgcaggttattgacgcacgccaaatgcccgagcggtctcatcgataatcggcatgtcatgtacggcgacgtgactcacttcggaccatcgcggaccaatggctaattgctcaaccaaggcttgcactgcgtcgctactgccttgtgcttccagctcaaccgagccatcgcggcaattgcgcacccagccctgtacaccaagtcgacgtgcctgagtcaccgtaaaataacggaatcccacgccttgcaccagtccggtgaccgctatatgtttgcggaccaaattcgctgattgcctcatgatgctcagttcctaatccatcgttcgcagcatcgggtagaggctcaggaatcgccggtatgcgtcggcatatgtgcgtgcggtgtcaggattcggctggtatacagtgcattcgcatactgattgcagcaggtctggtacattgaataccaacgaggccattgccactgctggcagaatatcggcattggcgaacacttcgatgggatgctccaacacatcggccagaatctggcaccacgcattttctctggctccgccgccaatcagggaaatctcgattcacgaagacttcttccacaccaaatgccagattcgcagcaccgggcttgccggtgaacggttcgggcgaaacggtggcgatccaacctgaggtgccgatattgatgttgtattgaccagggcggctgacaccgctggccagcgtggtggcacccgcatcgccaatgcccgcgtataccgcagttccggcggagaaaccggtgcgttgtgcagcggattccgtcactgtgccaatgttgtcttgcggattgtgcaggtgtggcaacatggccatgtcgattcctgcggcctcgcacaattcggcatcccattggccattacggatattcatggcaccggctgtggaacaagccgccacatcgcccacgcattcgccggtcaattgggcgatcaagtagtccttggaactgatcaatacatgacgaatgcgcgcgtacgtttccggctcgtgttcacgcagccacatcaacttgggcaacggcaagcagccttcgagccggttgccaacggtgttcaggaaacgttctactccaccctgatatgtcttggcgagttgcttggcctgttcctcggctcggccatccgaatacagaatggcattgcggacgggattgagctcgccgttcaaagcaataacatcctgcatctgaccgctgaaaatgatgccacgaatgcgagtcacattgaattctgactcggattgccgcgtctgctcaatcatgtgcctggaggccgcgcagaaagcttgccaccattgatcggggctctgttcccgatagtcgccgttgataataaggttaagctcactactcgcactggctacgatacggccttgcctatcaaccaaggcacccttcaacgccgtggtccctgcatcgaatgcagccacatattcctctgccacgtgctctccccttcaatctgggttgtgattctactggttattatcgtagccgcttactcgttgcattcattaggtcgatttcacgttcattaggtcggtatgccgtaagacggctcttcaggaatggcgtaatgactgggttctgatgccgaagaccctgggcccattgacctaatgaatgcaataatgacctaatgaacgagaatcacgccatcattacgcaattctttgcccgcgaaacgcggctcattgcatcgtcttgtttctaaaataggaaattgaatgaacactacgaatagtgaggcattatggcaattcaatcgacaattatgctgaacaacggcactgtcatcccgcaggtgggcttgggcgtattccagacaccggatggtgatactacagtgaacgcggtgcagacggctctggagaatggctaccgccatatcgataccgcaatgatttaccgcaacgaagcctcagtaggtgaaggtattcgccgtgctggtgtgccgcgcagcgatttcttcttgaccaccaagctgtggaatgacgatgttcgcgcacgccacggcaaggatgcattccaagaaagcctcgaccgcttgggcgtggattatgtggatctgtatctgattcactggccggcagacggctggcagcaggcctgggatgacttgcaggagatttatgcctctggccgtgccaaggccattggcgtcagtaacttccaaaagcatcatattgatgagctgctgacccacagcgatatggtacctgccgtagaccagattgagtcttccccacaattcaccaatcaagagctcattggccagctgcgtgccaagggcatcgcaaccgaggcttggagtccgctcggcggtaccggcggcaacctgctgagcaacccagtattggccgagatcagtgccaagtacggcaagtcacctgcccaagtggtgattcgctggcacatccagcgcggtatcgtcgtgctgccgaaatccactcatgccgagcgtatcaagcagaacttcgaggtcttcgacttcaacctatcagtcgatgatatgaccgccatctccgccatcaacaccggcaagcgcaacggtgctgatcctgacaatttcaatttctagacctttataggtccagatacgcaaagagggaactctccgtcatttgagggttccctcttctatatgctttcgattcggccacaccctaggtgcgagagcctatgtcttgttggtttcggatatagggaaagccccttggggcgtgtgctccgaggggcttcctgtacgtgtggtgcggcggcgtgctactctcccacaccctgtcgggtgcagtaccatcgccgtgccaggccttagcttccgggttcggaatgggaccgggcgtctctcctgggccatggccgccgcaaatcttctcttgtacggtcagacgctggggtctgccggccttgtggcggcctgggaaccggataggggacgcgatgccgttgatgtttcgtcttgtggccagacaatgctcattgccgtctggtgtcgtttgcaggaggatgatgcggtccccgaacggatcggggaatatgagtgttgcctttcgtccgttagtaccggtcggctccacccctcgcggggcttccacgtccggcctatcgaccacgtgttctgcatggggactacagcagctcgaggctgcacggaatgcttatcttggagcaggcttcccgcttagatgctttcagcggttatcccttccgaacgtagccaaccggccgtgccactggcgtgacaaccggcataccagaggttcgtccacccaggtcctctcgtactatggg

SEQ ID NO: 3296 - DNA, 48980 bp, Unknown
  R151_18m  MAG No. k141_3228
caaggttgacgttgagaccgctgtccgcgagctcaccaccaccgacgtgcgcaacgccaccgacatcttccgcgagatcgctgaggctaccgacttcgtcgacggccgcgtctccatcgaggtcgacccgcgtctggcccacgacaccgagaacaccgccaagcaggctgtggaactctgggagaaggtcaaccgtccgaacgccatgatcaagattccggcaaccctcgaaggcctgccggccatcaccgccaccctggccaagggtatctccgtcaacgtcaccctgatcttctcgctcgagcgctacgagcaggtcatcgacgccttcatcgagggcatcgcccaggctgacgccaacggccacgacctgaagcacatcggctccgtcgcttccttcttcgtctcccgcgtggacaccgctgtcgacaagctgctggaagccaacggctccgacgaggccaaggctctggagggcaaggccgctgtggccaacgctcgcctggcttacgagctcttcgagaagaagtttgccgaggatccgcgttgggccgacctggctgccaagggtgccaaggttcagcgtccgctgtgggcctccaccggtaccaagaacgccgcctactccgactgcaagtacgttgacgagctcgttgccaagcacatcgtcaacaccatgccggagaagaccctgaacgctctggccgaccacggcaacggcgctccgtccatcgagggcacctacgaggagtcccacgccgtcatcaacaagctggctgagctgggtatcaacctcaaggacgtcactgacaagctggaggccgacggtgtcgccgccttcatcaagtcctgggattccgtgctggctgacgtccagtccggcatcgaccgcgtgaacgcctgagattattagctgatgcgcatttcgcgcattaactgattagctcacagaagctccgaccccaaccggtcggggcttcttacgtttgttgctacagtagtacgagcacatgagagaaaggccgaaccgtaatgaacaaacttgtcgcacgccagcggttggtgatgacctttaccttcttttcgatgttcttcggagcgggcaacctgatcttcccgccgtttgtcggagctcaggccggttccgcgaccataccggcggccatcggcttcatcgtctccgcggtcggcctgccgattctcggcgtgctggcggtcaccttcgccggtggcttcgacaaactcgccggccgagtctcccccaaattcgccctgttcctcggcttggcgatcatgctcaccatcggcccctgctttgcgattccgcgtacggcgaccacctcgttcgaaatgatggtggcgcctttcgtgccgtcctcctacggctggctggcccaactcatctactcgctcgtgttcttcacactggcgttcctgttcgcccagcatcccgaaaaactctccaaagtgctcggccgattcatgggaccgttgctgctggtgctgattgccgtcctgttcatcgcctgcctaatccacggtatcggtaccccggccaaaccgatgggcgactactccacaaaccagattgcacgtggcttcctcgacggctaccagaccatggatctgctcgccgcgctctatttcggcatcgtgatttccgcgaatatccgcacccagcaggtcgatgacgaatcgcaagtgcagaaggagaccgcgtatgccggactcggcaccggtgtgctgctgatcgtgatctacggcgcactgagctacgtgggcttggtgtccggcgccatcgccaccatcgatcccgccaaagacacgggcgcgaccgtgctcaccaatctcacctcgtccctgttcggcgcgttcggtaccgcgttcctcggtatcgtcttcgtcatcgcctgcctcaacgtatgcaccggactgatcggtacctgcgccacctacttccacactcggttccagaccgttgcagggagaacgttgagctaccgcacctggcaggtcatcttcaccgtgttcagtttcatcgtgtccaacgccgggctaagcgcgatcatcaaggtttccgtgccggtgttgtccgcactgtatccgatcgccatcgtgctggtgctgctggcgctgacccacaagtcgctcggcgcgcgattcccgcatgtctacttctggaccgtgctgctggtgggcatcgactccttcgccacctgcatctccagcctgatcaccgtcttcggcggctccatcggctggctggacacgacgctggccatgctgcccttgcagcaataccagctcggctgggtggtcccggctatcctcggtgttgccattggtatcgccgatgctccgcgacggtagttcttcccggtctgtgccggagtctggcggtcggtcggtgatggcggttgttgcgacgctcagcggtgccggtgtatcgttcgcaccactatatgagcgcatttggggcggcatgatgctgcatccgaactgtccggcgattggcagaatgacctactatctctcgggccaagcaactgacgactatggagtctgcgtcacctcaccactgtggtttatgacggtgactgcgctgagtgttgtcgcgattctctgtctgaccgttgcgggagtacagggcttttcgcgccatcggctctgttcccgttgccctgttctggtcaggtctcacgttctttacctacagctacaacactggtagacacaccgatttctgcccagcgctatcggcaactgacaatgcaggtcttgtcgcttattgcatcggccgtgaagctttgggactgctgaccgtcgtgttgtgcgtgctgccattgttctccctgctttcggcgattatggccatcacgttggctgcgcacgacgcgacaccaccggcataaaatctccttcatatcacgaaacaacgggcacccgttttgcgaggcattctatccgttccgtgtttcgcaacgcatgagacggcacatccattgaatcaggagtctagaccatatctcgccgaatcttgcggtaggtggcatagaacaggaagccggccacgatgccggaggtggcgtcggagatgggttcggcgatgaagatgccattgacgccgatccagtgcggcagcagcagcgcgagcggcacgagcaggatgatcttgcggaagacggccaagaacaccgactgtttggcctggcccatgccgacgagtgcgcattgcgcgcccatctggatgccgaagataccccagccgcagacgaaaatcggcatcatgcgggtcacgatgtcgatgaccgtctgttccgaggtgaaccatgaggcgaagaagacggggaatgtggcgaacacgttcgcggcggccgctcccctgacgccccatccgaacacgaaaatgaacacggggtcaagaaggatggatatgccggtgccgatgagtacggagaccatggccacagtggtttcgccaactgcagcagcacggtgagggtcagggctatggcgatgaggaacgcggcgctggtgccgaggatgcgttcggctttcttgaagttgccgcgcccaagttcaatggaggcgcgaggcgcgccgcctgcgccgatcagcgaggcgaaggcggtgacggccggcagaatcgggaagcagatgcccacgccggtcatcgccgcgttgcccacttcggggatgtgcccgatgaacagtcggtcgatgatcgtgtacgaggcgttcgccgcctgcgccacgatggtggggaccgacatggtcagggccagacggcccagcccggcatcgatcgtgttcgcctgtaccaaggatcagctctgccagtagtagctgaagaagtcggcgagctcccccatggtttcgtgcagcatgcccatgcgcggcaggtacaccacgcggaagtggtcggggcgatgccagttgaacgcgccgccgtggctgatgaggatgtgcttgtcatgcagcaggtcgagcgcgaactgctcgtccgagtggatgttgaagcgtttgacgtcgatcttcggaaagatgtaaaacgcagccttgggtttgacggcggtgatgccgggaatctggttgagcatgtcgtaaacgaggtcacgctggtcgtgcacgcggccgcccggcacgatgtagtcgttgacgctctggtggccgccgagcgcggtctgcaccacggactgggcgggcacgttcgagcacatgcgcatgttggcgagcatgttgaggccctcgatgtagtccttggcgatacgcttgttgccggacaggatcatccagccgatgcggtagccggcgatcatgtgcgatttcgacaggccggagaaggtcacgcagaacaggtccggggccatcgaggcgatggagatgtgctgcaggccgtccatgacgaggcgatcgtagatttcgtcggagaagatgatgagctggtgttcacgcgcgatgtcgacgatctgctggagcacttcctttgggtaaagtgcgccggtggggttgttcgggttgatgatgacaatcgccttggtgttgctggtgatcttggagcggatgtcatcgatgtccggataccattcggactgttcgtcgcacaggtagtgcacggcggtgccgccggccaggttcacgcaggcggtccacagcgggtagtccggggagggcacgagcacttcgtcgccggtgtcgagcagcgcggacatggacaggttgatgagctcgctgacgccgttgccggtgtagatgtcgtcgatggtgacgttcgggatgttcttcagctgcgcgtactgcatgatggccttgcgcgcggagaacaggcccttggacggcgagtagccttcggtgtcggtgagctggtgggccatgtcatagacgacttcgtccggcgtgcggaagccgaagggtgctggattgccgatgttcaatttcaggatgtgggtgccgttggcctccatgcgcatcgcctcgtcggcgaccgggccgcgcacgtcgtagagcacgttgtcgagcttgtgcgatttgccgaaggtacggcggcggcccacgggaatctcgctgtccgtcaggggcttggcggtgcccgtggcaagcggcgtggcggcgtgttcgccgtccgtgacgctgttggaagcgtccgagttcaattgcggggtggattcctcgccgcgcagccagttcgcgtcaacgtccagttcgctggccaggaattcgagcacgtcttcgcggggcatggtcttgccggccacgtattggctgatatggctcttgcccatctttacgccacgatgttcggcggcgtgcaccaaatcgacctgcttcaatcccctactgttcatcgcattgcgcagacgttccgcaaacaccgatacgctcatatccttatgcctccaaccgggagttcaatttatcttttgaacaacagttcaaagcatactcccggttcaacacaagttcaattttggcgtgttctcgagtctcggccggttcagcccaactgcgcttcaatccattgggcgacgccgtcctcgttgttgggcgggcagatctcgtcggcgatagacaacaccttggggttcgcgttggccacggccacaccccggccggattcgctcatcatgttgatatcgatgaggtcgtcgccgaaggcggcggtctgttcgagcggcacgtccagtcgttcgcacagcaggtgcagcgcgtgctccttgttggcctgcgggttcatgagcatccacatcacgccttcactaatggagatgtcgaagtccggcggaatcagcgcacgcagctcgttccactgttcaggttcggggaagatggtgatcttatccgccacgccttcgggcacgtcgtggaagttcgtatattggaaggcctgtgttttccaatacacgcgcacatcgaagttggtgtagcgcacgtcgttcatcacgatgccgagcttcaggccgggcatgcgatcgagcaggaacagacagacttcgcaggcacgccgtgaggagaagccaatcttgatcaaatggttctcatcggccggcgtggcacctgaggtgagcaggtcgaagtcggagtgggccgggtcgaaatcgatgagggcaccgttcagatagattacggcgtccaccggcagtttttcggcgaactggaggccggtactcaccggccgcgcggtggcgatggcgaatttcagtccggcatcgtgcgcgcggttgatggtgtcgatgctgcgctgggtgatgaaccggtcctcgaatacctcggcgtcgtgcagcaacgtaccgtcgaggtcggcgaccagcagtcggggttgtttcggtgtgatggcgtcgagaatcacagcagcccctcgcagtgttcacgcacgagttcggcggaatggtgcaatttggcctgctcgtcctcgctcagatcgagttcgacgatctcgttggcaccattggcgcgcagttcagtggggacgccgaggaacacgtcatgttcgccgtattcgccgttcagcagggtggagacgggtacgatgcggcgttcgtcccacaggatggtctgcacgatgccggccacggtggaggcgatgccgaagttggtaccgcccttggccgcgacgatctcatcgccacgggtgcgggtcttctcttcgatttcggtggtggacacggaggcgaaacggtcttggttgtcggccaggaagcgggcgaatggcttgccgccgagcgagacggtggaccatgcggtgaactgggagtcgccgtgctcgcccatcacgaagccgcccacgttacgcgggtcgaggccggtctcttcgccgatgatggtcttgagacgcgaggtgtcgagcgcggtgccggtgcccagcacctgggtgcgcggcaggccggaacgtttccaggcataccaggccatcacatcgaccgggttggagaccatgacgatcacgccgtcgaagccggaggccatgacgttgtcgaccacttcgcccacaaggcccacggtgaagccgagttcggccatgcggttggagttggccggcggcttgcggcccacggtgatgacgacgatgtccgcgtccttgcagtcggcgtagtcgccggcgcgcaccttgacgtggcggtcctggaattcgctgccgtcatcgaggtcgcgggcctcccccagggctttggcggcggagcggtcgatgagcacgagctcattgcacaggccgtgcgtgacgatgccgaaggcggcggtggcaccgacctggccagtgccgacgataacgactttgttgcggttcatagtgaccatggtgatgtcctttcgtaatactcgatagaacgcatacgacccatgaccgacggtaacggtcatgggtcgcgagcgacaagtctatatggcgtgcaagccgatcagccgaggttgaacttggtcatcatgtcgaggccgatgatcaatgccacccacaccagagcgatgataacggtccaacggttcaggttcttttcggcgacaccggaagtaccggcgttctgggtcagaccgccgccgaacatgtcggacaaaccgccgcccttgcccttgtgcataaggatgagcagggtcagcacgaagctgagcagcacgacgatgacttgcagcgtgatcttaagagcggtcacagggtacctccggattgattgaactgttgaccagcatagcgcacacacgggaaaaccgtggtattagttccgtgatttcgtggatttcagtgccagtcgagcgattttggcgagttcctcaacatccagggccgcccctccgatcaggaagccgtcgacgtcgggttgggaaatgagttccgccgcgtttttcgaggtgactgatccgccgtacaggatacgtacgctatcggataccttcgtgccaaaagtggtcttcaaatcgttgcggatggcgtttgcggcatcctgggcggattgcggagtggccaccatgccggtgccaatggcccagacaggttcgtaggccacgatgagttcggcggcttgttcttcgttgagatcgcgggtgacgtctcgtacctggcccacggcgaaatcgagttcaatgccttgacgtcgttcctcgaagctttcgccgacgcacaaaatcggctgcatgccggcggcaagcacggcacgtacctgatcgacgatattggcgtcatcttcaggatggtatttgcggcgttcggagtggccgacgatgacgtacgagcagccgagatgggcgatcatgtccgcggacacatcgccggtgaaggcaccttgggtggtcacggaaacggattgtgcgccgtaggcgacatggagcttgtcggcttcgaccagcacctgtacgctgcgcaatgacgtgaacgaggggaaaagcgcgacttcgcagcgtttgaagtcaaagcgagcgtcacgcaacagccataccagcttctgcacgaagtaagtggcttcaagatggtcgaaattcatcttccagttgccggccaccaacggaatgcgtttggacgccatatgtttcccctctaaaaaatacgtagctcccctcaaggaggggagctagaaaatggattactcaagcaccttcagaccagggagctccttgccttcgaggaactcgagggaagcgccgccaccggtggagatgtgggagaagccgtcctccgggaagccgaggttacgcacggcggaggcggagtcgccgccaccgacgatggtgaacgcaccggctgcggtggcgtcgaccagaccctgggccacggccttggtgccggaggcgaactcaggaacctcgaacacgcccatcgggccgttccacacgacggtcttggagtcgacgatcttgtcgtggaagagcttctgggactccgggccaatgtccagacccatcttgtcggccgggatggcgtcggcggcaacgacttccggagcaaccggggtgtcaccggccgggaagccggcgttcacggcgacgtcggtcggcagcacgagctcaacgccgttcttctcggcggtctcgatgtagcccttgaccttctcaagctggtcctcttcaagcagggaggggccgacctcgtagcccttggccttgaggaaggtgaacaccatgccgccgccgatgaccagacggttggccttgtcgagcaggttctcgatgacgccgagcttgtcggagaccttggaaccgccgagcaccacggtgaacggacgctccgggttctcggtggccttggacagggccttgacttccttctcgaccagcaggcctgcggcggccggcagatcggcggcaacgtcgtagttggagccctgggcgcggtggaccacgccgaagccatcggaaacgaaggcctcgccgagggcggcgatcttcttggcgtaagtggcgcgttcgtcggcgtccttggaggtctcctccgggttgaagagaacgttctcaagcagcaccacatcgccatcgttcatggcggcgaccttggcctgagcgtcctcgccgtaggtgtccttggccagcggcacgttggtgccgagcagctcgccgaggcgggcggcaaccggggccaggctcagctcaggaacgaccttgcccttcgggcggccaaggtgggccatgaggatgaccttggcgccttcttcgcgcagggtcttgatggtcggcagagcagccttgattcgaccgtcatcggtgatggtggtgccgtccagcggaacattgaaatcagcgcgaaccagaacgcgcttgcccttgagatctccaaggtccttgagtgtcttcatgaatatcctttccttgacgaatcgcacgtcaaagtggccaattttgccactttgcatattacaggcattccggaacaaaacaccgcattcgcctactgactgaatgcggtgtttcgttacgtcgttgtcgggttacttgccttcggctgcgcgagccttctccgttttctcggcaagctgaagcagtcggcgaattcggccggcaatcgcatccttggtgatttgcggttcggcgatcttgccaagctcctcgaggctcttgtccacgtgatcgatgcgcagctggccggcctgacggaggttgtccggaatgttatcgccgagcacttcgaaggcatgctgcactttttcgctggcttcggcggcagccttggcggaacggcgcatattggcgtcatcgaagttggccagacggttggccttgccgcgggcctcgccgtcggagcgcttgccggtccattcgcgggccgaacgggtggcgcccatgagcttgagcatgcgttcgatggcgtcgggatccttgagggtcacgcgctcggagctgcgcagcgtgcgatgcttggcctggatgccgagacgacgggccacgccacacagggccatggcggcctcttccgtggggcaagcgatttccaggaagctggccttaccgggatcggataggaagccacgggccatgaaggcgccgcgccatgctgctttgatttgggcgatggatccgttgaccacttcagacggcagtccacggacctgctgcttgcggcggtcgaccagtccggtctgcaaagccaaggccactacgttgcgggtgatgagcaccacgtaggtctcgacagggccgttcggggtctgacgggtgaggtggttgacctcggcttcatgcccgaacgtgttcctcaacgtgttcttcagccattctgcaacgtcaagcgaggtgaatacggcttggataacgtatgtattctgtaccggtcgaagaccgccgccaaaacggatcatggccgcagcttgggccttgatcgcggctggtgaatcgccttcaaaggccgccaactcgcttttgacatcgtccagaagagccaagatctacctcctacagtcccgttcttctcaatgcttcaggcgcttcgtgccgttatctgctgtcatacggtcggaagccatcggctttctgtgatacctaatctggtggacaagcgaacccgtttgatacgtattatgggctttgctttctcgcagtgtggtcaccgaacgcttgcccgatgaccgctcgacgcctgcttacgatgagtgacgcttatgctgttctctcgcggaaacggttacgttgagcccatgtgcgcgtaagcggcgagccagctcttcgctcatcgccaccgaccggtgctgaccaccggtgcagccgacggcgatggttacatagtgcttgtcttcctgggcgtatccttccaacgcaatctcgatagctttctcataagcgtcgagaaattccttggctcccttgctggaaagcacgtagtcggcgaccggcttgtcgtgcccggtaagctcgcgcaggttgggaacccagaacgggttgggcagaaaacgcacatcggccacgaaatcggcgtcgatgggcatgccgtatttgaagccgaagctgaagatgtgtaccgccacggtggtggggccggaaccgagcatcgtctcgtagagtttggtggacagctggtggatgctcagggagctggtgtcaatgacccagtcggctcgctccttgaggtcttccagcaggtgacgttcctcaaggatgccgtcgatcagtcggttgccgtgctgcagcgggtgcgggcggcgcacggattcatagcgcttgatgagcacttcgttgctggcgtcgaggaacagaatatgggttttgacgccgagatcatccagatggccgagcacggcggccagctcgtcgaaatagctggagcgcacgtcgatgacggcggcaagcttgtggacgcccgaccccgatccggaaccggaggtggtcatcatgtcgacaagcgggataagcagtttgggaggcaggttgtcgaccacataccatcccatgtcttccacgcagtcagcggcatgagagcggcctgcgccggacataccggtgatgagcagcacctcgaaggcatcaagcggggtcggctggttgtccggagtcgatgtggatgtcgcggaattcgccggcgcattcgtggcggccgcctcgccggtatcgcggattgttgtctgttgactcattacaacgcctcctcaagagctttgcgcatcgcgatctccagctggtcgtcttcggtggtggtgtcctgcagacgctggtcggcatcgctgggcgggtcgtcatcccagataccggtcatcagcaatacctgtacgagagcttggtacagcagcatttcttcgccgccgatggcgtgaccgccatgagcgcgccaggcttccatgagcttggtggggcgtggatcgtagaccacgtccagcagcagtccggagaatggctcggttccggcattggtgagggcatccgcgacgttgtcggccgcatgtccgggaatcgtgttgatgacataggtggcgttgcgggctgcctcgagcagggcctgatcgtcgcctaattcgatttcgctgtacgggttatgcacgttgacgaacttttcggccactggtttaagcccggtgtttttcccagggtggcgggcggcgacgatgatatggccgatttcgggcatcatgcagcatgcggccaacgccgaagtggcggtgttgccattgccgaggatcagcgcggcgccgcttctcgatgcggtgtggtgttcgccgagttcgcgattggcgtggtcgaaggcgagttggatgccgatgacatcggtgttgtacagcttgatgcccggcttgccgttcggccaagcgggatcatcggtagccacgctccagtcgaataccgcggtattcgccaccttcagttccttggcccacagattttccggaacaccgtacggttggatggcctttttcaacggcatggtcaggctcaggccagcccacgtcgagtcgaggcctttgaggaaagcgtcgaggtcatcctctcccacttcgtgcttgtcgtacagccaatcgtcgagtttcagcgaacggtaggccgcgttgtggagcacgggtgacaatgagtgcgcgacgggtttgccgagtacagcgcaacgatgattggccatatcccctccttgatgtctgttcccatgctagccgacactttgcttcgaatatgtcaaccacaggccccgcaaccgaaaattcactctgggctgctggaccgggccggctcactgctcgtgcagcgcgttgtacagcgcttcggctttggcgtggccgatgcctttgaccttctcgaagtcctcgacactggcttcgcgcatggctttgaccgagccgaagtggttgagcagccgcttctggtagcttttgccgatgcctggaatctcgtcgagcgcgctgcgcagggcgcctttgcgccgctgttggcggtggtaggtgatggcgaagcggtgggattcgtcgcgtacacgctgcagcagatacatgccttcggactggcgtttgaggatgatcggatagtcgtcgtccggcacccacacctcttccaagcgtttggccagtccgcagacggccacgtcgttcacgccacagtcctcgagcgccttggcggcggccatgacctgcggcttgccgccgtcgaccaccaccaggttcggcttgtaggcaaagtgatgccggtttgtgttctgctggacgatgtcgggcgaggactcccgtgtatcgttctgcactccgtccggcaccgcgtgccccttgccactgatgtcggaaccgttctcaccattgtcgttaccgttcgcagcgattgtctccgccgccacggcagtggtcatcttgccggcagccgaggccgcgcgctgttccgcgtcgatgctttcgccggagtcgccggcgatgttgccgtgcctgaagcggcgggtgagcgtctcgtaaagcgcggacagatcatccaccgcgcctttgccgtccttgcctcggacggcgaagcgtcggtattcggatttcttggcgatcgcgtcttcgaacaccaccatggaggccacttggaaggcaccgcccacagtgttcgaaatgtcgtagcattcgatgcgcagcggggcttgcgcgagtcccaatgccttggccacatcgttcatggcctgggtgcgtgcgcccatgtcggagatgcggctcatcttgctgcgttgcagtgcttggctggcgttctcgttggcgcggtccataagctgcttcttgtcgcctcgcgaggccacgcggatggtcaccgcgcccccgcgcagattggtcagccagccttcgagttcctcgcggcgggccggttcgacgggcacgatgatttcgcgcggtaccggtgcgatgggtgccagcaggtccgcgcgtccggtggtctcctgacgggtgttgcgttctcgggtggcctgggcgcgtgccacagcgtccgtggccgtgatggtctgtgtggagccgatggcctcgcgattggtggagatggtcgcggccgactgggggtgattgtccccggcggcgtccgaatacacctgcaccagaaggtcggccatcaagtcggcgtcatcgatgtcctcaactcgttcgacgctccagttgcgttcgccgcgaatagagccggcgcgcacataaaaggcgtgcaccgaggcttcgagctcgtcgctggcgaagccgaacacgtccgcgtccacatcctggtcgaagacgacggcgttctgttgcaccacggtttccagcatttggatctggtcgcgcagtcgggcggctttctcgaattcgagttcggcgctggcctctttcatgtcgcgggtcaactgggcgatgtatggccgtccgagtcgtccggtcatcacgccgaccagctgttcgcacagccgccggtgttcgtccgcttcgatacggttcacgcagggtgcggagcatttgccgatggaggcgaacaggcatggccgtccggtcagttgcgccttgtggaatacgttggtggtgcaggtgcgtaccgggaacgtgcgcagcaaccggtcaagactgtgccgcaattcccacactttggcataggggccgaaataccgggtatcccgccgtttgcgcgaccgcgtgacccacacgcgcggaattcgctcccccgtgctgaccgcgagatacggataggtcttgtcgtcgcggaactgcacgttgaaccgtgggtcgaattccttgatccacgtgtattccaacgtcagtgattccagttcggtggcgacaaccgtccactccagactgcgtgcggtcagcaccatggtctgcgtgcgcggatgcagcagatacagcggctggaaataattggtgagcctgttgcgcaggttcttcgccttgcccacataaatgacgcgcccttccccgtcgcgccatttgtacacaccgggtttggcggggatatccgaggtcttgggtcggaacaggtcgcgagaatcccccagcaaaggtgccccattcgcattcaccttcgccgtcgtttccccggcgcccacagctacgctttccggcattaacgccgccgcggtcttccgccactcatccggactatgccgctcaatatcgttcgtcataatcctcctcgctattaagcaaaaccaatcatcagggattgggtgggttggtatgtgctgctggaccgtaaagacttggcctgagcggcccggagcgtgtccagcaacataccaccccaacccacccgaggtcagctgcaatggaaggctaaagcatggatttcaggaacttgccggtccatgaggattcgcattcggcaacctgttcgggcgtgccctgcgtgacgatggtgccgcctccgtcgccaccctccggaccgagatcgatcagccagtcggcctccttgatcacatccagattatgttcgatgacgatgaccgtattgcccttgtccaccagggactgcagcaccttgagcagcttgttcacgtcttcgaagtgcaggccagtggtcggctcgtcgaggatgtacacggttttgccgtcggatcggcgctgcagctcggtggcaagcttgacgcgctgcgattcgccgccggacagggtgggtgcgggctggccgagtcggatgtagccgaggccgacgtccacgagggtcttcaggtatcgggagatgccggtgtacgccttgaagaagtcggcggcctcctcgatgggcatgttgaggatgtcggccacggtcttgccgttgtacgtgacttcaagggtctcgcggttgtatcgtttgccgtggcagacctcgcagtccacgtagacgtcgggcaggaagttcatttcgatcttcagcgtgccgtcgccgtggcaggcctcgcatcggccgcctttgacgttgaaactgaagcggccggggccgtagccgcgcacctgggcttcgggagtcttggcgaaaagggtgcggatcttgtcccacacaccggtgtaggtggcggggttggatctcggcgtgcggccgatcgggttctggtcgacgtggatcaccttgcgcacctggtccacgccttccacgcgcctgtggcggccgggtacgatgcgtgcaccgttgagcttgtcggcgagcaccgggtagaggatcgtgttgaccagcgaggatttgccggagccggagacgccggtgaccacggtgagcacgccgagcgggaagctcacgtcgatgttcttgaggttgttctcgcgggcacccacgactttgagcacctgggtcttgtggatcttgcggcgcttggagggtacggcgatctctcgccggtgggcgatgtagtcgccggtgatggagcgcttggcttcgatgaggtgcttggcggggccggagtagatgacttcgccgccgtgttcgccggcgccggggccgatgtcgaccacccagtcggcgcggcgtatcgtgtcctcgtcgtgttcgacgacgatcagcgtgttgccgagatcgcgcaggtggtgcagggtttcgatgaggcgttcgttgtcgcgctggtgcaggccgatggacggctcgtcgagcacgtacatgacgccgaccaggccggagccgatctgcgtggcgagtcggatgcgctgcgcttctccgccggacagggtggcggccgcgcgcgagagggtcaggtagtcgaggccgacgtcgttcaggaagccgagtcgggccttgatctccttgagcacttcgccggcgatcagctgtgccgagccttcgagtttcaggccgttgatccaggcgagttcgcgtacgacgggcatgtcacatacgtcgaagatggatttgccgtccacggtgacagagagcacctcgggcttcagacgacgtccgtggcagacctggcagggcacttcgcgcatgtacgactcgtagtattcgcgcatggactgcgaatcggtttcgtcgtggcgtcgcatgagcgtgcggatcacgccttcgaagccggtggagtattcacgcaggcgtccccagcgattgcggtaggagacgttgaccttgaagtcgtggccgtagaggatgtcgtgcttgacgtcgtccggcaggtccttccaaggggtcttcatggagaagcccatttccttggccaagccttcgaggatgtggccgtagtactgggaggtcatcttggtgccgctccacggttcgatgacgccgtcggccagtgacttgtccgggtcggagatgatgaggtccgggtcgatttccagtttgaagccgagaccggtgcaggcggggcaggcaccgtagggggcgttgaaggagaaggtgcgcggctcgacctcatcgagttcgagcgtgtgcccgttcgggcagctgcggtgttcggagaacggctggcggcgggccgggctgccttcctcctcgtccacgaagtcgatgacgatgctgccgttggcgagcttgagggcggtttccaccgaatcagtcaaacgttggcggataccgtccttgaccacgagtcggtcgaccacgacctcgatggtgtgcttcttctgcttggtgagtttgatgtcgtcggacagctgtgtcatctcgccgtcgatgagcgcgcgggcgtagccgtcggagcgcagcagctcgatcatgtccacgaactcgcccttgcggcccttgaccacgggcgagagaatctggaatcgagtgcgctccgggtagccgagcagcgtgtcgacgatctgctgcggggtctgggaggcgacgggctcgccgcattcggggcagtgcgggatgccggtgcgggcgaagaggagtcgcaggtaatcgtagatttcggtgatggtgccgacggtcgaacgcgggttgcggttggtggtcttctgatcgatggagacggccgggctcaggccctcgatgaagtcaacatcgggcttgtccatctgacccaggaactggcgggcgtaggcggacagggattcgacgtagcgtcgctggccttcggcgaacagggtgtcaaatgcgagcgaggatttgccggaaccggacaggccggtgaacacgaccatacggttgcgtggaatcgccaggtcgacattcttgaggttgtgttcgcgcgcaccctgaatcgtgatcttgagatcgttcgggatgtgcgagatatcagctaccagcgaaccatcgtgttcgatcagcggcgcctttttgatttcccggctcaggaaggagtcgctggtcatcaccttttcgacgatgacctcaccgttcttgcccttgctggttttcgcgccctttgcgcttgttgcgcgccttgcgccagtccgcgttgccgccacagccacaccccaccttccatctcaccgttcccgcgcgcacggttatgcgcacgccaaatctgtcccaaggatacccgaacacacgaccaaattcgaacgcttgttcgatggcgtgtcaggccggaaaaccgaaccatagtatgcaaaattccggaccatcagtggaccgaaacgcaagagccggcccacgcgacatcaaccgtgcgcccagccccagtcaagctctatcccgaagacctctcctcctctgatttgccccggttcacatgtcaatcgtttgacgtccgcatcggggcaaaacccgctgtcccggttcgtgattttggcctgttttcgagaaccaggacattccagtttccacgaaccacataaaacgcgaacggaaacggcggaataaagccaatctcagaatcgccatgttgtcccgattctcgcatcaaacgattgacgcccataccggggcaacacaacatgtcccggttcgcgaaaaacacccgaaatcacaaaccgggacaacggattctgccccggtacgtccgtcaaacgattgatgttcgaaccgggacaaaatcttcaatggactccacggggatgccaagcttgcgtaattcgtcaactgcatcacgcatgggaatgcgttcctgttcgatacgccgataagcgatggttttgtcagcacacagtcgttcataaagacgtcgctccgccgattgaaggccgggcgtcggcttaggctcccgcatagcaatcttcgcgctgcgttcagtacgatcggtaccaaaatcgtcgtggcccggatcgagataacggaaccgcagttcggtcggccgttttgacagacccaacgtttcgacaccgagcagtcggcaaatggccttacgacgattggtttttgactcattcagccatttgccgctgaatcctgtcagtggaatctgtgcgacggtgcgcttcgcgatattccgccgccagcgtacgaccaaccacacgcatggctattgattcgtcaggaacgacgactttggagatcaactcgacagaggtgcctatggtgcgatgcttggttatgatttcgcaaccattcttgcttgcccattgccgtatctcattgttgttgtcatgcactgcaatcgcattggtttccaaaaatgcttggtccggcaatcccaccggcacgggaaatggccatgccggttcgatgtcgtacatatgtgaacgcatatgtttcttcacgcatgtggtgatcgcagcgatgtctttcatgccggccatagttcccatcacctgctttcgaacatcgtcgagtcgaaccgaatcgtcttaataccggcgacgccgggattgctcattcggcaaccccgtcatccttcaatatatccgacgatgattcatcgtccatgtcattctgatgcagcacggcctcgcgcagggaggtgaggccggtgtcggggtccttgtaggtcacgtaggccttggtggagacctcgaggatttcaccggtcttgctttccggggcggagacgatgacctggaatccgaggcgcggcagcaccgtgagggcgcgctgcgtgtaacggccgtcggccttgatgagcgcctcgtcgaggaacagcgtggtgtacgagggctcgctggtcaggccgccgccgagcaggtagatgagcgccgcgccgtatacgaacgaggtgagctcctgcaaggcgccgcccgaacggccgccggtggaggtgatgcgttcgtccggaccgtcggcatgatgcacgatggcgtagaaggacgagcggcagcgcgggtcgaggttgcgggcgccgtagcttttcacgccgttcgtgtccttgacctgcgcgagttcggcgcgcagcagcccgaccatcggcgcgcaggccgcgaaagccttgcgcgaggcgtcggaatcgttgacgtcggcggatttccaatcgttcagggtgccgatgacgcggatgagctgcgcccagaaggtgcgctcgggacggcgcacgtccgcgtgcagggacaggctgccgtgcttggggccgaactgttggcccttgagcatggcgttgatgcggtcaagctggtcgtggatgtcgctggcatccgtgtcgatggcgcgtttgatggtcaggaagctcctgagcagctgttcgaggcagcgccggtattcggcgtcggtggcggcaaccgcggccagctgggtgaggctggcgagttcgtcgagatagtaccggtagtcctccacgctggcggtcagcgaatcatcgtcggccgcgtagagcgcgatgtaggtgctcattttcgattcgacgccggtgcgcgcggcgtcggcctggccgttcagcagattgatgcgggaggccatgtccttgccgatgccggcgatggtgcgttcggggaagctctcccccggcgcctgcgttcctgccgcgcccgcgccgatgatcatgtgcgcgcgcatggccgcgtccgccaatccggcgaatcggttgtcgtaggattcggcgagcgccgccgtgacttcgtccggcagcgggccggaagcggcgtcatcgtcattgtcggcggtggcaccggcggcgtccgtcgtgccggtgtcggcatggtcgcgcagccagatgagcgccgcttcgacggcgctgccggcgcgggccgcggcctggtcggattcgatgcgctggcgttccgcacggtcgagttcggcgttcagttcgtcgcgctgtttggcgagttcggcgagtttgggatcgtttttgatggatgcgatggcgtcctgcgtgtccgtgatggtccgttgcgcgccggcgatgtcgatgcgttcccatgacgtgtaggcgagctggttggctagttcgagttcgcggtggaggttatcggactgtgttttggcggccgtgtagtcggtgtcggcttggctgagcgcgttgcgggcggcgtcgacctgcgctgcgagcgcgttgaggtaggtttcgttgacgaatccgatgacctgggcgcggtctttggtgccgtgctggccgcgtgcgccggatttgatctgaccgtcggcctgcacctgacggttggtgcggtcggtgtcgtcgatggcggtgacgcatagggcgtcgaatcgttcgtcctgggtctgcgagcgcagccagtcggcgaagggcgagtcgtcgcggtagcgcagtttgccggacagccagtcgccgtcctgttctccggtgagtatgttcgcgtgcgcgccggtgtcgtcgtagtggcgtgcggtgtccacgaactgccaggtgcgtcggggcatggtgcgcgggtcgatggtgctgactttggcggcgaagccctgttcgtggcgcttgtcgacgaggatggtctgggcgatgggcgcgtaggcgacgttcatggcgagacgccagtcttcctcatgttcgttcacgtccatgagttcggccacgtacggcagttcggcgggggcgagtccggtggcgcggcagagcatggcgcgggtttcgtccatctgctgggagatgcgggtgcgctgggagcgttgccggtcgaagtcgcgttgcagtcgttcgaggtcgccgcgtgcgccggcccgtgcgttgatggcggcggtgagggcttcctcgcattcgccgtctcgtttgttgtattcgcgtttgaagttcacggcgttgatgcggcgttcgttccaggactgttcgttgccgggcagtgtctcgccgatggatgcgaacgtttgttcgattcgtgttcggttggcttgcatgtcttcgagggtgcggcgggcctggtcgagttcgagttcgagtcgggtcaggttgccgccgtccagaccctgcatctggcctcggatcatgtcgaggcgggtgcgcaggtcttcggttcggcggcgcagcagcttggcttccgcctcgctgttctgttgttcggcgcggtcggcgggcagttgggcggcgacttcgccgcgcatgcgggccaatgcccagtcgcgcagcacggccggcaccgtgccgtcgacggccggcttgaccggttcgaaggcgcgggccttgccgcgtgcggcggcgtattcgccgtaggcctgttggatgccgcgcagcgtgtccatgcggcgggtcttctcgtccatggcgtggaagttctcgtcgtaacgttcgtagtcctcgaccgtggtgcgggccaggtccagggcttcgggcacgccgagcacgccttgtttgaagatgtcgtcgagccgggagggcgcgtcggcggactggatcttgtgcagcagtcggcaggcggcctcgctcaggcccattgcgctccagatgtgtgtgtggaacgcttcggcgctggggaatgtgaggcagtcggggtaggtggctttgagctgggccggtgtgaacggggcgtcacggtattggtccatgcgcctggggtccacgggcttgccccagaccacgtactggcggcgcacgtcgccgcggccgtcgccgggcatcaggtagaggaatttggcgcaggaaagcacctggccggtggtctggttgcgataggtgtccacgatggcgccccacacgggttgcggcgcgccgttctcgtcgcgaccgcgcaggtagagcggctcgtcgccggtttcggtgctgcccacgccgaccatgccgcgcaggtaggtgtagtcgctgcgttcggagcggccggagttcgaggccttgttgaacggcgtgccggtcgggtacagcagggagatctgcgcgtcgaccagcgtggatttgccggattcgctggcgccggcgagcagggtcaccggcagcttgtggtccgtggaggggcggaattcgtggtagccctcataggagccccagttgatgagtcggcgggattccagcatccaccggtccgcgatcatctgcacgtctgtcgcctgcatcattcggctcccttctcgtcgtcatcgtcatcttccgtgtcgccgtcgccgtgttccgcgacgtcgagccaggtgtcggccagttcgcggtcgagcaccacgggcacgagcggcgtgatctggtacatggcttcatcgtccaggcgcgccaaatacccgtaggtgatcatcgcggagacgatggcgccgatctgctttgccacgccttcctcgtcattgcgggctgccaggtaaccggcgccggtggcgagcgcggcgcggatctcctcaaagctgacgagccagtcggcggggtcggcgtgcacgttctcgtattcgaggacgcggatgcgcaggaaggcgagcagcgcggcctcctcgcgtttgaggctgacacgggttttgagcgagcgcagggtcacgtcgtcgccggccacgggcgtggcgtacatgatgcggtagcgttcgttgatcaccaagtcgagcaggtcgttgttcagggagcgtacgacgacgtcgcggttgtcgagcacggtgtcgtaggtgggcccgctgatatagcggtcgcgtttgagggcgatggcggccatgcgtgcctcggccggcatgtcgccggtgtcgccttcgaacagggcgtacgggttggcgttgtccatgtgctcctcgtgttcctcggccacggtcatccttcctccacaatgatgttcagctcgtccatgtcggccagcaccggtctagtgatccagtgccggggctcgccgtcgatcgatacgcaatgccaagtcgcggtatcgccgcgctgcgccggggccggctcggtggcgatgtcgctgtcgatgccgacgccgtcagtggacggctcgtcggcgatggcgctgccgcttacggctcccagcccgcccaggaagccgacgatctcgctttcgcggcgttcgctttcgggcagccggttgaagctggcggcgatgtccacgagggttgcgttggacctgtcatcggacctgtcaacggtcaccgggttgcgccggatgaggctgaccatgcgcaggagtcgggggccgccgctgttgaccatatcccgcagatcggccaccggagtcgcctgcggggcttcggcggcgaggtcgctcaggccgggtgcggtggcgcgggtcatggatttggccgggcgcatcggcaatggcgcgaacagcgcgtccgcggtggccgtgtcgtacgggcgcgaggcgtctcccatatgggttttcgcatccgcgttgaggcgcgcgtacagtcggttcaagcgggtgagcatcgtacggtagcgagtgtcggtttgctggcgcacgagccggctgatcgcctcgtcggagacgcgcatctggcggcgcacggcttcgatgccgtcgtagatgcgggccagttcgtcgcggatctggccgagcagcacgccggattcgccggccagatacggggttttggcgatggcgcgcagggcttcgtcgatttgctggcggccctcgtcggtgatgatcacctggaaggcgtcctcgaagcggcggccgctgtccgattcgctgaacgagcggcggtattcgtcgtggtagcgggtcaggttctcgtccacgctgatgtcgccggtctgcatgcgccggcgcaaggcgtcgccgttgtcccgctcgtcgagcacgagttcgcgcaggtcgatgggtacgccgcgcagcgtgttgtggatcacggcgatcacgtcctccacttgggcttcgctcagcgtggcgtgctgcttgccctgttggatgcgtttgatctcgtgcttgcgttccttgatttcacggttgaggagtttgatgcgctcgccggggtcggcggtcagctgcatgcgcgcgtgttcgatttccatgatgatgctgttggcctgcgcgccggacagggcgcgtgattcgtcttcgagcctgctcagcgcctcgatggcgcggtgggcgcgggccgtcaaacggtagaggaatcggtgtgtggccgcatcatgcgagttggcgagccaggcgtagtcgccttcgccttcacgggtcaggtcggcgaggatctgatgggcggcctcggcgaaggtctggtcctcgcgcggcgcatattcgccggtgtcggccagagcgttcagactttgcgcgaaccgctcctccacggtctcgcgcggcagctcgccggtgagcgggtcgaacgtggaacgcagcagcgacacgtacagcatcgcgttctggcgcaacagcaaccgcaggacgcccgtctcatacaccggtcgcagccgttccagctcccgcatcacatcggccacagcatgcctccctctgtcgtgaccgcaccatactagccgatagccgcgaaccacaccccgcccgcgccacgcgtgctctctcccgcccagcaccaatatgtcacttttactgcacatgtcatcatgtgcagtaaaagtgacattgaggctgcgcactcatggtgatcgttcactccagccgtcgcccctattcgccgcgcagggcctcggtcggggtgagacgggcggcgcgggaggccgggtagaggccggcgaggatgccgaccaggatggcggcggcccaggcgagcggcagggaggtccagtcgagggcgatcggctggccggcactggcggcgacgccgatggcagcgccggcgccgagcgcgatgccggcgaatccgccgagtgtggacaggagggccgcttcggtgacgaattgcatgcggatgttgccgggcgtggcgccgagcgcgcgtctcaggccgatttcgccgcgacgttccatcacggtgacaatcatcatgttggcgatgctcatgccgcccacggccagcgcgatcacgccgatcatcaggccgagcgtggtcagtgaatcgttggtggtgttgcgcgctttggataggtcggcggacgcggtgacggacacgttgccgccggccgggttggcggcgtgggcgagcgtgcggcgggtgccttcggcgtcgccgggcgtggtgcgcacgtagatggcgctgatccgtccgatggtgtcggcctggtcggggtaccggccgagcgcccattgctcgccgatgatgacggcggcgttcaggttttcagcctgcggcgtggggttcaggatgccgatgacgccgtaccatgcgttgtcgatgaggatgcggtcgccgggctcgttgacgccgagccggtaggcggcgtccgagccgagcacggcgacgggcaggtgctcgttgttcgcgtcgatgccatgaccttgggcgaggcttgctccgacggcgtcgagtgcgccgggccgcatgatggcgagggccagcgcgttgccgttggttttggggcacagcccgttcttgaagatctgcaccttctctggcgcggtgtcgaagacaccgacccgttcgacctgcggctgacgggcgatggttgtgggcgcgtaatccggcagcggaaccttctgctgggcggcgtccacgccgggggcgaccaccgacagattcgcgccaagcgcgtcgagttgggcgaggagcgctgcctggttcgatgcggcaatgccggacaacgccacatatgcggccacgccaagcgcgatgcccagcgatgccagcaccgtgcgggacgcccgcccggcggccccaacccaagccgcatgcatcaaatccgcaattcgcgtgcgtattggtttactcataggagtacgttcactcatatctctcccccagtcagcctttggctgacagcccctcgtcagagggggcttgattcggcttgtcgagttcggtgactaggccgtcttggatgtgcagacgcctggggaaacgtgcggcgatggtctggtcgtgggtgaccatgaccaggcttgcgccggaatcggccgccgtgagcagcaggtcgacgatggtgtggccggtttcgcagtccagcgcgccggtcggctcgtcggcgaagatgatgtccggccgtttggccagggcgcgggcgatggccacacgctgctgttcgccgcccgacaactgggccggccggtgatgcaggcggttccccaatccgacctgttccaacgcctcggcggcccgttgccgacgttcgccgcgcggcagggttgtgtattgcaggcctgtcatcacgttctccaaggcggatacggtggcgatcagatggaactgctggaacacgaagccgatgcgcgcggcccgcaggacgctgcgctgccgctcacccatcgcattcacatccccgccgtcgtatcgcaatattcccgaagtcggcatgtccagcgtgcccagtaacgacagcagcgtgcttttgcccgagccggacggcccgacgatggccacgagctcgctgcgatcgatggccagtgacgtatcatgcaatatctccagcacgctcccgtccttgcctggaaacgccttcgtcacatgctccaacgtcagcaatgccccatgctctgggccagcgggggcaaactcgatgtcgttcatgagaccaccaccttgtctcccgccttgaggccgtcggacttggtgatttgcacttgcgcgtcggacaccagcccgattgacaccggcacacgcaccaacttgccgccgcgtaccgcttcgaccgcatacgcgctgccggcgctggcgatcagtgcggtcaccggcacgatcagcgcctccccggtcgaggcatcggcgttcgggatgatgacttgcacggccgtcggcccgaaagccgccacctgcgactggtccgggaagtcgatgcgcgccgatggctgtgtggcttgcccgttgtcgccggtcttctgcccgccctgatcgaccgaggcgagcgtcgtttcgacggtggtgttgtccggcagcacgacctgcgccttgtctccggctttgaacgtcgccgcctgtgtggcggtcaacgtggcctgcgcatgcagggtgacgcccgtatagcttgccgggctgacctgtgattggccgagtttcgcgttcaccgccgtgatgcggattggtgcggccgcggccagggccaccgtattcgggtcgaatgtgccggtgaccgcgtcgccggtcaggccgagcgagcgctgccattgccggatcgcctcgcgggtcagccagttgaaatgcggtccgacctcgccgccgtagaatccgagttcctgcaggttctgctccagttgcgtgacgtccgggccgtcggagacgccatcgccgatcgtccgccagaacgggcggtcgccgtggaacagcggcacgggcgcgccgtccatctcgtacacctgttcgccggtgttgatctgtttgccggccaccggcagttgggtgattgtgccggaagcggccgcgaaatcggaggcgtcatcgtattgcagactcgcgccgagccgggtctcggcgttgagcacgcccttggtcacctcctgcgtgcgcagcgtggacacatccacctgctgcgatcggccagtctgcccggtcgcggtgacgtgcccggccaacgtccacggcctcaccgccacgcacaccgcggccagtccgatcacggcgatcgccgcgataatcatcgtcacgattctgcggtgtttcccgaatctgcgcgcttccgtccgtgtcatgattgctcctttgtccgttatcggatggccgtctcattgctggggcgcggcttcggtggacgcgctgccggaggtgaattcggagaggactttgttgtagtcatagccgaattcctcggtggtgccagcgaaggcataggagatgttcgcgccatcggtcgggcattccttgaggaatcggcgcagttcggattcgcttacggtgccgggaatcgtgattgaggtgggcgtatcggcgtccgggtccttgacccagtcgaagcccttcttacgcgcggcctgggcgtaggcgagcgccgcctgcttgtcttccccggaatactggtgttgcggccccatgtccggaatgggctgggtgaagtcggggttcttggcctcgcagtcggcgtattcccgctgtttggattcgtagggtgagccggcgagcgccttggcgtccttgaacaccacccaggtgctgtcgtcttccatcgacgtgtaggcagcgttcgggtagagttgcgggccgtcgtcggatgcgctgaggctgttgccttgggaggcgaccggcttgccgtcggtgccgatcatgcgcagtgcgaccgcgtttttggtcggggcttgtttgcccgagccggagccggacgacacgccagcagccgtacgcgcgtcgaatcctttgccggtcaggcaggcggcgaatcgcttcgccgtggcgtcggtggtggtcgtcgcatcggaccgatcgtcggcacctgagcctgttccgactgccgccagcggtgacgagcaggcgcccagcatcgaagccagcgagagtgcggacgtaagcattgcgattcgccgtaccaggcgcgtatgagtagtggacattaccgtctccattccgtgagtcgattgtgacgacttccatccaatcgccctcaccgtggagcgtcggtaagcggacggattactttcgccttaccgtagaatcgggaaaatgttgggtgatgccattggttcgggaaggctcggaaggggacatgatgcggattctgatcgtcgaggacgaccgcgaactggccgccgcgttggacgacgcgctgcgctacgaggggtacgcgaccagtctggcaaccaccggcgtcgaagcgttgaagatccttgccggcacgaacgtggacatcatgctgctcgaccgtgatctgccggtattgtccggtgacgcggtgatggccaccgtcgccgcgaaccgcattcccgtggccgtaatcatgctgacggccgccgccgaggtcagcgaccgcgtgagcgggctggacctaggggccgacgattacctgaccaaaccgttcgcctatcccgaactgctggcccgtatccgcgccctgcaacggcgcagcgggaccagcaacgcgaccgcagccgtgctcacgcgcggcgacatcaccctcgattccacacgccggctcgtgttccgcgaccacgggcgcacgctcgtcaaactcacacccaaggagtacggcatattgctggagctcatgcgtgcggaaggcggatacgtgaccgcgcacgaactctacgatgcggtttgggatgagccgaccgccgccgacccgaccgacgtgatcaaaaccaccatctattcgctacggcgcaaactcgccgatcgcgaggccatcgtctcgacacgcggggaaggataccggctgcaatgaaggcgacgaacacggcgaaagcatcaggtcgtatacaggcgcttgccggcaaactgcggcccaaatcattccgcgccaaactgacgttggccatcagtctcgtgttcctcatcgccatgggatcggcgaccctcgtgcagaccattgtggtcaacagcatgttcacgtacgccacgacggtcaccgccaaaaaccctgagatgcaggtcgaaagccagcacagcggttccggcaccggcaaacgcccggattccgacccgcgaatgttttcccggggaagcggcacaggtctgaacgatatcactggaacatccagcgtcggcggcgatatgggcgacggtgactatcaggtggaatggggcaaggacgggtcgtataccatcaacaccccgtatggcgtctccgtgtggaaccaggacaacatcgccaccggattgcgcatcagcgcggccatcatcttcgtgttcttcgggatcaccagcattctgatcatctggctggtcacctcgcgcatgtcccggcaactgacctccatcagcgcgcaggcggcggcattggacccggccaaacttgatacgcgcatcgacgtgaatgggccgccatctcgccgtaggccccagttccggcgtgcgggcagacgcgggaccgaggattgggatcatagcacggacagccgcacggacggtcgagctgccggccaatcctccgaagtcacgcagctcggtgacgccatcaacggcatgctcgaccggattcaggccgcatccgaagcggagcggcggttcgtgtccaatgcctcgcacgagctgcgcacgccgattgccgcggtggagaccaatctggacgcgccgttggcccaggggcggttccccgaggatgtgcgaccgtcggtacagcgcgcactggatgccaatcgacgcggcgcgcaactggtgcaggcgctgctgaccttgtcccgtattcaaagcgagaccatcggcggcaagcaggcgggcgatgtgacacagatgagtcccgcatcaacggcacgcacatccacagatttgtacggatgcgtcggcaactcccttgcggatatcgacgatgccgccaccaagcgtcgcatcaccataaccgtgaacaaggccggcggcgacgcggacatgtttctcatcaccgccgacccggcgttgctggaactggcggtcggcaacctgctgcgcaatgccgtcgtgcacaacacggatgatgggtcgatcgacgtaaccgtcgtatcggatgaggatggaagcggaccccgtctgaccgtcacgaacaccacggatgagatgctgccggacgatctgaacgagctgacccaaccgttccatcgcggcgagaactcgcgtatcagcgccgtgcccggcgtggggctcggcctgtccatcgccagtgcggcatgcgaggcgatgggagccaggctggaactcggccaaccggccgaaggcgagttccgggtgagcattcggttttgatggaacactcaggctccccttcaaagaggggagctctattgtttcgcacgcaaaaatcacagacagactattgccttgcgggaaatcatcgttagattggcgagaggaatattgtcaatgcatacgaaacggaaaacatcgtgaccgcaccgaacacgcccgccgaaacctctgaccagctcaacaagcccgccaaatccggcaaactggaggtctccgacctcatcaccatcggcgtgtttgcggccctgtacttcgtgatggtgtgcatcgccacactggtgagcaccctgttcaccagcggcttcggctccatcttcctgcccgccggacgctcgatccgcgcgcgagactcttccttctgctggtggcgaacctcatgctgttcttccatgtagggctcgccacgcaaatcgtcatggtcgtgctgttcctgttgctcctgctggcggccgcccgatggcgaaccgcgttgaacttcggcgtgacctatgccgtactcaccgcgctgggaatgctcgaccccgatgccctgggactgccgtggctgcatgtggtctccgcgctggccgtgggcgtcacgatgatgctgccctgtttcatcaccgactcgcatggctcaacggcgtggccgaccggtacgtggtattcgacggcggacatatcgtgcaggattacgaggccgatgaattcctgtccctctcccccggctgcgtgaccgccatgggattgcgggcgtttgacttggaaccgtatcggcaccggattgcggccctggcttcaagcccggccgccgaagacagcccgttccgctggctgctggccatcaaccctccgccttcgcgcaaggcgttcgccgagggcgggctgctcagccacctgcatttccagtacgccaacgatctgcacacgctcgtcgccacggatgaggccaccggcgccgagaccttgcgcaatccgcgttggtacgcacaccatgtgctccaacgagggaaccaccgaggaccgttgcgccatcatccgtgcgttgcaccacttgcagtagatctggcaacatacggcggtatgacggctccccgctagtgaatcagcatcgcttcagtagccatgcgagtgcagatactcatcatcgaagccggaataatggccgatctcgtgcaacacggttttgcggatctgttggcgcagctcggtctgtgtcgagcatacgcgttcatgcggtcccttgaacagggtgatggcgtcccggcatcacgccgctgtagcccgtggttcgctttgtgatgggtatgccctcatacagtccgagcagctcaccgcacggattgctcattgtgaccagttcgcgctcattgggctcgtccgcaacgacgatgccgacattctccagcacccgcgcaaaccgttcaggcaaatcatccaacacctgttcaatggcccgttcaaactcatcgtcactgatgtgcatactcaatccttcacctgttgcttggctcccacgataacagacatattccgggttccggcttcttgcgggtaccataacgttgcgcggaacgcttccaatcattcattaggtcgattcttcattcattaggtcatgaggctgcgattgtcggtgttggaatggcaccattccagtggtgattgtcagagctcaccgacctaatgaatgaagaatcgacctaatgaatgcgtccggtcatatctcattgtgaaaatgacccggtattgcggtattccgcaattgcacttccaacgattctgaagtattcatccagattctgcgtggtagcgaacgttcttcttgtggcgggaaaagtcttatagcccgcgaaggagaggttgttccttttctcgatatctccttcccatcggtttcggtcatagtggtaccgtccgtcgtattccagaatcacatgatcattcggatacaccatgtccacaaccacctctttgttctgcaacgggaggtatatcggagcattcacctccaattcgggtaatccacgttttaccgattcaaggcgaaggatgctttcctgcggcgaatcggtgttctctctgcacaacgagagcgctttgcgaaataatctgataccggggaacctacctatatcggtgaggaacaacgatatcttgtcttttgttgtctgtttcaaatgctcattacggcaggtggcccaatccaaggcaatgaccatactttccacatcgacgaactgtgcgatctgacacagcgcctgttccactgaaaccacggcgataagatcatcaatcatcgtctggtcaatgccatgaccccaataatggcattgcgtttcggtgagattcgacaatctttcagccccggacaccgtaacgtgcagtttgttgaggtcatagttgggcttgtaattcagcgtggccgtcataccagcaagctgtagcctggtgccatggctgaagcaaagctcctgtgaagtgcgcatcgatctggcacggcattgttccagtgttttctgggcgaggtctcgcgcctcatcaagtgtgaagaacgtgttgtatgcataggactccatgccatccccccaatggttgtatccgtgaaccgcgttattcacggatacaactcacgatggcataaccaacttctgcgcgcaaccagctcggccgaatcggtggatatgtgtataacctgccagctcagctgttgcggttgatctcgatgtcggtgacggtgaggttggcctcgttgatcaggttgaagaggatgacctcggccagcggaccgggctgcatgaaggtgtgctgcttggcttcggagacgtagtcatggctatcacggtagaaggcggtgtcgatgccgcccggatagacggcgaccaccttgacgctggtgcccttgtatgcggcctgcaggctcttggtatagcccttctcgccccacttggtggcgcagtacacgctttcgttcgcgttgccgcgcgtggcggcagtgctcatgatctgggcgattttcacgtcacgctcgccacaggccttgagagtttccaccgtccacaggatcatgcctttgagccccttgaggcatttgtcaatgtcagcggcttcataggcggtgggcaccttgaacgaaggctggccggcgttgttgatgagcaggtcgatgtggccaagcgcggcgatgctcgccacggattccttgacgaacgcttcgtcggtgatgtcgcctacgaaggcgcggtaggattcggctggccactgcgcgctcagctcggcctgacgttcggcgttgaagtcgatgccggccaccagccagcccttggcgatgagttggctggcgagctcgtagcccaaacccagcgcgctgccggtgacgatggcgatcttctggcctgttgtggttggcatggttgattcctttgcatgcttgcgagactcccctcagcgaggggaacctagggttaacccgttctttgctgacagctcccctcagtgaggggagccaagaggtaggactattcttcggctacgagttcgaggtacgaatcattccagaggtcttcgtcgccgtcgggcatgaggagcacgcgctcggggttgagcgcctcgacggcgccctcatcgtgggtgacgagcacgatggcgccctcatacttggcaatggccttcagaatctcctcacgggaagcggggtcgaggttgttggtgggctcgtcgagcagcagcacattggcccgcgaggtgaccagcgtggccagagccagacgggtcttctcaccgccggaaagcacgtgagccggtttcatcgcgtcgtcaccggagaacaggaacgagccgagaatcgaacgggcctgcgtgttatcgagctcgggcgccacatgctgcaggttctccaacacggtggcgttcagatccaaggtgtcgtgctcctgcgcgaagtagccgatcttgcagccgtgaccgtattccacggaaccggtgtccggctcctcgatgtgggccagcaggcgcagcgtggtggtcttgccggcaccgttgtaaccgaggatcaccacacgcgagcccttgtcaatggccaggttcacgccggcgaacacgatgttggcaccgtaggccttggaaatatccttggccatgatcggcgtgcggccgcagggcgcgggctcggggaaacggatgtccgccaccttctcggccttctgcgcctcggaggtgttttccagcagcttttcggcacggcgcatcatgttctgcgctgccacggccttggtggccttggcgtgcagccgaatgccttgcttcatgagacggtcggccttcttctcggccacttcgcgttcgcggcggcggcgctcctcgtccaccacgcgctggtgcaggtaggccttccagccgagcgaatacatgtcgatctggccgagctgcgcatccagatgccagaccttgttcaccacttcgtccagcagttcggtggagtgggagatgaccaggaagccgccctcgtacttcttcaagtagccgcgcagccattcgatggaatcggcatccaagtggttggtcggctcgtcgagaataagggtgtcggcgttggagaacaggatgcgcgccagctcgatgcggcggcgctggccaccggagagcgtgccgagctgctgctccatgacctcctgcggcaggccgagcgaggcggccatggaaatcgcctcggactgggccgcgtatccgccggccttgtcgaagtcctgcatggccttgtcgtaccgggtcatggccttgctcatcacgtccggatccgggtcggtcatatccttttcggccttgcgaatgcggctgatgatggtggcgatgtcacgcgcgctcatcatgcggtcgagcgcggtctgcgtgggatcggaggcgtgcgtgtcttgcggcaggtagccgagcttgccggagacgcgcaccttgccggcggtgggcagcatgtcgccggtgatcacgcgggtcagcgttgtcttgccggcgccgttgcggcccaccagaccgatcttgtctcccttggccacatggaagttggtggggtgaagcagcgtgcgcgcgccgatctgaatttcaagtccctgcacctcaatagccatgaataacctacttgcctgttacgaatactgtctcttaccaaagtccgactgtacatcatagcgaacaccatgccgaccgggctcagccgacgctcatgcgtccatacgcttatacgcccgtagactcatgcaataacctgcaatgtgcgcgataagacagttgaatcgtgatttccgtcgtacactatccatatccgggcacgcttgcggcgcaatgcgtgtgcagtataggaaggatttcccacatggaaccaaattatctcgtgttattgggaatcgtgatcgtgattgtgggtttcgccctcaaacttgatgcgattctgatcattatcgtggcggctgtggtgactgcgctggtcggcggcattggcgtcgacggcttcctgaccacgttgggtacgtcgttcgtctcgaaccgcagcatggcgattttcatcatcgtgttgctggtcaccggtacattggagcgcaacggtctgaaaaccgcagccgcgcagctgatcggcaaagtgaagaatgcgacgcccggtatggtgatcgccctgtatggtgtgatgcgtctcgtgttcgccgcgttcaacgtgagttttggtggcgtggccgggttcgtgcgtccggtcatcatgccgatggcggtaggtgcgattgaagcgtccggtcacgagccgaacgacgagtatgtggaagagctcaagggcatggcttccggcatggagaacgtcgcatggttctttggccaggtgctgttcgtgggtacggccggtgcgctgctcgtgcagtccacgttgaagccgctgggttatgacgtcgaactgttgcgcatggccattatcgagattcctgtcgcggtgattgccgtggcggtcacagccgtctattacatcatcaaggacacacgactgcgcaagaagtactacggtgccgaagccgccgctcaggccgccaccgctaccaccaccggcaaggaggcctgatatgtcgttcttcatggaccccagcgtgaccgtcggcacgaaaatcctcgagttcttctatattttcatgggtttcatgtccgtgtatgcgggcgtacgcaacctactcgataaaaccaacaaggcccgctacggcactttcgtgttctggacggcgctcggtatcgtcatcgcgttcggccgttggattccggccattgcggacggcgtgctcattatcatcatggtcattcccgccatcttccgccaagtgcgtaagggctcggcatccgattcgagcgctcccagcaccgccgaagtggccgcgaacttccagcacatcggcatgcgcatctttattcccgccctgtgtctgggcgtgttcgccattatcggcgccctgattcccagcgtcagcgccctgaccggctgctgcatcggtgtgatgattgccgccgtgattctgttcgcgttctcgcatgacaacaagccggtcgtattcctcaacgattcggaacgcctgttgtctgccatgggtgcgctctgcatgctgccgatgctgctggccagtctcggcgcgattttcacagccgcaggtgtcggcgacgtgatcgccacgctggtcggcggcattattccgaagggcaacgtcacgctgggcatcatcgtattcggtgtgggcatgatgctgttcacgatgatcatgggcaatgccttcgccgcgattaccgtaatgaccgtgggcattggcgcgccattcgtgctcgcctacggtgcggacccgacggtgattggcattctggcgctgacctgtggctactgcggcacgctgtgcacgccgatggccgccaacttcaacatcgtgcccgtcgcgatgctcgatatgaaggaccgcatgggcgtgattaagaagcaggtgctgcccgcattggtgatgattgtggtgcagatcgtctatatgctgatcgcgcaataacctcgttgtccaaataccacaacaatccgtgaaataaggagctaatgatgagcaagattctggtgaccggattcgatccgttcggcggcgagccggttaaccccgcattcgaggcagtcaagctgttgccggatgaaatcgccggtgcgacagtggtgaaactggagattccgacggtgttcacgcgcagtgcgaccgtggttgaggaagccatggtgcgcgagcagcctgactatgtgctgtgcattggtcaggctggtggccgttcggctctgaccgtggagaaagtggccattaatttggccgaggcgcgtattcccgataatgatggcgagcagccgttcgatacgccgttgcgtgaggacggcgacaccgcgtatttcgccacgttgccggtcaaggccatggtcaggaacatcaatgaccacgggattcccgcattcatgtcgtatacggcaggcacgtatgtgtgcaacagcatcatgtataacgtgttgtatctgattgaccgcaaattccccggcgtcaagggcggcttcattcatgtgccgtatgcgaccgcgcagggcgtgggcaagccgaacggcacgccgaccatggaaatcgcgaccatggcgcgcggcatcgaagccgccatcgaggccgctgtgggcaccggaaccgacgccaccgacatcatgggcgaaacccactgatacgcatattgttatgcccctgctgacagcagttgtcagcaggggcatcgttatgcgttgaacgttacagttcgcgcagctgggcggcgatctggatggattcgacgctggcctcggccttgttgcgcgtctcctgccattcggtagcgggcacggagtcgagcacaatgccggcaccggcctgcacgctcgcctcatggtcgcgcaggaacgcggtgcggatggcgatggccatgtccatgttgccagagagatcgaagtagccgacggtgccgccgtagatgccgcggtcggccggttccaactcgtcgatgatttcgactgcgcgcggctttggcgcgccggaaagcgtgccggccgggaacgcggacttgaacacatcgaatgcggtcagcgaggggtcgaccttgccggtgaccgtcgagcagatgtgcatgatgtggctgaaacgcttgatgtccatgagctgcacgacttccacggactgcggcacgcacaccttgctcaggtcgttgcgggacaggtcgacgagcatgatgtgctcgctgcgttccttcggatcggcaagcaattccttggcgaatttttcgtcttcctcaggggtggcgccgcgagggcgggatccggcaatcgggaaggtcatcgcgtggccgttgtccaccttgatgagggtttccgggctggagccgatcacgttgaagtcgcggccctgagcatcggtcaacgccatgaaatacatgtacgggctcgggttcagcgtgcgcaacacacggtacacgtcgaacgggtcggcaggcgaatcgatgtcgagacgctgggagatgaccacctggaacacgtcgccgtcgacgatgtgctgcttggcgcgttcgacggcctgctcgtagtggcttttctcggtgcggaagcgcagctcaggctgggcgaccgtttcgtccaagatgttgacgcgggactcgcccggagccggggtggcggcatcgtgctgcatctggtcgagtcgagcgacggcctcgttgtaggcgacgtcggcgcgggtggatttatcatccacgttcaccgcgttggcgatgagccacaccgaaccggatacgtggtcgaccacggcgatatcggtggccagggcgagcacggtctcaggctggccggtctcgtccggagcttcggcgcgcagggtcggttcccagtggcggatggcatcccagccgaccgtgccgaccagaccgctggtcaggttcggcaggccttccacatgcggggccttcagagtcttcaacgtggcgtgagcgacttcgaccacgtcaccggtgactggcacaccaaccgggaccttgcccagccagtcggcctgaccgttgttggagcgcagctgggccatcgagttgacgccgatgaagctgtaacggctccacgtgccgccgtattccgccgattcgaggatgaaggtgccggatcggccgccggcgagacgctcgtagaagccgaccggggtgagcgagtcggcgagcagacggcgcacgatcggaatcacacggtagccggcgtcggccagttcgtggaactggccgcgactgggccaggtggcgccccacttcaggtgtttgacgctgcattcgctcatattcgctcctttacttacaactcgatgtcttgtttcgtagtacgcggtcgttcggcttcccccagtcagggaagcccgttctactgctcggccgggcgatggccttcgaccacggacagggggccgccttcgaggaagcagctgcgcttgccggtgtggcaggcggcaccgacttggtctacttcgacgagcagtgcgtctccgtcgcaatccagggacacgcccttgacgtattgcacatggccggatgtatcacccttgcgccagtattcctgacgggaccgggaccagaaggtcacgcggccggtggtcagcgtgcggcgtaatgcctcgtcgttcatgtagccgaccatcagcacctcgtgtgtgtcgtactgctggatgacggcagcgaccaggcccttggcgtcacgcttcaggcgtgcggcaatacggggatcgagttcagtggaattgtcgtatgtagtgtctgtcatacctatcttccttatgtggaccaccctcagtcagcttcgctgacagctcccggattatgtgcgacatgtgcatagcgcactgctacgaacaatccactggattgttcgtccagcgggagcaaggtgtattcgtttagcgaacggtgtagccgtgcttcttgagttccgccttgacatcggcgatggtcaggatgccgtaatggaatacggatgcggccagcaccgcgtcggcacctgcttcgatggcgggcgggaagtcctcgaccttgccggcaccgccggaggcgatgatcggaatcttgacttccttgcgcacggcgcgaatcatctcgagatcaaagccttccttggtaccgtcggcgtccatcgagttaagcagaatctcgccggcgccaagctgctcggcgcgcttgacccaccagatggcatcaatgccggtggatttgcggccgcccatcgtggtgacctcgaagccggattgcgtgtgttgctcgcccttttcgcggcgggcgtccacggagagcaccagcacctggttgccgaaacggtcggccacgcggctgataagcgacgggtcattgatggccgccgtgttgacaccgaccttgtctgcaccgcagcgcagcagcgagtcgacgtcctcgggcgtgcgtacgccgccgcccacggtcatcggaatgaacacctgttcggcggtgcgggagaccacgtcaatcatcgtgttgcggtgggagctggatgcggtcacatccaggaaggtgatctcgtcggcgccctgacgatagtattcggccgccagctccaccgggtcgcccgcatccttgaggttttcgaaatgcacacccttcaccacgcgaccggcgtcaacgtccaggcacgggatgactcgtaccgccaacgacatgcttcactcccctgttcggctttgcattacagtccttcagactacctaccgcccgttacatgcgccgcacccgtttctggaatatgagaatccgagctgacgcgcccgctgcgcgatctcaaggccgccgcgccctgccgttatatcgccgccgatatcgagaacgcgggcggccattacgtcgacgagcagctgcacgtggacgacgccaacggcttcaagctcatcacgtcccgcaagcccgctgatttggactacttcgtggacgcaatcaaggatgcgctgaagtaactaccgctccttagcggccaactgcccgcaggcaccgtcaatgtcctggccgcgggtgtcacgcagtgtggcggtgatgcccgcgcggtgcaggatctccaggaaccgctgttcgtctcccggcttggaggcggtccacttcgagccctcgatggggttgagcggaatcgggttgacgtgggcccagttgtcgccgtaatggttaagcctcttggccagcaactgcgcatgctcggcctggtcgttgatgccgcgcatcagcgcgtattcgatactgacgcggcgcttggaggccagccaataatcgtgcgcggcatccaacacctgcgtggtgttgaaacgcttgttcatcggcaccagctcgtcacgcagttcgtcgctgggggcatgcagggaaacggccagacgcacgggaatgccttcggcagtgagcttcttgatgccgggcaccacgcccaccgtggatacggtgatgttgcgcgcggaaatgccgaagccttcgggaggcatggcggaaatctgtcgtacggcggacagcacggagttgtagttgcccatcggctcgcccatacccatgaacacgatgttgctcaggcggccctctcccccggccacttcgccgtcacgcatcattttggcggccacacgcacctgttcgattatttcaccggtggacatgttacgggtcaggccaagcttgccggtggcgcagaacgggcagcccatgccgcagccgacctgcgaggagatgcacagcgtggtgcgggtcgggtatcgcataagcaccgattcgatgagggagccgtcgaacagcttccacaaggtcttgatggtggtgccttcgtccgccacttggcgggtcacctcggtgatgagctgcgggaagaacgcggcggcggcctcgctgcgcttggctgccggaaaatcagtgaattcggcggcattcacatcgaaatggccaaagtaatggttggcgagctgcttgactcggaacttcggcaatccgagttcggccgctttctcgatgcgctgctcgggcgtcatatccacaaagtgcagcggcggcttaccacggcgggcatggtccttggatagcacgtcacggaaggcacctgatgtgccgccgggagtaatgccggtttccggagtgtcaggatgctgtgtggtcatgatgggttcgcttcgctctcaatatcagaaaatagtcaaacatgcaatagaaatatcagaatccaccatacggcgtgccgcatacgaatcagatggcccatgtcttagcccatggcgaacgcatattgaacgatgattccccccatatatggcatgtggcaccgtgcgatatacacacgatgccacattgttcatgcacgaggcatgcgaatcacagtccggtgacccacagcaaggcgcaggtgaacggtgcactcatcaaaatggaatccacacgatccatcacaccgccgtgtcccttgagcaggtggcccatgtctttgatgccgatatcgcgcttgagcatggaagcacacaaatcaccgaacgtgcccacggcgccgatgagaatacccgccacgatcggcacccaccaacgagtggcccatttcgaggcatcatacgtgcacgcgaatacggcgaatgcgccagccatggcgaagagcatcgagccgataaggccctcaacggacttcttcggcgagatgcgcgggctgagcttgtgtttgccgagccaggcaccggcaaacaaaccacccgtatcggagagggcgggcaggaacaccagcatgatggcgtgtgcaatcggatgcccattgaaagtcagcgagatgatgatgcagctggccagcaacggaatgtacaacacggtaagcacggacacagccacatggctgagccgggaatgatgctgttccccgccctcatgattgaacgaggattcgaggcgcgcgctggcatccgtgttggacagtttgccggcaaccgccagagataggcggttgccgacgctgatttttgcgctggccgcgatggcgaccagaataatcgacacgatgatactcagcgacatcgtgatgagatggtacggggaataataggtggcgatgagggtgaaggacgagcacagccacagcatgaacaccgggatgtgcaggcctacggtggcgaagtccaccctgagctcccacagcgccagaatcatgaacacgactaccagcagcacgaagaggtcgacgctgagcagcaggcacgcgacaataaggatgaccagtgccgcgcctgtggcgatggcctgcggcatgttgcggccggtcttcttgttgatccggtcgagcgtctcctcggcctcttcatggagttgttcgttgcgttccataattctccggacctggtctgaatcagacctccatgatctccttctgcttggtctccagcagagtatcgatctcgtcggtaacggacttggtgaccttgtcaagatccttcagcaggcgatcgccttcgtcctcacccatctcgccgtccttgacggccttgtcgatggtttccttggtcttacgacgaatgttgcgcacggcgaccttgccgtcctcggccttgcccttggcgagcttgacatattccttacgacggtcctcggtgagttccggcatggtcaggcggatgacgttgccatcacggttcgggctgatgccgaggtcggagttgcgcagggccttttcgacggcaccggcctgggaagcgtcaaacggggtgacggacagggtgcgcggttcgggaacgccgatggaggcgacggccttaatcggggtgggggcaccatagtagtccacggtgatgccgttgagcagggccgggtttgcgcgaccggtgcggatgccggagaagttttccttggtgttttccacggtcctggccatctgttccttggcctggtcgataagagacatattcactccttgtgtgttggtgttcgtctgtgttgttcgtctatgaacgtttgattcgattgtaggcgtttgcggcttactcggccacgcgcgattcggcggtggagaccagcgtaccgatttcatcgccgacgagggcgcgggtcacgttgcccggctcttcgaggccgaagacgcggatgcgcttcttgttgtcgcgggccatggacagtgcggaggcgtccatgactgccagattgtccacgagggcgcgattgtagctcagggtttcaaaacgcttggcgttctcgtccctgcgcgggtcggcggtgtagacgccgtcgacgccgttcttacccataagcacttcgtcgcagtggatttcgagggaacgctggatggaaaccgtgtcggtggagaagtacggcatgccggcaccggcgccgaaaatcaccacgcgacccttttcaaggtgacggatggccttgagcggaatatacggctcggcgacctgtcccatggtgatggcggtctgcacgcgggtggcctgaccctcctgctccaggaagtcctgtagagcgaggcagttcatcaccgtgccgagcatacccatgtagtcgccacgggaacgatcgataccggcctgctgcagttcggcaccgcggaagaagttgccgccgccgaccacgatggccacctgcacaccctgttgtacagccggaacgatttcctcggcaatgcgacgaatcacatgggtatctatgccgaccttgccaccaccgaatgcttcgccggacaacttgagcagaactctgcgcggcttgtcgctatcagtcatattgtgcctttctcaaaaccgaaagtgcgaaattatccgtagacaagcgtatcggtttacgacgacaccccctagcaacgacacccttggaatagcgaaacgccatccgattattgaataaccggatggcgtttcgttgaaattacgctaagcgcgtggagtaagccttaggctcactcctcttcgcccttgccgacctcgacacgggcgaatgcggtggcgttgccaccgacttccttgaacaggtcgccgacggtcttggacgggtccttgacgaacggctgctcgagcagcacgacttccttgaagaaagcgttgagacggccttcgacgatcttcggaacgatcttctccggcttgccctcggccagggacttctcggtggccacgcgacgctcggactcgaccacatcggccggaacgtcctcgcgggtcagccacttagcgcccatggcggagatctgcagagcagcttcgtgagccacggcggcgccggccttgtcggtggcgatcatggcgacgatgctcggcggcatctcggcggacttcttgtgagcgtagacttcgacgtgctcgccggagatcttggcgaactggccgaccttgacgtgctcaccgaacagggcggcggcctcctcgacagccagcttgacggtggtgtcgccggccttggcctcgagcagctcgtcagcggagttggcgtcggcgtccacggcgtagccgagaacttcctcggtgaactcgacgaacttcggggtcttggccacgaagtcggtctcggagttcagctcgacggcgtagccggtctcgccattggcggtctcgacgaccttggaggcgatggtgccttcctgagccttgcggccttcacgcttgccggctgcggcgatacccttggctcggatgatttccttggcgcgggcgacgtcgccttcggcttcggtcagagccttcttgacgtcgagcatgccggcgccggtgtcttcacgaacctgcttgatcagtgcggcggtaattgctgccattgattattctccttgagaaattttgcttacccatgaacgatgggaagcgcttattcaggcacttcccatcgtagagcatcactcggccttgggggcctcggcggtttcgccctcggcggcagccggagcggcggcttcagcggaagcctcggcaggagcctcgttggtcaggagttccttctcccaagcggccatcggctgctcggcggcttcgccctcggccttgttggcgccggagcgctccagcagaccttcggcgacggcgtcagccatcaggctggtcagcagttcgatgccgcggatggcgtcatcgttggccgggatcgggtactcaacggtgtccgggtcggcgttggtgtcgacgatggcgacaaccgggatacccagcttgtgagcttcctcaacagccagggcctccttggtgatgtcgacgacgaacatcgcggacggggtgcggttcatgttgcggataccgcccagctgcctgttgagcttgtccttctcgcgctcgagcaggaggagctccttcttggtcaggccggagccgtgcacgtcggtgaagtccatttcctcaagttccttgaggcggttgacgcgcttggagacggtctggaagttggtcagcatgccgccgagccaacgctcggagacgtaaggcatgttcacgcgggtggcctggttggcgatagcttcctgagcctgcttcttggtgccgacgaagagcacggtgccgttgtgggccacggtggtcttgatgaagtcgtacgccttgtcgatcatgtcgagcgacttgaacaggttgatgatgtggatgccgttgcgctgggtgaggatgaactgcttcatcttcgggttccaacgacgggtc

SEQ ID NO: 3297 - DNA, 4461 bp, Unknown
  R151_18m  MAG No. k141_3826
gtgttcgggtcacgtgcgattttggcgactttggcgccgcgagcgtcctcctgctccatttgctcgatctgcgagccgcgcagagagaccaatgccaactcggtgccggagaacacggaaccgataacgagaaatacaaaaatcaggaggatattcaaaccaagtgacatggcttcaactctaggggagcggcacgtcaaattggggtgtgctggctgggcagtaagaaactcggcaaggggaagggcattctcatcaccatcgatgagacgcaagcggcctcgcatgatgatttggtggctattgctacagccgtgcagcacgtcattacggatgccgatgaaagtgatacgcctgatgaggataagaagggcgttgccatcgtgtttgccggcttgccatatatgatcaacgatttgctggataacgaggtaaccacattcctgcgccgtgcgctacgccgcgaattggataacgtgccgcttccagacgtcaagaatgcgttcctggaaacagttgcggattccggcaagaccatcagtggggaagatgcgcttgaagccgctcgccagtctgaaggatacccgtacatggtgcagcttgttggctactacatgtggcaatccacacaacgtcgaggttcaaatgtcattaccgcggacgacgtgtcgaccggtgtttccgatgcgctgctcgccttcgacgattcaaggacaaactcatccgcccggcaggtcatgggcagctggaatttgcggtgccgcatttggggcagtatttgcagtcgttgtagcaccaaatatagggctgggttcattcatttggtaggttgcgcgttcatttggtgggttgtcggcatggtgaggcgttggaatggcggcatttcaatggtcagtgttggagtgcagtgaccaaatgaacgcataattgacctaatgaatgaagtaagccggttgcgggctagtttcgatccagttctatgagcgccgacgcatcttggccacggcattgctgacgcaaatacgcagcacaatggtgaagacgactaccataatccccagaatgccaatgttgaaccagaactgatccgtggtgtgctcccacagatcatcctttttgaacatcggcaccttggtggggccatacagcagatcgttgagcccgatatccgaggcggcggcggagaagccccaacgtccggggaagatcatgctgaccagctcgaggctgtcgcggccggtgaccggaatcatgccgccggagaacaccaactgggccatgaccagcaccaccagcaatggcatcgtctgttctcccgacttcaccaacgccgagccgacttcgcccaacaatgcggaagtccacgcagtcagccaaatcgccaacaccagttcgggtatgccggaatcagtgaccacaccatggtccgggccgggcttgccgaggctgaccgcagtggtcagaatcgccgcctgcaacaaggtctgcaaacccatcacgatgagtttcgaggcggtgtatgacgtgggcgacaaacccaccgcgcgctcgcggccgtaaatcgctcgctcggagacgatgtctcgcacggacaaagccgatcccataaaacaggcacccagtatgacgagcacaagcagctggttcggctcggtggcggcgtctttgaaatcgggctcacccaagccatgagaaccgggcacaaccagcgacagcagtcctaggagcaatggcagcaacagcaggaagatcagcaatccggggtcggcgatgatcaaatgcagctgacgaatcaccagagtgatggtctgtttgatgcggaatggctttgccggtttctcatgctcggtgtgccgcgtgatggtggactcggcctgcatggtgcgctggcgtgaatcagtaatcgaatacacccgttccggagattcggcgacatcgttgaagatgtcggcccattccttgccgttgaacgcctggctcatctcctgcacggtgccgaagaatgccggatggccgccgggagcgagcatgagcacgttatcgcacaacttgttgatatacgacagtgaatgggtgaccacgataaccacgcggccggcatccgccagttggcgcaacatggtcatcaccgtaagatccagcgccgggtcgaggcccgaggtcggttcgtcgagaatcagcagttcgggttcggtgagtagctcgatagcggtggacacgcgcttgcgttggccgccggacagtctgtcaatgcgattcttacggcgagacgtgagttccagctcattgagcacgttgtcgatgatttcggcgcgctcggccttggttgagccgggcaggcgcagcttggcggcgtattcgagcgccgcgtccacagagagcttgcggtgcaccacgtcgtcctgcggcacgaatccgatacggctgcgcaacagttcgatgttctgatgcacgtcgtatccatcaaacagcacgcgcccgtccgtggggctgttgagcccggcgacgatggaggtgaatgttgatttgccggcgccggaaggtccgattacggcggtgagcgtgcccttggcgaatacggcgttgatgccgtcaagcagccgggtgcctttgcccacggtcagtccgatgttttcggcgataaccgcgtcgttgctgacaaacggcgtgcggtcgcacagcacgccttcatgcacgatcaggtcggtgttgccgacggtgacgacgtcgtcttcccgcagccagatcttcgcgacgcggcggccgttgacgtaagtgccgttggcggagttcaggtcagtgagcaggatgccgctgctggtggtttccagcgagcagtgtttgcgggagaccagataatcgttgatgcgaatcaggcaggcggtatcgcggccgatgacgcctgtggtgtcgtgctcggggctgaaggacccgtgcacgcggttggtggtgagttgggattcgagccttaccgcttgcgtgctgcctgccagaacggtgccggcggcattcgatggggaaggggatgcgcagggagacggagatggtgatgcgggtgataccggcactggcgatactgccgtcggtgccactgctgttgggcggggttgctgttgcaggtgcgcgagggccggggatacgcggtgcggggccagcggggctggcgttggttgcggttgtaccggttgtgccggttgcggtgctggtggtgtgggttgcactactgggcgtgcctgttgcggcgcgagttgcgtgggttgtgccggttgcgctgatggtgccggaggtagcgcaggctgggccacgtttgccgcagggcgtcgcgggggctgtgccggcgtggacggcccgctggttccgacgatgcagacgatggtggcaccttgtgccagcgtcactttggtgctgttcagcagcagtacggaagtggtgtgaatgccgttgatggacagtccgtttgcactacccgtgtcttccaagagccaaccatcgtcggtaaaggtgacgcgagcatgatggtgagatacgtacgggttgtgaatcaccagatcgcaatccggcgcacgcccgatggtcgtggcacgtgcaggattgggggtataggtggcggatccgtagtgaatagtaagggcaggtggcattggttcagacttccgtgttcttcgatctctctgcacacagatgtaccacgaccgcattacccccggtgaacggggtctgactgatggtcagaaactcagcacctcgaccttgccggtgtcgagctggtaacgggcgccgacgatcatcagctggtcggcagccaatgcctgctgaatgatgggggattgttccaccagcgtctcgatggtgtgggccacgtgtacgcgctcgatgtcttcatgcgcgtcgagctcggcttcgcgcgcctgccagacggacatgccggcctggcgcagaataatcgattcggcggcggcgatgtgctcgtcgaggtcgtccatcgcatccgcggcctccagtgagccgtcggcttcggaagtgatggtgtgcatcaggtcgtccagctcctgctcggcggcctcgattgcgccgcagtgctcgtgaccgagcacacagatcaggctgacgtgcagtttcttgaccgcgtactccagcgaggcgataaccgcgctatcgatgagttgcccggcggtgcgcacggtgaacagatcgcccaagccctgatcaaaaatgatttccggaggcacgcgcgagtccgagcaggagagcaccgcggcatccgggttctggccatcaagcagcgtctggcgggtctcctgatcctgccatggatggtcgggcttgccttcggcgaatcggcgattgccttggagcatacggctccacgtcgcatttgcggtcgattcctgttcaacgtctgcctgagccatgaaaacctccattatcagcggactgctggtacccatagtagcgattgga

SEQ ID NO: 3298 - DNA, 8651 bp, Unknown
  R151_18m  MAG No. k141_4240
cgggcgctcgccctgggagatgagctggatgcattcggcggcggagtcggcgcgctggtcgaactggccgggcaggaactcggtggcgaagaccttggctccggcgaagtcgggcaggtcgtaggccacattgtccacctggggttcgctgaacacggtgggcacggtctggtcgaacagcttctgggagatgccttcgacgtcatagcggttcacgatgcgcagggccttgaggccgttcagtccgaggattgtgcgcagttcgcccgcaagctgctgggcttcgacatcaaagccgggcttcttttccacgtacacgcgaaaaaccatggaaatcctttcttgaaattattgaaaacttgaagaagtgcggtaaaagaacttggctcccctctctgaggggagctgtcagcggagctgactgaggggagttgtcatggcggtgaacgtcttgacctcccctcagtcgcctatcggcgacagctcccctcagagaggggagccagctgtatgttctgctacctgcacctaaacgacttattcggcgacttcgatgccttcggacttggcgagttcggcgaggcgctcctcgatctcttcgtaggccgggatgatgctgccgagaccacggcggaacaggtccttgtcaaggtgctcgaccttgccggagtggtccttctggtcccacagacggcaggaatccggggtgatctcgtcggccaacagcagcgtgccgtcggtggcgcggcccatttcgatcttgaagtcgaccagcttgacgtcgatcttggcgaagatctcgatcagggcctcgttgatcttgcgggccagcggggcgatctcggcgagatcctcgcgagtgcatacgtcgagggccaccaggtcatcgtcgttgacgaacggatcgtgcagatcatcgttcttcaggaagtactcaagcaccggctccttgagcggcagtccttcctccacgcccagacgggagcagaagtggccggcggccacgttgcgcagcacgatctccaacgggaacatgttcaccttgcgtaccagctggccggtgtcgttcactcgcttgatgagatggctgtcgatgccgcgcttcttgagcaggtcgaagatgatggtggtgatgaggttgttcaggcggcccttgccggtgaagtcttccttcttttcaccatcgccagcggtggcggtgttcttgtattcgacccacagaacctcgggatcgtcggttgcgtacagttgcttggccttgccctcgtagagcttttccagcttctccatgactcacctttcaggagtggaatttctgggtgaactaacggtaaaagggtatcaatcgagggctacaacaacactcggcatgacgctacgatgcggccagcgcatcatacgtcgctgcatcgaacgaccatacgctgttgggatggcggaggcggacggtattggtccgacaatcgactcattgccggtcgcatagtcgttcggagtaacagtatctacgcaagcacgcgaacactcagatgttcgtcaatagacaaaacgtgagtgtacggccgcgcacgcacgataatgggagtgacgaaatggtgcaaggaggttcgtcatgatcgatcatattggtttgtttgtttccgacgccgcacagtacgcggatttctacgagaagctgctggccccgctgggctacgtcaagaaagtggcgtacccgaccgccgtgtgctttgccaatgacgaggatggtgacagcgtttggttggagtctccgaaggacggcaacccggtggtgccgtctcatgtggcgttccgcgccaaggatgaggccgccgtcaaggcgttccatgaggccggtctcgcctctggcggtaccgacaacggcgccccgggcccgcgcccgaactatggccccacgtattacgccgcgttcatccacgacccggacggcaacaatattgaggccatgctgagctgatcaggccgtggactactccacggtaatcgtcaacgcatcggccacacggccggccttggcacgggcgtcggcttcggactcgccgacggccagtgccacggccatgcggcggtggccatgcacttcgggcttggcaaaaatgcgcaggtccgtgccgggttcggccagagcagcggccacatcggtgaactcggcctcaccgtcgccggccaccacaatcgcatggcttgccgccaccgagccggccggaatcgtgagcgccacatgctcgggggtgatcggcaggccgagaatcgcgcgggcgtgcagcgcgaactcgctcagacgctgggaggtcatcgtcaccataccggtatcgtgcggacggggggagacctcgttgaacagaatcgagccgtcggtgagcacgaacagctccacgccgaatacgccccaaccggtttcgccggtcgcctgagccttggccaccaagccttcaacggcggtacgtgcgatgtcgcgcgcccgctcggcctcaccatcgggctcggtagccggctgccaggactcgcggtaatcgccggactcctgacgttggccgatcggcgcgcacgtcacaatgccggcggacgaagaaacggtcagtaccgtcagctcacgctccagcggggcaagcgcctcaacgatcacgcgcgacacatcgccctcatcggcggcgcggcggccctcctgcgcttcggtccaagcggcatcgatggcgtcggcggaacgcaccaccgactggccgtgaccagacgagctcatcaccggcttgaccacgcacggatagccgacttccgaagctccggcgcgcagctcttccagcgagccggcaaaacgatacggtgtagtcggcaagcccaattcttcgtgggccagtacgcgcaggcgctcgcggtccatgcaaatcgcggcgatttcggcgctcggcaccacctgggcgcccgcggccgcagcaccggccagcacatcggtggcgatggcctctacctcgggcacgatgatgtccggcttgatttcatcgaacaatgcctgcaattcggcggcattcgccatatccaacgcgcggtattcatgcgccacctgctgggccggagcgccggcataggagtcagcagcacacacccatgcgcccagtcgcatgagttcaagtgtgacctccttgcccagctcgccagcgcccaaaaacagcacacgggtggggtgcttgcccagcggtgtgcccagcgggtggttggctgcgcgagttgcgggggagacggcggaagtctcagcggaggttgcgggggaagaggcggaagtcacggcagtattcacggcgttctcagtcatacccacattctgccatgacgcgatgatttcggtatgtcgcgtgagcggagtgcctcgcgcggcaaaattacgggcggaatatccggcttcatggggcggtaaattccccatggggcggtaatgagtccatggggcggtttgttggttttgtgaaaccgcggaattaagccgttttgccttaccgccccatgggaatttcaccgccccatggggtaaataccgccccatgggcaggttgccgccccatgaagattcagatgcccgtaacccgccataaatactgcgtatagacatgccattgcgtgtgtaacagagccgtcgtaccttagcaattaccggccgatgaagtatggggcggtcgggccaacattttgggatgcgacatatagcgaatagcggcgtgccggttccggcatttcaggctacaagccggcacgctggcaatagtcgaagtacttaacgatttcgcctatgcggggctcgaattcggcgacgtgcgctcgctgagcctgctggagactccgggcgcgctggacgtggcgctggaacttggctcgctgtccaaaatgtatatggtggccggctggcgcggtggcatggcgattccgccgcattcgtggattggctgctcaacacggccggcgtggcgctgatgccggggcctgcttcggtcaggcgggcgaaggctgggtgcgcatcagtctgctcaagcacaccgccgagttgttccaggccgtggcccgcgccgatcgtgcgctgcgaagcgcgtgattcaatattgggcaaaatgcggcagcccataccatttccggcctatccaagcagcgcggccgacgctattgccgcgcggtggtttaggatgaggcaatgcgcgaaaacgggattgaagagagcattgatcgtccgctgactatcgctcttgtggtcgatacggtgggcaatcagggcaacggcacctccaattcggccttgcaatgggctgcggaattggagcggcaaggccatcatgtgaggcttgtcggtataggggcgcccgaatatccggcgcgtgtgaataaggtgccactcgtctcgtgggtggccgccaagcagctcatgcaattcgccgaacccagcgacacgttgttccgcaccgccttccaaggcgtggatgtggtgcatatctatatgccgttcaaattcggccgtcgtgccgctaaagtcgcccaccaactgggcattcccgtgactgctggattccacctgcagccggagaacgtgctgtattcggccggcccgctacgtcgcattcccggtatttccagcttcctgtactggctgttcaagcactggctgtacaagcacattgaccacatccatgtgcccaccgaaatgaccgcgagcctgttgcgcgcgcacgggtataaagccaagttgcacgtgatttccaatggttattcaccggtgtattcgccgaagaagccggccgatccggatgcctcggctcccgtgccgttccgcgtcatcgcttccggccgactggccagcgagaaagatcagattacgctgatcaaggcggtgtcgatgtcccggcacgccggcgatattcagctggtgatcgccggtactgggccgctcaagcagtatctcaagttccgcgccggacgtttgctggcgcgcaaggccgatatcggattccacaagcacgccgatatgcccgatttgttgcgttcgggcgatttgttcgtgcattgttcgattgccgacatcgaatcggtgagcgtgatcgaggcgatggcgtgcggattggtgccggtgatcgccgcgtccgaactgtcggcggccggccagttcgcgctgatcgacgagtcgttgttccccgtgcgggacgcggccctgctggcccgacgcatcgattggtggatcgcacatcaggccgagcgcgccgaatggggcgagaaatacgccgaatacaccaaggcgcattattccgtggaagcctcggtccacaagttcgtggatatggaacgcaaggcgataggggagtaggagccttctcgtttgcggagaggttttccctcagtccgcctgcggcggccagctccctcatcggcgggagctacgaaaaaacctccctctggtgagggaggtggcatcgcgaagcgatgacggagggagagattagcgaagggttttacaacacctcaataagctgatcgacttcttcaggcgtggtggcccagctggtgcagatgcgcatcacggtatgcgtgtcgtcggccttctcggtgaagccgagcttgacctcgcgctccagacggtcgatggtcggctgatccatcgtcacgaaaatctggttggtgggcgcttcgaaagtgagcatgtagcccttggcgcgcagggcctcgcgaatacgatcggccgcctcattggcgttgcgggcgatcttgaagtacagattgtcggtgaataaggcgtcaaactgcgcgcccagcacgaagcccttggccagcaaggcgccgtgctgcttgatgcgggtcaggaagtgcttcggcgtgttgtgcttggtaaacaccacggcctcgccgaacagcgcacccaccttggtaccgccgatgtagaacacgtcggcgatggtcgccagatccgtgagcgtcatgtcggaaccagtggcggtcagcgcgtagccgagtcgcgcgccatccacgaacagcggcatatcgtacttatgcgccacatcggcgatagcctgcagttcggctttggagtagatggtgccatattcggtgctttgcgagacgtacacggatccagggaacaccatgtgttcgtagttgccgtccgcatagaaggtcttgcagaactcgtccagttcggttggatccattttgccgttgtgttggggaatcgtaagcaccttgtggccggagaactcgatggcgccggcctcgtgcacgttcggatggccggaggcgaccgcgaccacgcctgcatacgccggggtgatggtgtcgatgacgacctggttggtctgcgtgccgccgacgaggaaccacacatccgcgtccggctggccgcaggcctcgcggatcttggccttggcctgatcgctcagttcgtcggacccgtagcccgaatacagatggttgttggcttcagccacggcttcaagcactgcgggatgggcggcgcgggagtaatcgttctcaaaagacagcatgacggaccttttgtccttgtgttagatgaattggatatgcccgagtgtacaacgcggcggttcccggcaggagcggggaattcatggagaaaacaaaacccttccgcgaacggaagggttttactggggtggccaacgcggctcgaacgcgcgaccttctgaaccacaatcagatgctctaccaactgagctatggccaccatagtgtcgtattcagcaagctgaattcgcacaacaggtgaatactatacacaactttgcggatgtgtgctcatcggtgtgtcgcgatggaatcaagcggttggtttgctgatgcagctgctcgcttctcagtacgtgtccgtgccgactcagtccctgttcctcaatgccgtcaaggtggtgcttttcccgatcgccctcggcgtgatctgccacatgatcttcggcaagaagatcgagaaggtcacggtggccctgccgatcgtgtcccaggtggccatcctgctgatcatcggcgtggtcgtcgccgccaacggtccgaagctgttcgtggccagctccctgatggccatcccggtggtcatcctgcataatctgtgcggctactcgctgggcttcggcttctcgaagctgatgtacaggatctacccgaagggcttccgctacgcgcagcagaaggccatcacgttcgaggtcggcatgcaggactccgccctgggcgccacgctggccctgacctccttcgcgtccaacccgctcgccgccgtgccgtccaccttcttctccgtgtggcacaacatctccggctccatcctgtccagctggtggcgcaaccatgacgaccggcacgagattcattgggattctgacaacggcgagaagggctccgccaagagcaccgtttccgtggcccacccgttcgacgccgacaaggccgccaaggtcgctgcctgaaatcctgagatggtgagaaaggtcgggtaaggcacgactccagtcagtcggtcactcacctttcctacctcgcataacatagccgctcccgcttactcccgattgatgtatcgggcgtttcgcgagggcggttttgctataattagtaatgcagaaagcggcaaggtgatacggcaaagaggccgggtcgctagaggttcccatcggatatggaagagcacgaggatgtgctggaaacagataacacagaagcggcatgtggtgaaaagaaacataatgtaacctccttggcggtgcccccgtgtgacatagtctccgcgggggcacctgctgtgtggcgtttgctttttcgcgacgcattcccgggaatgttgcgttgggagggcgtgtgtgcgtgtgttgtgcgatgcattcccgggattgttgcgccagaaggagaggaaaagtacagggcgcggattgtcccaagctagtgagtcgaggcccggcgcgtcgttgtccggcggaatcgtagtatagatattcgtgtgtgccagtagcacgccttatgtaacaggcgagcatgctgggatatccttcaaaccgctgatcgcacgcagcaatgcgccgacgggaggggcgaaggccatcgggccggtggactgggctatcttttccgattcgtcgggtgtcgccaacaggcggatgccaagcgagtgtgctgaaaagtgtgggcgcagtgcggcggtcacacaaaagcaagagaaaccactgaatcggagaattcaagttgcctactattgaacagctcgtccgtaagggacgtcaggcaaagccgaagaagtccaagactttggccctgaagggcagcccgctgcgtcgcggcgtgtgcacccgtgtctacaccaccaccccgaagaagccgaactcggctctgcgtaaggttgctcgtgtgcgcctgtcctcgggcatcgaagtcaccgcctacattccgggcgagggccacaacctgcaggagcactccatcgtgctcgtgcgcggcggccgtgtgaaggatctcccgggtgtgcgttaccacatcgtgcgtggcgcgctcgatacccagggtgtcaaggaccgtaagcagggtcgttccctgtatggagcaaagaaggcgaagtaagagatatgtcacgtaagggaccttccaagaagcacgtcgtgctgccc

SEQ ID NO: 3299 - DNA, 3669 bp, Unknown
  R151_18m  MAG No. k141_4573
caaccacgccatgactttcaccggcgtgaacctcggcgaggacggcaagccgaaccgctggaaggtggagaacagctggggcaaggacgccggcaaggacggctactacgtcatgtccgacgcctggttcgaccgctacgtcaccgagctcatcatccgcaaggaatacctcgacgacgccacccgcgccctgctcaccgccgaaccggtcgagctcgacccttggcagcccctcacccgccgctgccgctgacgttccgctggcgggagcatatattcgaatgccccttctctctgttcagagagaaggggcattacgttatgcgagtacgcccggccgcacctattcgagactatcgcggctgagctgagcaaaagtgccgtcatcatcggccaattgccggtaggttccggcctcgctaattgttccgaactagttatccacagagttatccacatctcccgcaagctagagccacataccccggttttcatagcgagcatgtgaccgctgcgctacggtggcgtcatgaacgacatattgcccactccaccgcccggcgtattcgacgacgaaccgtccggctggacccggccccacacaccgggcgttgcgtctgcgcgcaccatcaatcctgagctacgttcatcaccacgtatggcgagttccgcgccaactgtgattacaggtcctgtgtcgccagcaatgagcgaaaccctcacccaacgtaagcgggaaatgcttaaacgatgcacggacgccgcgcaacagctcgggcaaccggtgctcttcggcatggccacatcgctgatactccaatccgtgccgcttcccaaggattgcgatatcgaccccgccgagctccataccgtctccgactcacaccgcacacgaatacgtgccatcgtgccgccaacgacaccacacatctggaagccgctgagcgatgcgcacaatgtgcgtatcaacaaacatgtgtacgcactggatctgatacacacttgggcacaactcgccgctcatatatcgctcgaatcgctggtcatacttggcgacgcaatccttacggcaatcgcccgcaagccgggtctggcgaacggccgcactgctgacggcatttatcaggacttcgtgcggcaagtcaccgaactcccgaaattcaacgcaaaatccaagtgcatgatcgctcttgcattcattacgccccgcgtggactctccgatggaatcaaagacccgcatcgcgacgacgaaatacgggcttccgccagccgtgacaaattacacggtgcccggcgcgacattcagcaacggcgcgccgataacgctcgatctcgcttggcccgaatttcgcgtcgccatcgaatatgacggcgatcatcatcgcaccgacaaaaaccagtggcggcgggacaacgacaagcgcgaactgctgcgacatcatcattggatcgtcatcatcgccactgccgcgaacatggccgatgagccatcccaagccgaactcgcctaccgggtcgggcggcagttggcattgcgaggtgccgtattcgatttcactttgacggcaacgccactcgatgagatcgcccggcggaggcgacgaagaatataacgtttatcgcgaaagtcgtacagtatccatgttgcgccgacgctgcgcgactcggtgtccgtgtccgatgtcccggtagcgatgtcaatcgatttatgtgtggaccgggccagatttcgctgtcccggttctccatttcgcccctttttgagcaaccaagacaaaatttcattcacctatcaccccaccgtgcaatattcgccatcgtacatcggcggaattccggggttttgggattacggataatgggcgtttacaaggggggctgtcccggttcccgaaaagaagccgaaatcacgaaccgggacagcgaaatctgtcccggtaatcgcgtcaatcggttgccgtcatcaccggaacatcaactgcgcataggtcgaacgcttcaatgcgcaacaggcatgcgaccatatcgcgatagcgatattccgacggaagtatgggactcaccacgcgaccaatattatttgccgagctttggagcctcgtgcttggcgtggcggatcacggcatcggggaaaccggcgtggatgtagtcggacagcatccgcaatagcctctcgtcaaaggtgtgccgctcatcgctgctggcatcgaccaggatgaaatcccatgagtattcggtgtcaccgtcgttgatgatgagtccgcggccagtgatttttgcggccagcaacgcggcgatctgtatggcgcctcgcttgaccaaggccgattccgcttgagtcaggttgcccgaaaatgtgacggtatacatcatcagtccccccttctttgttattttctagaacagcaatgccttattgtaaacagacagcactctgccataatccttttttcaatatgcggcccatggcattcccagcattaaaaaaaaagaaacccggcggagggggccgccgggtgagagagaagagagaagaagggttcagttatggggttcgaagaacctcgccaccggtatgaacttcattccgttgacatcttctatataaccgctccatgcttggcgaattgatgtgcttgtctgggaaaagtcttggcggagtgtgacgaatttgtgacgcccgccgacaaccggcctcgcattgtcggggcttgaccgcacatacggcaacgggccacctcgcaacacttcatgtgcgaggtggcccgtcagctacgagctagcaatgccgaatcactcggcggcgagtttggccttctcggcggccagacgctcggcttcggcggcacggcgagcagccagcgcttcatcgaagcgagccagctcctcttccacggcctcggtcgggatcttggcgaagatcggcgtgggcttaggcaccacggcgccgacctcgatcgcctcgctcttccacgggtgcacgttcacaccgagctcgtaatcgccggtgatgatcggatacgtgaagccgggcttgtcgagatcctcgacttccttgagctcaggcagcggcgagaaggtaccggtgccgccgagcgcctcccacaccttctgtgcggagtgcggcaggaacggcgcgagcaggtggttcgcgtcagacacggcctgggcggccacgtgcagcacggtgccgagacgagcctggtcgtccttaatcttccacggttcggtggcagaaatgtacttgttgatgtcgccgaccacacgcatcgcctcggacagggcgtgcttctggtggtgggtttcgatggaggagccgaccacgtcgaacgcggcggaagcctcttccagaaggccacggtcttcgttggtcatcgaatcctcgtccagcggcggaatctcgccgaagttcttgttgatgaggttggccacgcggttcaccaggttgccccacgaggaggcgagctcctcgttgttgtggcgcacgaactcggcccacgtgaagtcggaatccgaggattcggggccggccacggaaatgtagtagcgcacggcgtccacggggtagcgggcgaggatgtccttgacgtagatcacgatgccgcgggaggagctgaacttcttgccttccatggtcatgaactcgctggccaccacctgctcaggc

SEQ ID NO: 3300 - DNA, 3635 bp, Unknown
  R151_18m  MAG No. k141_5068
cgcgatcctcgcggacgagccgacgggcagcctcgacccggagatgaccgacgaggtgattcatctgctgcagcatgccgcccatcagctcggcaaatgcgtaatcgtggtgacgcattccaagcgtgtcgccgactccgccgatgtcgtgctgcgtctcaggagcaagaaactgacccgggcgtgacccacctgggccgggcggcacccatacaccgcttcggcattctggcacccccgcgaccgggcactccggtatcccggcccttcggcattctggcacccccgcgctccggcaccccggcgacccactcgcgttgccggggtgccgtattcgctctgcgccataatgtgcgtgataatggaaccatgccagtgatgaatgatgaagtgcccggcgaggttgaaccgcaccccgattgttggactggagtaatccagattcgatgatcggaggtgcggttcaaaaggcccttttttgtgtcggattacgaaccgcgcgtttcaccgcttgccgttgtagatctcgttgtcgatcacatcggcgaacacgcggttgacggccgggcgcactaccttcagcgacggcgtcaggcacttgttctcctgcgtgaactgcgtgcccagcacggcgaacttgcgcacggattcggcacgcgagaccgtcgcattcgccttgtccacgtactgctggatctcctcgcgcaccgcggcgttcgtggcgagccggtcgaccggcgtctccgtggacaggccgtgcgcgggcagccaaatggccagcgactccgggtcaagtgtcaccagcgcgccgatgaacgggcgctggtcgcccaccaccacgcagtgctccacgatcgggcacttggcgatctcctcctccagcggaatgggggagacgttcttgccgccggcggtaataataatgtccttgattcgaccggtgatgatgatgcggccggcgtcatcgatctcggccaagtcgccggtcctgagccagccgtcggcggtgaatgcctcggccgtcttctccggcagattgtggtagccgcggaacacgttcgggcccttgacctgcagttcgccttcgtcggaaatgcgaatcgaggagccgggcgcgggctggcctacggtgccgatcacattgtcggtcacgcgcgtggcggcgaacggggcggcggtctcggtcatgccataaccctgaatcatcggcagtccgatgccgttgtagaaatgcgccagatcaagcgacagtggtgcgccgccgcaggccacgtacttgatcttcgggcccagagcaccgcgcaccgtgcggtagacgagcgtttcatacttggcgcgctcggcgatttcggcaaacgtgtgctgctcgccggcctgctccttgcggctccagacgcgcgcggcctcggcggctttgacaaacaggcggcccttccagccggcaccggccttatgcgaggcggcgttgtacaccttctcgaacacgcgtggcacgccaagcaggtaggtcggttcaaacgaacgcaggtccggcagcagggttttggtgtccggcagatagccgaccacgccgtcatcggaggcgatggaggcgtactggatgaatcgtgcgaagcagtgggccagcggcaggaagagcagcaggcgcggatggtcgtcgagaaccacttcatgaagcgcctgcgaagcggtgatggtgatggacacgaagttcttgtgggtcagttcggcacccttcgggttgccggtggaacccgaggtgtagacgatggtggccagatcgtcggcgcgcacggtggccacgcgctcgttcagttcctcgtccgaaacagccacgcccagaccttcgagcgcgcccagtgcgttgccctcgagcatgagaatctgcttcaaggcagggcagtggtccttgaccgagtcgagccggtcgaagcgctcgcgattgtcggcaaaggccagcttgaccaccgaatcgttcatgatgcgctgggcctgcggggcggagtcggtgtcatagatcggcacgcttaccgcgcccaccgcggccagtgcgaaatcgagaatgccccattctagacgggtggaggaaaagatggtcaccgcgtcgcccttggcgatgccgagcgcgatcaggcccttggcggccgagaccacgcgctcgtggaattcgccggtggtgacgttctgccagcggccggggccgattttcttggcggcgattaccgtgtccgcgccggtgcgggcaaggcgatcggtaagtagggagtagatggtctggttgtcgcggatttcgatggattcgccaggcgtggtgtagtggtcaagcataagcgggccgtgtccttacgtgcgttgcgtgatggctgttgacaaaatcgagccattctgacaagttaggttacgctggcgtaaggttgcgcgcgttgtgggcaatggagaagttgtctgtctggttttgtggattgtatacaacgccgtgtctaaccggtttgctctacggttatgacaccgtgtccatttcgggagccatcgacttcctgcaggacaagtacgcgctgagcccggccctgcagggtctggtcatcagctccatcatgatcggcggcgtgatcggcgccggcttctccggcttcctgtccgataagtacggccgccgtcgaagcactggtcgccgcgcaaaaagcagcactaggccgcgtttgctgcgtctattggcgaattgatcatatgggtcgtctgcgtgcagatgacccttttgcgttccgtcggcttctgacaccgtagaaacgtgctttctcggcttcgaggggctgattttgccttatctggaagtctacttccacttcaaggggctgatgcccaagtagacacggccctaaaacggcggaatgacgttgacgtgtagccgtttatacttccgattacatggatgaggagcccctcgaagcggagatagacttccggcaaatgcgaaaccagccccttgaaacggaagtaggcctccggcaaacgcaaaaattagcctcctcgaaacggataaatgcacgtattgggtgtagtggatgcttcagcccctgatatcgaagcatattttttctggttggcgcgtctagcatgcgcactccgcaatcgataattctgtggcctctctcactttaaaagtctggcgtgtgcgagggcgttcgcttaaggtgaatgggattgcgcggaatgtggagcgcagggtcatgaccatgcgcgtgctgcagatccagctgcgctcgctgaccgccatggatatcgtggcctacggcggtgcggcggccggcattggtgtggctctatggcagtatgcgcataccaccgcagccgccgcaggagccggcaccgccggctggtcgccgatcatgctcgccgcccacctgcccggcgcattcgcctacctggcctacggcctgcaatacctgatgccgttcggtgcgggcttcccgctcaccctcgccggactgctgctgattgtgctgctgtccgccgaattctttattcccatgcgtcagcttggctcgttcttccacgtggcgatgaacggcatgacctccaccaagcgcatcttcgctctgctggacaccccggagcccgagcatggcacggcgacc

SEQ ID NO: 3301 - DNA, 6820 bp, Unknown
  R151_18m  MAG No. k141_5350
cgtcgcatccgattcggagctcgccagccactggcatgcgatcgacacggtgggctcatggccgagcaccaacaattcgcgatgcttttccttggtctgggcaagctcgtcgaacacggactgcaccccaccctcatacaggctctggcgatagtcgaccttcgggtcgtcgccgaacaccttgagcatgcggtcgcatgtctgccttgccctggtggcgctggagcacgcgatacgcgtcggcgccattttgtgcgcgaccaagcctttggcgacggccttcgcctgcttgcgtcccttgtcggtcagttcgcgcccggcgtcgccgccgtcaccgaacggttcggtcttggcgtggcgcatcaccagcagcacgtatttgtaatccttggctttcttcgcaaccttcttgaggctcgttcccatggacgaatgctccactccttaacgatccgatgcgcgtcaacgcaacacacacgactattgtctcagaacacctgcaagaatcaccgtatcaatcgccgatagcctcgacctgcgcgtcgagatcgcgcagcactttgcgcagcttacgatcggaaatgtcacgcagttcaaggtcttcgagctgttcggcacgttcttcggcgctcagggaatcgatatctgtggtcgtgtctttcgtggcacggtcacgtttgcgcaacgcttggaatcccggagccatcgcacgggacaccataaggaaaccggtgtgcccgatcatctgatggtcggggcggatcgccaaaccctgcgccttccagtcacgttccagcgtttcctggatgtccggttccgtccagcagccggcttcgcgcaacgcctccgccatacgactcagctgcgtggtggtggtcacatacgccacgagcacgcctccgggggcaatcactcgatacgcctgttcaagccggttccaagggtcgagcatgtcaagcatgatgcggtcgaaggaatgctccggcaacgtggccgccaccgagtcgaaatctccagttttcaaattccaccaagcagggcggcctccgaaatagaccgtggcgttcgcttcggccacgcgggcgaattccgaccgcatctcgatggtggtcagccggccggactcactcaccgcgtccagcaggttgatgctcatggcaccagatccggctccggattccagcacgttcatgccggaacggatgtcacccaactgaattacctgggcaatgtccttcggatacatgatctgcgcaccgcgaggcatcgacagcacatagtcggccagccgcgggcgcattaccgcgaactgccatccaccgatggcgcgtgtgcccttccaaggcttgttggcgtcgcgttccggatggtcctggttgatctgggtctcacgtttggcactcaccgtcaccaccacagatccctccagctgcccgatcacgtcgtcgtgcagaatgatgccatgcgaagtctgcgtcacgccaccaggcaccagctggtcggtgatcttattggatctgcgatccgtaaactgcactttctcgcccgctgtcaacggtcctcgacgcatcaatcgctccttcattcccaacacggattccatcattgcgacagtgcggtcaagaccgcctgtctggcgctattcatgctacagcatgttccgccatgcaaagcgccagttacagcgcgtacgcgttccagcgcccgttcatgtgtgtcacctcgagcttcaggccaaacacctcgcttaagcgcgcggacgtgaagccatgttccaagtcgcccgtgtacacgatggttccgggagccggatcgttgcctgtcacattgtcggcataagcatcggcttcgttgccggtgattctacccataatcgccacatggtcgaatccctgcggaatctcctcaagacgatgcgtcaccaataccacggcacggtctgattgttcggcaccgaccctgctcaacgcacgaagcgcgatctcacgaccacccaggtcgagtcctgtggtcggttcatccagaatcagcaaatccggatcggccatcagcgcgcggcagatcagcacgcgcgtacgttcgccttccgaaagcttgaatatcatcttgccttcgaggtattcgatgccgaactcgcgcatcagggagcgcgccttggcataatcttcgtcggtgtaagtgtcgcgccaacggccggtggtcgcggtcaatgcggtcacgatggcgtcgagcggatcttcctgaggcgggaatgcacggctcagttccgcggagctcaaaccgatgcggttacggtaggagaacacgtccactttaccgagacggttgccaagaatgtcgacggtaccttccgacgggaagcctctggtgctcatcatttgaaccaagcttgatttgccgatgccgttaggaccgaacaacacccatttctcacctttgttgatttccaaattgaccttggtgagaatcacacgcttacgacgacggaattccacgtcagtgagtttcagcgcgatgttcttttccgacattcttcctcccctgccattgtgcagattgcagtcatgaaaacgccttccgccagaataatgcgtccggtggaaggcgttcacgtaccatctacgtggcaaacgggctattcggcagctttgccctgctcggcaagcacatcctcgtagaccttgacggtcttgtcggcaatcgactcccagctgaagttgtcgcgtgctcgttcgtatccagcctgtcccatctgcttcgctttttcggggtcggccatgatgcggttaatagcgtcggccatatcgtgcacgaacttgtctggattggtcggggtgccagtgccgtcgtgcaactggtcgacgggcacgaggtaaccggtttcgccgtcgacgacgacttcaggaataccgccagtcgcggaggccaccacgggcagaccacaggccatggcttcaaggttcacgatgccgagtggctcgtaaatggacgggcagatgaacgcgtcgcaaccgtgttcgagcgcgttaagttccggcttcggcagcatctcttctatccagatgatgttgccgcgctcctcatcaagcttggcgaacgcggttttgacctcgttcatgatttccggagtgtcgggcgcgccggcgcacagcacgacctggatgcccggatcgacgaaatgcaacgcctgcagcaggtacggcaaacccttctgcctggtaatacggccgacgaacaggagcgtgggcttattgcggtcgatgttgtagcgttcgaacaccttccagcccggatcgtcgtcagccggggtttcgaactggctcatggtgatgccattgtgcaccacgaccaccttgtcgggatcgagattcggataagcggacaggatgtcttcgcgcatgccggcggatacggcgatgacgcggtcggcgtgctcgtatgcgtcacgttcagcccacgagctcaggtcgtagccgccgcctagctgctcacgcttccatggacggaacggttcgagggaatgcgcggtgatgaccagcggcgttccgtgcagcatcttggcgaggtaaccggctaggcagacgtaccatgtgtgggcgtggatgatgtcggcgtccacatcgttggcgatctgcaagtcgacgccaaatgttttcaacgcgccgttcgcctcttggagttccttgggaacatcgtacccgatgaccttaagcgaacctttgggattgtcgcccggaatcttgggaatctcattctcggcacgcggtccatcaaacgcacggaccgtcacatccacgcgttccgccagaactttggaaagctcctccgcgtgcacgcctgcgccgccatacaccttgggcggatattcacgggaaaggatttcaaccttcatatctgtgctctcctcttcgagtcaggcagttgttccgtcactactgtaaggcaatttttcaacgaaacgcctgattgtttcattcgtgtcacaaagttttacatcttttctgaaatatcactaaaagtgagtgtcttagaattgaataggaatactgaaagcagcctcgcttcgtgataatgagtattctacaacccaaaagctaatttgtttgatttttcatgtccttttgataactttctcaatatagcagtagatacatcaatacaattttctgcgggaatacccattttcacaatattggttttatatttctcggaagcctctgcttttaggtattcaacaatttcaatgctattcatctgctaatgcttttcctaaatcacgcacataagttgattgctgctttttcaagtaggtcttgacaaagggctttaataaaaacttttttgcagaaacattttctgtaaaatcaatttctacatatccatttttaggcttgaatattcctacccagtgtcctttcatgtttttattttccatatcaaattcccaccgttcaagcggattacatacggttattgtaaatgtggtagcagtacctgttttagaatattctatgaacgtagtatcattaacgacctctattttgtcaatgtcgctgcgccatgaataatcagtaagagaagttactattgcccatacattttcaatggttgttggaaaagttgctttgatgttagaaatcgccatattattcctcctttttaggctgtattgatagccaatattcattttctgcattatttggattagcctgtatgtaatgttttatatccagtgcatttccatattcaaaaccagaaaaaggaagccattctgtaatgatacgtcgttctaagtattgcaaggaaatattcgtaccacttcctgtaaaccaagaacgaatagtactatcatttgtgactcgcatgtaaaagcggggctgcatccgatggaaagatgcagccccgctttacgttcatcgccttaccatcagacggccgtaccattctgatcgagattcggattatgcttcggattacccgccgtgaagaacaggctaagcacaccgacggcaaagacaatggaaacggttgcgatgagccacatcggatgcgatggaagccacatgactacaaggaatgcgattgcggacaacgcgatcagcgtccagctggccacgcggaaccactggcgcatggaatgcggcgctttgaacatctttggatttgtgtaatccggattggtggtcagcaggctttcgttttccacgacgctgccgccggtcggtttccatggaccgtcggtgccgtcctgcaggcgacgggacttctcctgaagctggtattcgtcaagcatgccggaacggccacggcctctggtctggtcgtactgttgaggcactcccctgcggttctgcttggcttgggcacgtcgttcggcgcgatttggcattggtgcactcctttgttacgtgttgctgcatgctactttagcgtatgccggacccgtatgctggctgttttccacgcttcagtcatatcgattcaagaaaaacgttgcctataggaaaagtggccttcgtccgcattccgatggatacgggcgaagaccacttgaatcttggtgtcgccgtcgaatcagcgtggcagcatcatcggccttttggaggccacgatgggcgccggcagttcagtggcaccggtgaggtattcatccacggcagccgcgcaggagcggccttcggagatggcccataccacgaggctctggccgcgtccggcgtcaccgcaggcgaatacaccatcctggctggtggcgaacttgtcgttgcgagccacattgccgcgcccgtcgaggtcgacaggcagctggtccacgagcgtagtggtgtccggatgcaggaaaccgacggagatgagcaccagatcggccgggatcacgcgttcggtgcccggctgacgtgtgaacgggccgttttcgccgggtgccacgttcacgaccttgagtccagtcacatgtccgttctcgtcggccacgaagccctcggtggcggtggagtgttccaccttcaccttagcctgttcctcttcggtgccgacgaagttcacggaatccgtgctgtacacgtattcggcgcgctgggtttcgaagccttcctccatggaggaggtcttctggtacaggcgtgcgaaagtcggccacggttggttggccgggcgttcgcttggttcctgcggcatgatctgcagcacagtgacgtccttggcgccttgacggatggatgtgcccaggcagtcggatccggtatcgccgccgccgatgatcacgacatgcttgccttcggcggtgatgtcattgactggcttaacgccgtagacgcggcgggtcgcgtcaggcaggaactccatggcaaagtggatgcctttgagttcacggcccggaatcttcatgtcgcgcggcacggtggagccgatggcaacgaccacggcatcgtagcgggagcgcaggtcgtcccaggagatgtctttgccgatctccacgccggtacggaatacagtgccttcggtctccatctgttccacacggcggtcgatgagtcgcttgtcgagtttgaagttcggaatgccgtagcgcatcagaccgccgatggcgtcatcacgctcgtatacgaccacggtgtggccggcgcgggtaagctgctgggcgcatgctaaaccggacgggccggagccgaccacggcgacggtctggtcggtcagacgctgcggaggcaacggcttgacatagtcaagctcccatgcctgatcgatgatcgtgcactcgtcgttcttgatcatggtcggcggctggtggatgcctagcacacaggcggcctcgcacagc

SEQ ID NO: 3302 - DNA, 26293 bp, Unknown
  R151_18m  MAG No. k141_5592
ctcccgccagtcaggttcccaatgtcgcaggcggctatggtcaggaacagggttattccccacaacagtatccgccacaatccgatggtcggaataagcccggccagggccggcatgcacggtaaaccatagagagtattaggaagggaaaggggacatcgatgtccgacaaggataaagacaagaatgttgtcgagcaattgcttgattcagtgataacaagttctgattccaatataggtcccattgagcagcgtctcaatgagattgccaagagcccgaactgggagttacagggaaatattctgtctgttgataatgctgaacaagcagaacaagcagtgaaatatgtggttgaacgtgtatccgatactgatgttttctctggtcaaactgcgcttagtgcaaaacagcatggagaagatttgcttgccgtaaattatgcggatggcctatccagtcaaattgaagcgatgcagcgcatcattgatcacgccaatgatgctcttgagtatgtgaggaagcaaagggagtcattgccggggaaccagcttgatgctgtttcatctgctgcgatacgtatagcagatgtgggtgcgactgttctcttgccttttccgcttgctgctggtaaagcaactattcagattcttactggttggactgacccggtagggaaaatcaatgagcagttatgctcgaatagagagaataaggcgcaagaactacttcttgatttttataagagattgcgtaatgcgggaaattatgatccggtaaaaccagtagtctccacaccagggaagcatcaggatattggctcgacggatgttgatatttgggatcagtctggtgttggtggtcgtgttcctggtcctggtacgtatttgggtgatggtgcgtatgatctcaatggtgatggtttgccggattattacgattacaacatggatggcgtgccggacgtgtgggtggattccgatggggacggcattccggatgtctatgatacgtatgatccgaatgacgtggcccagaaccggaagtatgccgaggctgttgaccagataggccggaaccgccggaccagtccgtacgacaatgatcggggtggcaatggctctggtggccaggacgtcgatgatcgtccggggtatgtggttcctgatgattctcgtcgtcccgcgcctccgagcccggacccgtacaatccgtatgatcccaacgacccttatgatcccaatggtccgtacgatcccaacgacccttatgatcccaatgatccgtacgatccgtcgattccgattccgtcgcgcaagcccaccgataacgacgtcgttgacgtcgattccgatttggatctgtcgccggttccggttgtgccgaggccgacggtgtccgcttccggtttgggtggttcctccgcggggctgggtgctggtgcgtcccttggtggcgttggcggtgccggcgtcggcatcggcgcgggtgtgtcgggtggctcgttcttcacgaacgcgccggtccatgcgcaggtggtgccgggtggcatctcgggcgccaccggcatggcggccggtctgaagtccgctggtgccgcttccggggcggcggcttccgctggccgtccgggcatgatgggtgctccgggtgccgccggttcgaaccagtcgaagaacaagcgtcagggtttggggtacatggctcccaagctcgaggatgatgacatcgcgatcaggtccgtgggtgccatggctggccatcgtgccaggccggccggcgactgacgcccggatcggctaggggaaaggagcgttcatgagtgatcagattcaggtgagcaaaagcgcgcttgccagtttggccaagggctacaatgacgcggcctcggggttcaccaaaatggggttcggcttgcaaagcagacaactggaccccagctttggtttggtgctgcagctggtgaaaggcgattacgacagtgccaaggagaacacgctggattatctgtccagtctgggttcgctgatgagcaccatgtcccaggacatcaccgatgccattgccgcctataccgagggcgaccagaagaactccgattccattcaggacctgctcaacaagatcgagaaccttgaacagcagaacaggcagttgagcgacaaggtcggtgaactggaggagaaggtcggtgaactggagcagggccagacatccggcggcaccggtggctattcgggcggcggcaccggaggctattccggtggcggttccggcggtggctccggatattcggccggtggctccggtggtgcggcgagcgctccctcgatgccggactatcagatgccgagtcggccggcctatcagcaggatgcttctgggaattaccggaatgatgctcccgttgatgtggattccgatatggcgggtgacattggcggcagtctcgacccggatacgaatgccaccgatattccggatattcccactccgcccagccatgacggcaccacgattcccaagccggaacgggtggacaccacggaaagcgtggatatcgatatggatggcgatggcgtggtcgattattcggtgaatgccgacctggattccaccggtgtgcgtttcaacgatgacggaaccgtgacgctgagcaagaacggtggttcgttcggtgctgattccgcgcagaccagtggcatctccttcgacaccgacaacgatggcgccgatgatgttcatctggagctcaaggacggtcaggatgccagcgtgcgtgtcgttcccggcgccgagggcagcggcacgcgatacgttcaggtggatacggatggcgacggtgtctatgagagcagctatgccgtgcgcgacggtgccgcagcatcgggtgatgcgggctcgggggtatcggacggtgcttccgccgcgactgggacgacggccgaggacagttaccggaccgaggtgagcaagggcgaggaacaggcttggcggacactggccgagaccgacccgttgcaccgatccgttgacgagctcaaggaactgttcaacagacgcgaagagatcgagctgccggaaacgaattcgctttcggatggcgtctggggcggtgcctcggcgaatggctcgatcacgattacgtttggtggtagcaagggggtgacggcatgaacgaatggctgaggcatgcttcggctcgtgtggtgttcattgtcgcggcggcgaatggtggcggcgatgtcgagcacggtaacctgtacgagaaccaggattacaatccggacgtcatcgatattggagacaatgacaacactggtaccggcatacaggccaacgagggggacttaatatcttctggatacaaattggctgaggccggtgagaagttccagtccggcaatattgccgatattcgtgacggggttagcgatcttctgggggccacaaatattcagagtatgaatagctctcttgatcgatggtgggacaacagcacatctcccctgagtatcgcggctggtagaacgcaggatcttcgagatggcatgagccatggtttggtgagtgctagaaatgtcactcgatatttttctagtggtttgtcttgggctcgtatgggtattggtgtgatcgacacggtgtgcaatgtcttgcatatcacgaaccccgtcgatgagattctgcgcaagccgttcggtggcgattgggatgaattgtcccagtccgctcaggattggcgtggcatcgccaccaatctggaaacgatgcatacgggattgcagcaggcccagcagcagatccggacatcgtggaagggcgaggcattcgaccggtattcgttgtgcaacgaccagatcggtcagatgttcgagggcggtcccgatatctgccgtgagatcgcggatggtcttgatgcgttggtggatgtggccaagaagtgcttcgactatgcgctggatgtcattgaggagctcatcgacctgtgcatggacattgttgaatgggcgtggaccggtgtcggtctagccgtcgtggcggccaagcatgcaggatctgtcatttccctcattcagaatggttacgatattgttcagggcttgtatgatgccgcgcagtcgttcaaggcggttacggcggcggcttccccattggcccagcaggcgaaatcatttgctaccagtcttgaacgcacctgagccacggagcagaggaggatatacacatggcttcacaaggatttgaacaattcatggcgcaggtccggcagctgagcacgttggtggataccaagcagaaggagctggatgagctgcgcaagaagaatgccgaggaacgtgaggagcgtcggaagcagtacgccgaggaccgccgtgcgggcaagcagggccgtgcttggcaggtgctgcagcagcgcatcgatatggggcagacctgcgagcgcgacatcatcatgggcttggatacttctgccgaggcacgtgaggtgcgtgcccaggcggccaaggcattggatgccatgcgcaccgcggtcagcgagcttccggaggacgatcccgcggcgcagcagctccggcagcttcgcgagcgtcagcaatcacgctgattccattgtcgtcgataaaggtgagggtatggatgttgttgaggtttgggatcggtccatgcgggcttgtgggtgggtgccgattccgtcttggccgtggacgttcgataaggtcctgttgcatgatgccatcggcatgcgtgcgccgaagatgccgcgtactgcgaatacgcagtggttttacgccaaggggccttgggtcacgttccagttgaatgtgatggacaatctcagttggtggacgatgtactccgcttggtcgttgcagacagtggtgttgccggtgcgttctcggatgtcggggtatgcgtggtgcaccactacggatttgaagggcaagccgaggcctcagacggtgggtggcttgtctcctgaggtgttccgtatcctgtcgtcgtctcctgcccgtctcaatttgttggtggcggatgggctggcgtatttgtggacgccgattagcgttcatcgtcttttggaatggcaatatatgaccccggaactggagtcgcagatgctgccggtggcgcaggagttgtgccggtacgtgtgatggcgggctgtccgtgctgctgaccgtatgattccctcacgaaacggtatggcgtattcttaggaggagcagccgtttcgaggggtttcggagatgaggagaacggggagaggggcatggctatggcagcgcaggatgcctatgagcgccaacgggtgaatgttgccgtggcatgggctgtggccgcctcgttatgcgtcgcattcgcggtattcggtttcgatggtgtaatgcgtggtcgtgccgcatccaccgattctgccgtgttccagggtttagtcagtggactcatcggtgtggatgcctccgctaaagatgccgtgaccgtaagcgccgttgtatttaatgcgttcaccgccacagtgttggcattactgtcctactacgccgcacatgtgacggtgaggaccgactggcatcgaagcgtcgattatgccggctccttggccacggtcgttgccgccgcgatagctgcgggcccagcgcttgcccgtattgcgcagattatgtcggttactcgttctgcggcactggcggtcttcctctctgcgacccttgtggccgttatggcggcatatatccaatacgcggcttcgggccgcattacagtagcccttgcccgactgctcatcaccgcagccgttattatcgcgctattcattatcgcagtagtaatattcgccattcccgcaccggtaatcgcagcggcctgctccgtgggcggtgcatggtatgtgcatgcccaagcgaatgtgattttgcgggtgccggaccggtacctcatcgaatggcgtcgatacatgtcccagcgttggacggttcgaggcgcggttccggaaaattcacgtccgctctatacccatgacatcagcgaagacatgactattttttctgccgaatacaccatgggtcttgtggttgggcatctatatattgctgccggatatgttgtgctatgcctcactgtgcctgccgaaccggatctcttcaccactatcggcttcggcgcatattcggtgttattgccctgctatctgttgctccggccgcgcaccgcgggcagtgcgctggaacgtatgcttatgcgttcatgcgcggtattattgcctgcagcagccctgatcacgctgaccaatcatgacgattggcgttggctcgtgacatggttggtattcgggctgatagccgtgggcatagtgatagccgccgccacattggcagtatcgggcggcttcaagtcgctgatgttgtctcgtgtcggcgactgggtcaccaccggtagtcttgcattgacgggaccagcggcgttcctcgcctcaaacgccatggatatgattcgggggtttatgtcatgactgcagcgcccatgcccattgcttcccaagctcctgcaccacgtcccggtccgtccgtgacccatcccatggtgggggagggataccgttatgctacggtcgggcgacgtatgctcgcgctgctgattgacgtagcatttgtaacagtggtgggcggcgtcactttggcgctcagccgcaacgccatattggccgtcttgtgcgcaatacaggctgtcgccctgaactgggggtgggaggcttgccgcggtcgtaccatcggcaaggcaatactgggcttatgtgtggtgcgcaacactgcggatatggggcagcagggcgctggtctgctacctgccggtccgtggcgtgcgttggcgcgtgtattgatcacatcattgggctgtttggtggcgattgtcgccgcatttatgctggaatggacctcttcactagaccaggtacgtcatcgcggattgcaggatcggctgtccggcactgccgtaattgatacgcgtgtgcagtatgtgacggcaatgtctgatacgggtaatgccatcaccgataataccggtaccagtaccagcaccagatttgactctacttttgatgatgaggatgaagatttggaggcgatggtcggcggtattcttccgccagccactgcgcccacaccctccggccgttcggattcattcagggctttgcgcgcggtacctgctgccatagaaccgtcgtccgtacggcctgcccaggtgcatgccgggacattgcaatcatcgtctaccgccatacaggtgcagtctgtgcaaaccgaatctgttcaaccggtgcctgcggcccccaccatctctccagcagtgcccagccctgtaccgtctgttacttccaatacagcaaaacctgtaattcctgcagtgtcccagactgccatgccgcggcacagcagtggtgctgcaacgattgccatccccacgccggcgggcacgacttcagcgcgagtgcatgctgtgccgcctgcattgccaaccgtcggaacaagcccggtcgtgccatcatcttcggcggcaccaatacccactggaccactgcctgttcccaaggccgttcctcaggctgtgccccagcgtcccgtgccggcaaaaccggcagctgccaaacaggtggcggtattgtatttcgaaaacggcaatggtgtgcatctggatattcccagccgtgctctgctgggtcgccaccccaccagtagcgacccaaacgacgtgctggtcagagtaccagacaccaccggcaccatatcccgtacacacgcattgttggagattgcgtccggccggatgtgggtcactgacttggaaagcaccaacggcacggaaattctgaccgaagacggtgccgtgaaacatcttgaggcgggcgcgcgtaccgaaatagcgtttggcacacgtatattcctaggaagcaccgccataagtgtgagcctgctgagaaacagggagaaaaaataatgagtgagataacgccacaggtatcctcccgcatagaccagcccaaagtgcctcacggcaaggtggtgttgcaggccccgcctgaattggagccgagcgacggtgtcaacagtctgttgaccatgctggtaccgctgttgggcagtgtctccgccattgtgatgatggtcatgtccaattccggtctgaccggttttctgaccggcggcatgttcatgctctcctccgtgggcttcgtactggttaacggcgtgcgtcaacgttcgcagcgcaaagcgaatctcacttcgtcccggcgtgaatacttggcatatttggctgaactgagaaaaaccgttcgtaccgcggccaaaaaacaacggcgtgcagaactgtggaattctcccacaccggattccttggtggccatcgcgcaggaacatgtacgccgctgggagcgcatcccatcggatgatgattttcttaatgtgcgcatcggttctaaagacgagccattgtgcattaccttggaggcgccggagctgcctccgctggccgaactggacccggtctccgcttcagcggcgcaccggttcatgatggcccatcaaaatctgcatgatatgccttgcaccatcgacctgcccaagtacaagcgtatcgaaatcctcggtgacgctgatcaggcgcaatctttagcccgcaccttgatatgtcaggcggcggtctggcatgggcctgaatatctgaagatcatcgtgctggcggcccccgaacagcagcacgcgtggcgctggatcggcgagatgccccacgcatggagcgacgagtccaaagatccggcgcttggccatggcgaagtgatgctcgctggcagcgtggaagaagcgaaccgactgattggcgaagacattttgcatcgcagccggtttaccggcaccgggcaatcgaccctgccgtacattctggtggtacgtgatggttcagtgccccagggtgacgcgaacaacagcgatgatgatggcttggtgcgccgcgacggatttgacggcgtcacccttatcgatcttcctgaagagtggggcgatcttgaagaagagcacgtgttgcgcgtcatcttctcccaatcctccatcgaaatgggtctgaacgtggtacgcacttccacggtgaaccagattgagatcatcacatcatcggagcgcgtggacacctgtgccccggacagcctgagtattcaggaagccaaggccgtggcctccagactggaacagttgcccagcgaagaggagaacggcgacaacaaggaacaagcctcccacgccaagaagtcctccgaattggccgatctgctgggcatcgcggatatccatcacatcgacttgaaccgcctgtgggcatacaaaaccggcaaggaacgactgcgtgtgcccatcggcctcaacgcggacacctccatcacgtacctcgacatcaaggaatccgcccagtatggcatgggcccgcacggtgtgcttgtcggcgccaccggttccggtaagtcggaggtgttgcgcacgctggtgttgtcgttggcgttgacgcacagccctgatcagctgaactttgtgctcatcgatttcaagggtggtgccaccttcgccggtatggaaggcatgccgcatatctcctctatcatcaccaaccttggtgaggaagcctcgttggtcgatcgtatgcaagacgctttgaccggtgaaatgacacgcaggcaggaactgctgcgcaaggccggcaacttcgccaacgtatccgattatgagaaggcccgtctcaacgggcgtaccgatttggaaccgttgcctgcactgttcgtggtatgcgacgagttctctgaactgttggccgccaaaccggacattgtcgattccttcgtgaacatcggccgactgggccgttctctggaagtccacctgctcatcgcctcccagcggcttgaggagggcaagctgcgtggcttggattcgcatttgtcataccgtatcggcctgcgcacgttctccgcttcggaatcacgtgtggtgctcggtgtaccggacgcctacaccctgcccagcatccctggtgtcggttacttcaagccagacccaagcaccatgattcgcttccgtgcatcctatgtgtccggagctccgaaaggcgagccggacaccaatccctcgaacttcgacgtggctgtggatcagatgcgtcgtgctggcggtaagcctgcacatcaggtatggttgccgccgctgaatgtgccgaacacgctcgacgagttcttccccgacttgaccgccaccgcgcagtatgggctgatttccccctcccgacgcaaggcggggtacttatccgtgccagtggcgttggaagacaagcccaaggaacagaaacgcgaggtattgagcctcgacctgtctggagcgggcggccatgtggctatcgccggtggcccgttgaccggtaagagcacgttcatgcgcaccatggtggcttcgcttgcgttggcgcatagtcccactgaagtccagtgctatgcgctggatctgggcggtggcacgttcgccggtatggaagacctgcagcatgtggctggtgttgctcttcgtggtgacgatgaacgcgtcaaccgtatgctcgctgaagtggtgagcatcatcaacgcccgtgaacgttacttcaagaaccataagatcgattcgattggcacttaccgccagatgcgagccaagggccaagcggatgacggctatggtgaggtattcctgttcatcgatggatggcagaacttccgcacggaatatgaagacctacaggccaaggtattggatatcgtctctcgcggtctgacgttcggcgtgcatgtggtcatctccacgagccgttggatggatctacgagccaacatcaaggatcttatgggcactcgtctggaactgagactaggtgatccggctgattccgaaatcgaccgcagagtggccatcaccgtgcctaagggcatgcctggccgtggtctggcttccagcaagcggcatattctggtggcattgccgcgcatcgacggcgatcataaagccgactccatggcggacggcatcaaggatctcatcgccaaggtcaatgccgcttggaagggccccaagccaccaaagctgcgtcttctgcccaccatgctgtctcgcaacgccttcctgaccaccgtgccggaacagacgcgtaacagtcgtttcgtactcggcgtggacgaagccgacttgaagcctgtgttgttcaaccccgtgcgagcgccgcatatgtatgcgttcggcgactctcgctccggcaagtcctcgttcctgcgtctgattgctcaggaaatcgagcgcttttacgacgtgaccggcggcaaggccaagatcttcctggtcgactatcgccgcgctctgcttgatgaggtgaatgacaagtaccttggccagtatctgaccaatcatgaggaaaccagtcaggcgatgaacgatcttgccgccttcctggccacacgcattccgggctcggacgtcaccgcggaacagttgcgtcgacgctcgtggtggaccggctccgacgcttacgtgctgattgacgactacgatctggtctccacttcacgaggcaatccgattcaaccaatcgtgcctttgcttgcacaggcttccgatatcggcctgcatgtattcctgacgcgccgcactggtggtgccagtcgatccctgtatgatccggtgctgcaatccttccaggatctggccgtcaccggtttgctgttctcgggcgatccgaatgagggacagcttattggcaaaaccaagccgaagccattggtgcccggtcgtgtgcaggtggtcagtcgagatagcggcacattcctggcacagctcgcctacgcgccctccagcctgccgcccatggcaccaatgaactgattggcctgaatgtttgattaccgtctagggattgtcattcatctgcgctgtgcttcgcgtctttggcgatgcgcaaagcaatcagcgtgatgatcaccagaatcgcggccgcacctactacggccaagacagcacttaccgtgccatccgaatgcatggtggcctcgaccttaagatgttgtgcctgctgggtgcgaggaggcgtgtacggctcatattgtgtgctgcctggaccgcgcatgccgttggccagcgtgatggtgatggctccatacgggttgatttgcccccacccgcgattatcgtcgcgtgcgtcggggtccgggcggttgccggaagcttcgattcgctgcagccattgcaaggcgttttcatcgggatgacgctgcgccaccaaagccgctacaccactggcatatgcggtggcgtagctggaagatgctgattcggcggaaaagacgcaatccacgcctctcggaatcgtggacagcacggattccccgggggcaagaatgtctacctgctcgccactgatggaatcggatgacgcatggaaggacgtgtccgcagccgccacgcccaacacgtccttccatgcggcagggtagcgaagcccatcctgcgtggacgacgaggtgttgcggttgcctgcgctggaaaccacgagggaacctttggcttgtgcgtattgcacggcaagttgcaaggtgccactgggagccacggtgctttgcgagatattgatgatctgcgcaccatgatcggcggcataccgtatgccatcagccagcacgtccgggctgggaccgccttgcgaatgactggaggaattatcgatggagttatacacgcgcaccggcaggattgtggccttgggggcaatgcccatcagagaagagccttctatttttctggcggcgatgatgcccgccacaaccgtgccatgcccataattatcagtgcggccatcctgaacgttgtctcccgccagattgactccaggcagcactgcgtcgccagccagatgcgggttgttggtgtccacgccggaatcgactacggccacaatgatgccttcgccatccgccagagaccgcaccgtggtcatgccgagcgcatcctcggtccatggtgtgctggtgatgtagttggttttaccgatttcacagctgttctgatcggcccatgccggtgtaggcgagagtgccccggctgcaagcgtgccacatgccagagcagtgcatgcggcagctgcgatgccggtgcgaatacggtgggttcgtgaggtgcgtgttgtcatcgtcatcattgctttcgactggatgccgaagagtcggatgagctgttcgcgtcgggtgtgccctcggtgcctgcgctagtagcagaggattgtcctgacgacgatgttgccgctgcctgatcctgcgctgaaatctgtagtccggcgctattgctgctcaaagccactccggcggagaatacgttgatccaggagcggggtattgcggtgacatcatttttggtaaagcccagtcgcttcaatgtttcttcggtatcgtccggaaccgggtaggccacaccggtgccatcgaccacatacaatgcgccggtggtaccgccggcactgtctaccgtgcgcagcagcgcaccgctgccattgatgatggtggtaccggaatcagtacgttgcgggcggttcttgtcgtcactgatggtcgccaaggtgatgccggcagcggcattatgcgtggtatcggtttggaatttggacggttccaacgcagcgcaagtgccattgccggaattcatcggcgttaactggccatcgggccaatcatcgggaacgatggaatcggtggcattacggaacccggcctgctgctgttcctgtgcggtcatggtaatggtttgcgcaccggcaccgaggctcagctgatacatttccaaggccatgccattcaatggcgagagtgtgccatcggcaagcaccacatatttggtgttgtcgttggagggatcggcaatcagcgaaccgacggtgtatgatgtaccgcccaccgcgacttccgtgcctttgcccctgacatccaacactccgagatcggaaccgccggcaaacaagtccagccattgcaccggagccttgggagcgttatccaacgtgagttggccgacgccgagaatacgaagcaccgcatcgcgaatcaggccttcctgcggcagacgatgtcgcagaccgttgacaatgaggtatccaatgccatctacgttgaccagcattgcctcattacgactggccggggtggtcacggcatcattggtgatgagattgttggttgaggcgcgctcggtgtcaagacaactcaccaggaatttcgatacgagcctcgaccggttgggcagaatatccggtgcgcccacaatgcctacgctggagccgatgggaataccttcaagttcgttgtcgtctacggtgataactcggtattcgtctgaggggatgagcagacgtgcgctggtggtgttgattaccggatgcagcacaccgttgacgctgatgaatcgagatgcggtgtctttgcccacaatgagtttgttattgctccagtctgaaggcaggccagggctgatgatgccatagaacacactgatcagaaccatgatggcggtcaggccgatactgaccatcaccggcgtcaggcctttcttaggagtcagctccttgccatccggcataccggaagtgaaggcagtaatgagcctggcccgcgaatagttttgtgcgtcctgcaggtccttcttattcgccatggcccctcctcacaatcccaatgccacgtaggcgagcggcagggtggccaccacacagattacgttcgaggcgtcagccagacgggtcatggcgatggaatcgtgcttagacagctgtgtgccgatgacgcacagcaacgctcccagtgagaacaagcccaccaccaccgaagcccacgtggggtgaaacaccgtgcatgcggcacaagacaggcagatgccggcacctgcggtgataacggtgatcagcatttccgattgtgcatagatgcgcctggaatcaagcagcatggctgcgaacagaaccaaggtaagtgccacgcctgctgggcttgcactggaaacagccagaggcgtgccgaacacgatcagtgcgctggtggcagcgcgcaggtcgaacagcagcgtggagccgatacggtacttataacgcacttcgctgatatcgatgttcttgggcagcgcgaaaatctccgattcgctggtggggctgtccacagacaatcgtgcggaagacaggctgagccacggcagcgcattggcagccagaccgagcagagccactgccacgatccatacgcgagtggaccagtgcggcatcgttacacacacaatgccgagaatcaccagtgctgcgccgataatgacaggaatcaacgcgtacagtctgttcactgtaagcagcaaacatgaaatgccgccggccagcagtaaaccagcaccgataccaacggccgggaacccgtagaacgagggattgaacagtgaacccatgagatgatatccggtcacgccggccaaaagcgaggcgactagcgacagtgccagtgcctgccgatgcatatggcgcgaagccagtaccgtggcaatcgccagtaaagcggctgcggtaatgcccgctacgccagcattgatgatggatagtggggccaatgccagacaaatcgctccgacacccagtagcacacaactgaccaccattgtggtcactgtggtattggcactggtccacggtcgatgagaacgctccaccgaatcggccaccgcctcaaccacatcgtcgtagacgatatcctgatcgcccaaggcgttgacctcgagtttgagacgttcaccgtctcggatggcctgatcggccagcgaagcgggattattgatggcggtttcgtcgtcacgggtcagtcggtagccggcatacaccagagtcggatcgaacacacctagtttcttggcgatatcaggcagcagttcagctaccggaagtgtcgacggaacattgagtttcgcggagcgtttgccatacaccacagtgatggccacgcgcggggatgatgcggaaggcgagggctgattggctggcactcccatcgcaatcgaaggtacgggcgttggcgccggaacgtgtggtgctatgcgcggcggtgccggcatcatggacggtccggcgggcgtgtggcgatgcgacgatgccatagggtgcttcctcttctcaataaactcccaaaggtctactgtattcttgtattctctcacacattgcgggtatcgggaatgccattgtctggtcctagagcagattccgtggcgttttttgccgagtcgggtcctagggtggagcacaacgactacgatggtgcgggtaacgcgatacaaggagtggaacttcatatgccgaagatgtttggaaccgatggtgttcgaggactggccaatagggatttgaccgcacgtctggcgttggatttgggcgatgccgccgtgcgtgtgctcggcgacgccggcacccaagacgatcagcctgagggacgccgccgcgcgctcgtgggccgtgacacccgtgtgtccggtgattttctggcttccgccctgtccgcgggcatggccgccggcggcttcgacgtgatcgatgccggcatcatccccactcctggcgtggcctacctgacctccgtgctcaacgtcgaaatgggtgccgtgatctccgcctcccacaacccgatgcccgacaacggcatcaagttcttcgcacgcggcggcttcaagctgcccgaccagaaggaagacgacatcgaggccgtgctcggccaggactgggaccgcccgaccggtgccggcgtgggccgcgtgagccacgaccagaccaccgccaccaacctgtacatcgatcatctggtggccaccatcgctccgctgaacgatgacaaaacccagcccaagccgctcaagggcctgaagatcgtggccgactgcgccaacggcgccacttccgtggtggctcccgaagccctgcgccgtgccggtgcggatgtaatcgtgatcaacgcctcgccggacggctacaacatcaacaagaacgccggttccacccaccccgagcagctgcaggccatggtcaaggccaccgatgccgtgatgggcgtggccttcgacggcgacgccgaccgttgcctcgccgtggacgaagacggcaacatgatcaacggcgaccagatcatgggcattctggcccgtgccaagcagcgcgaaggcaagctcaaccacgacaccctcgtggtcaccgtgatgagcaacctcggtctgaagctcgccctgaaagacatgggcatcaagaccgtggaaaccgccgtgggcgatcgttacgtgcttgaggaaatgctcaagggcgattactcgcttggcggcgagcagtccggccacgtgatcaaccgcgaattcgccaccaccggcgacggcaccctgaccgcactgaccctgtgcaacgaggtcgtcaagtccggcaagagcctgaaggagctcgccgccgacttcccgcagctgccgcagaccctcatcaacgtgccgaacgtggacaagaaagccgccgccaccaacaagcgcatccaggatgccgtggcccgcgaggaggaactgctgggagacaccggccgtgtgttgctgcgcccctccggcaccgaaccgctcgtacgcgtgatggccgaagccgccacccaggcctacgccgacgaagtctgcacccgcctcgccaagatcgtcgccgaagaactcgcgctgtagcacccttccctaaggaaaagcaatgtttggaaagaacgccaaagtcgacctcgaactcaaccgtgatgtcgaacaacttatcaaaaccggcggcaaggagaagctcctgcccatcgtgcaggccggcgaaccggtgttgcgccaacggacggtggcctaccatggccagctttccaagcgtacgctcgccaaactcatcgatacgatgcacaccaccatgctggaggcgcccggcgtggggctcgccgccacccagatcggcttggggctcgcgctcgccgtggtcgaagaccacgtgcgcgacgacgaggatgatccgcgcgaaatcgcggaattccccttccacgtgatcatcaatccgagctacaaacccaccagcgacaaaaccgcctcgttctacgaaggctgcctgagcttcgacggataccaggccgtgcgcaagcgttggctcgacatcaccgccgaatgggatgatgaagacggcaagcaccacagcgagccgttgcacggctggcccgcacgcatcttccagcacgagaccgatcatttgagcggcgaactgtatatcgatcgcgccgaaatccgttcgctgaccaccaccgaaaacctcgaggattattggtgcgacgacccggtacccaccgaggccgccgaagaactcggcttcgcactatgatcgaccgcacatggctggacgccgccaagggagacattccccaatgggcggcgtccatgcccaaagacgccgacggcaccaccattgactgggactgggtgcgttcgctggacctgatgcatggcatcagcgtattgctggcgcttgctgcagatggtgagcaatatggcgaaaccgcagcacagcctcagctcgggttggaccaaccggaactgacgccacaagctatccacgacgcattgaaggtcgattacgccacacgcgagcatctggaatcaatcatcgcccaatgcaacagcacattcatgaccgattacgatcgattcatcggctcctatcgtctgcctcgcgcgctcgcctacgccaatcgtcggctcaacgacaacatcaacacgctgttgcatctgggcgaacagcaacacctatgggtggtcagtcgcgaacggcgggggaggactaccgttgccgtgctcaggccgtactccggcagccgcccatcgaacgatgaccaaggcatgctgaatctgagcggtgaaaccggtgacgcatctgccggaaacactgctgccgaaaacagcgatgtcaagttccccacaacagtcgccttggacgatatccaagaccgtacggcggcgattcttgacgcacgcgccgaacgacgtaaggcccagcgcttccagaagcgtgcgggcgatgcggcgatggcccgcgccaatctctccggcgcgacttcgccgggtggtgccgcctcgtctggcaacgctaccggccaccatcccaagcccgactggcgcgacgcctatctgcccggccgcgacgtggacgcggtgatgggcatcgacatcgaaaccaccggcatcgatccggcgcgtgactacatcatcgacgtcggcttcgagttcatgaacatggccagtccgcgcccggccggcgaacctgagacatacgcctatgagcagggctattacgccgccggcgacgcctacggccagtcccgtctcgcttttggcgtgccgccggaaaacgcggcgctcggcaacgccctcatcgccaaactcaccggcatcgatgtacgcggccgcagcagcgaggccgggtaccgactcttcgacgaatggccccaagcccaggccggcctgctcgcgcggcttacccagcagccgtacgtggcgcataacgccaccttcgaacatagctggttcatgctgaacgtcgccggatacgcggaaagctaccgtgccgggcgcatcaccatcatcgataccctgccgatgagccggcagtgggaccccggcgcggtacccaccaacgagcatccttacggagacaacacgctcgacgcctacgccaaacgtcagggcgcgcttgattccgcccacaacgaacgccacttgggccttgaggattcgcacatcatgctggtggccatgaaacaccatctggcggcgctgaaagcgcaaaggaaagggccgtgggggcccgccggcagggctggcgtcggcggcaagtcctgcggtcgtaagcggtgagtacactattggtctcgtgagtaactatcaggacggccgacagcagcgtgagaaccgccgccgcaccatcgtgcgtgtggtgtgcgtcgtcatagctgtggccatgctcggctccttggttatcccggcgatctacgcggggctttgacgttgccttcgcatatttgtgcccgcagttgaacacgtctgatgcgagggattcgtgaggtcgcccggccggctatcggcaaggcaggccccggaatcttctggcagcatggattgcaggcgaatgcgtgtgtggcgcggcagtgcccgccaacgccagaggaatgtgcgaaggctgccaacaaggacgtgacttcccaaggaatctcaaagaaccaacagtaaggtaaaccacgatggcagaatttgactttacccaggcgatcggcgaagcccgcgccaaatacgaatccatcgccaaggcgctggacgtcgaccggctcaaggccgctatcgaggatctcgaaacgcaggccgcggccccgggcctgtgggatgatccggaaaacgcccagaagatcaccagccggctgtccgccgcggaatcgcagctgaagcgtctgaactccgcctcccagcgcatcgacgatgtggaaacgctcgttgaactcggccacgaggagggcgaccaggactctctggacgaggcacaaagcgaaatcggcgagattcagaaggatctcgaccagatggagattcagaccctgctcgatggcgaatacgacgaacgttccgccgtggtgaccatccgctccggtgccggcggcgtcgacgcggccgatttcgcacagatgctgttgcgcatgtacctgcgctactgcgagcgtaacggcttcaaggccaaggtcatggacacctcctacgccgaagaggcgggcatcaagtccgccaccttccaggtggatgccccctatgcttacggccgactgtccgtggagggcggcacccaccgtctggtgcgcatctccccgttcgacaaccagggccgccgccagaccagcttcgccgccgtggaagtggtgccgctggtcgaggccaccgatcacatcgacattccggatacggacatccgcgtggacacctactgttcctccggccccggcggccagggcgtgaacaccacgtactcggccgtgcgcatcacccaccttcccaccggcatcgtggtgaccatgcaggatgagcgttcgcagattcagaaccgtgcctccgccatggccgtgctccagtcccgactgctcgtgctgcgccacgaggaggaggccaagaagaagaaggagctcgccggcgacatcaaggccagctggggcgatcagatgcgctcctacgtgctgcacccctaccagatggtcaaggacctgcgcaccggctacgaaaccagccagactcaggccgtgttcgacggcgacatcaacgcgttcatcgaggccggcatccgctggcgccatgaacagcgccgcgccgccgaaaccgaggagtaaacagcattatggcactgatctcactggacaatgtgtccaagatctatcccaaaggcacccgaccggcgcttgacgacatcaacctcgatatcgaacgcggtgatttcgtgttccttgtgggtgcgtccggctccggcaagaccacgctcttgagcctgctgttgcgcgaggaggaggccaccagcggcgagattcgcgtggccggcaacgatctgcggcgcatcaccaaccgtcaagtgccgcagtaccgccgttcgctgggcttcgtgttccaggattacaagctgctcaataacaaaaccgtatgggagaacgtggcgttcgcccttgaggtgatcggtacgcggcggtccaccatcaaatcgttggtgcccaaggtgctgaataccgtgggactcaccggcaaggaaaagaactatccgcatgagctctccggtggcgagcagcagcgtgtggccatcgcccgcgcctacgtgaatcacccgcagattctgctggccgacgagcccaccggcaacctcgacccgaccacttcgctgggcatcatggaagtgctggacgccatcaaccgcaccggcaccaccatcgtcatggccacgcataacgaagagatcgtcaactcgatgcgcaagcgcgtggtcgaactgcacaacggcaagatcgtgcgtgacgaggctcatggctcctacgattccgccctgttcttcccggatgccgaagtcgaagccaagtccgacaccgcccatcatgtgctggcggcggcgaccaaggccatcgagggcagtgacgagccgtctgaaggcatcgcccgtttggccaattccgtgcattccggccgcaccggccgctatggcgagacgtttgcgccgctggaagacacgctgacctggggcaagggcatttcgttggatgagcaggccgccgccctggaaagcacccaggcgttcgacccgttcaaggacgagtccgccgcgaccgccgcggttgccgatacgtccgtgtcatccgccgccgagccgccggccccgccggagccgcccgcaccgccggaaccgcccgcaccgccggccaacgagcagtccgccgacgagcagtccgccgcagaccaaacatccgacgatcaacccgctgagggcgcgaaggagtaagggggatcatcatgcgagcacgattcattctgtccgaaacgtgggccaacctcacccgtaacctgtcgatgctgctgtcgctgacgctggtcaccttcatctcattcctgttcatcggcgcttcggtgcttactcaggcgcagatcaccaaagccaagggcgactggtacgacaaggtcgaggtcgtggtgtggctatgtcccgacggcaccagccagtccgcgaactgcgcttccggcaaatcgccctcagccaatgagatcacggcactgcagaaaaccattcgcgatgaactcaacgacgtggtctccaacatcgactatgtcagcaagcaggatttctacgacaacaccttcaccaagcagtacccgaacggtgaattccaaggccgtacgctgaccgcggacgatatgcaggactccctctggctcaagctcaaggaccccaccaaatatcaggtggtctccgaagtgctctccggcaaggagggtgtggaagacgttaccgatcagcgccagatcttcgacccggtgttcgccgtgctcaaccgagccacggcggttacggctgtgctcgccggcgtgatggtggtggtcgccatcctgctgaccggaaccaccattcgtatgtccgccgcatccagacgaaccgaaaccgaaatcatgaggtacgtgggtgcctcgaactggacgattcgtctgccgttcattctggagggcaccatcgcctcgctgatcggctcggtgctctcgtgcctgatgctttcggctatcgtcaacgtgttcgtcaccggctggctggcgaaatccgttacatggattccttatgtgaatcagctcacggtactggtgatatcgccgttcctggttgtgggcgcgatactgctgtccatcatcgcttcaaccatctcgttgcggcgttatttgagggcgtaacgcgaccggcttacccgcgagaaatgtgatgacatcgtgtgcaagcctctcaggttcgcatgttatggtattggcttaagtgagcgaaaggactattcacatatgacgaacgtacgtgtgatcaagcccgcactggcggcactggtggccgccgcagcctgtgtgggaggtctggcgttcagctcggcacagcctgcccaggcagacacctattccgacctgatcaatgcgcagaaccagcacgccgcgtcggtacagcgcgaggccgaactcaagcagcagctggccggtgccagccaggacctggcgaataaggtacttgagctggacgatctgaccaacaacaagattgtcgccgcgcaggccaaggtcacacaggccaacgaggatgccgccaccgctcaggacgaggccgacgccgcatccaaacgtctttccgccgcgcagaaagacaaggagacgctcgaggagcggatcaagcagaccggcaaggactacgatgacgcgcacgccgccgtggcccagctggcccgtgacgagatgcacggctcgaatgcttccgacgtgatgagcgtggtgacgggtgccaccagcacacaggacttcgtcaactccatgcagtcccgggacgcgttgtcccgcaacgaggcgaatgcggcttcctccgccgcgacctcactgagcacgtcgaagaaccgtggcgaacgtctggcggccatcgaaaagcagatcgctgtgctcaagacccagtccgatgagaaggccgcttccgcacagaccgccgccgaaaccgcgcaaagcgaacgtgacgctttggacaagctacgccaggagggcgaaacaaggcgtgacgaactgtcttccatgatcgacagtctggattcccaatccgccaagcaggcggcccagaccgtactgatcgcttcccaggtcgattcctacaatcgtcagtaccagaaggaacagcaggacgccgccaaccgggtggataccggtaaccagggcggtacgccgtctactccggtgacccccgctccggcgcccgctccggctccggctccggctccggctccggcgccggcccccgcccccagcgtcggcggccaaggcacgtcgaacggtgattacggcaacgcctatgccgccggccagtgcacgtactgggcgtatgaacgccgtaggcagatgggcattggcacgccgtcctatctcggcaatggcggcgactggtggcgcaacgccccctcgtacggcttgcgcgtggaccacaaccctcaggtcggtgcggcgctctccttcctgcctggtcaggatggtgccgacggtacctatggccatgttgccgtagtcgaagccgtgtatggcgacggcacattccagatctccgaaatgaactggggtggtccgtggaacatgcacgaccgcaccttgaccaatttgggtcagtactggttcgtccactgaccggttggttcggccgatatatgcggttgaagggttcctcttgaagaggaaccctttttcgtattcgaggccggtccgtgatatcgtcggatgttgcgttgctacccacgagttgctactcacgagttattgcccacgaaaggaggagacatgcccaaggaaaccggtgagaaactcatcgtccagaacaagaaggcccggcatgactatgccatcgaagacaagtacgaggcagggctggccctgaccggcaccgaggtcaagtcgttgcgcgaaggccgcgcatcgctgtccgaggcgttcatctccatcgaccgccgcggcgaaatgtggctggagggcgcgaacatccccgaatacctgaacggcacatggaacaaccatgcgcccaagcgcaagcgcaagttgctgctgcaccgactgcagatcaccaagctcgcccgcggcatcgaggccaagggatacacgattgtgccgctgagcctgtacttcaaggacggtcgcgtcaaggcggagatcgcgctggcccgaggcaagaaggaattcgacaagcgccaggccctgcgcgaagagcaggacaagcgcgaagccctacgcgccatgcgctacgccaacatgcgccactagtcccgcctcttggctcccctccggaggggagccaagagtaggatgtccgcgttgtgggtcatttcgcccacgattaacgcttccgtagcattgcactcctacgctctggaaccatctgggaaacatacccgcccagctgactatccggagagaggaaatccaatgtctctaagcaagggaatacaatccgctgcggccgccgccctgagcgcggccatgctgatcgccgtggcggcctgtggcacgactgacagcaccgacaccgcatccaagagcggcgattcatccaaggactcgtccagcacttcgattcaaggcttcgacaccagcagcatccagaaggacgacgagatcgccgcactgctgcccgattccgtggccggcgacggcacgctgaccgtcggcgccgatacttcctatgccccggccgagttcctggccgaggacggcaagaccccggtcggctttgatgtcgacctgtccaaggcgctggccgcagtgttcggactgaaggaaaacaccgtctcctccacgttcgattcgattatcccgtccgtcggctccaagtacgacatcggcatctcctccttcac

SEQ ID NO: 3303 - DNA, 32915 bp, Unknown
  R151_18m  MAG No. k141_5612
aatctagctggttttccgtcgccccgatttgctctggtcagcgtcggggctttttcgtttataactgcattgtaattgcactcgaaagtaaaagtcaaattgcacagcgagtaaaattgcaaaagagaaaatagagacgtttggtgcaattgcgattgcacatatataagactctacaagttttaacattctttttataaggcgcaatgcgcaggaatgaataaaagatgccggaaaatcatggttcggccaaattccatgcccaccggctcgcacaaaacccataggcgaacatgactcacggcagtctaaggcaatctaggcgcatatataagagaggcggagccttgcattgcccggctccgccttgtccatcgtgtcagcaaaggacgtcttacagtctagtgcgcgacacgcccgacttgattattaccactgtagtagtaatattaatcatgtcagcaaacgaaaggacaaacaaaatgagcaccatcatcgaccaggacggcaaggaaatcgactacgccacggcggtcaacctcatggacgatgggatccgcgaggaactccacgccgagatggcaccctgcaccgaccagcggttcttcgacgcctacatcgaaaggcactacgccaagtacggcgaggatttcaccatctgacaagcacggcggtcgcgccccctcgcggggcgcgtggatcgaaacaagaccagcccggccccacccgggccgacaccgatccaagacgggagcatccgacatgggacatcgtaacggcaaacgcctacgcctcataccatcacacctgccgctcatacgcgacaggctcgcgcagacgcagaagaaacggctggcgcgccaatacgacgcgatgccacagtaccgcagggtcatcgccgacgcatgggacgaggccgaccagatgatgacggcgcaactatggtggatcagccgcgacatggcaaaactcgcggcagacaccgcagccgtgggcgactatccgaaaaaccgccccccggccgcaaccgggatgatgatcatcgatggcggcctgccggtggacgcctcgccggtcggctttcggacgagcgtcgcggggttcttctgggtcgcgcagcccggcgaaacggcagttttcccgctgacctgcgatacggcgacgctcgagaggaccggggcggcggaagccgggctcccggtcgccataatgcccttaaccggagcgttgccggacgccgtcaacgcgagccccgccctacagcaggcgtgggtcgatttcgcgcaggccgtttgggcgttgagcgaggagacgcgcatatgccagtcaaagccgggcgagccgagcgccgcgcacccgctcccgtcgaggttcgacccggagatacgcaaggtcaagatgctggtgctgcgggaaaacctccaccgtcccggcggaagcgccgacggcgacgagcgcgtgcggcgtgaatactcgcatcgtttcatcgtgcgcggcttctggcgggaccaggcgtatgggccgaatcattcgctccgccgacgccagtggataccaccatacgtcaaggggccggccgacaagccgcttgtctgcaaggagacggtgcgcatatggagacgttgaccgacatgatcgccggttttctcgccggcctgacgccgggcacaagggcggggtatcggagcgtcgtatcacgatggctccgctggtgtgcggataacggcatcgacatgctgcgggcgacgcgcacccatatcgaggtgttcgccgcctatgacggcggcatgcggccagcagcgaaaagcacggtgtacaggaatctgagcgtcgtttgctgcctctaccgctacctttgcgaggagggatacatcgactgtgatccgggcgagcatgtgcgcaggccgaaagtgtatggtcattcgggtggcacgtatctcacccgcgagcaggctaggctttttcttggcgaagcgcgtggtatggatgcgcggacggatgccttgtgcagtctgttgctgttgactggtgcgagggtcggtgaggcgcttggactggatgtcgaggactgtcatctggatgacgggcgtccgtgggtgcggttcgaccgcaagggcgactggtcccagcgtgtggccattccctccgaggcgtccgacgctctcgcacgacttatcggcggacgtaggcgtggtgcggtgttccgtgaggattccggcgtgcgtctgcggcagcagaccgccgtgggcatcgtatcgtccgtggcattgcgtgtgggcgtgccggatatttcgccgcactcgctgcggaggacgttctgcacgctctcccgtgacgttggcgtgccggacagggacatcatggccgcaggcgggtggaacagtccgcagatgctcgactattacgacatgtcccgtcgcgggctgaatggcaaggctggcgacggattgcaggattacctgggcaaggaggattgatatgggtttgaggtcgatgcgcgagggcactggactgtcgcagcaggatctgtgccgggcgattgggagcagtaccgtggggcgtgtgtgggcgtgggaggcgtggtctgacagtccgcgtccgaagtcggcgcgcgacccgcatttgatggggttttccacagccaaggcgctggcggacgaattgggtgtgacgttggatgatttctgggccgggctgagtggatgacgcgacacgcccgacttgattattaccactgtagtagtaatattaatcatgtcagcaaacgaaaggacaaacaatggtcaagctcatcgacaacaacaaggcaatcgagaccggcatccgcgagtgggatatcgaagacgtttgggacgacgaggagaactgggagctcgaaggcatcatggacggcatcacgtccagcatcgaccgcgaccaagccgtcgatgaggactatcacccaatctacaacttatacaggtttagcgagatcgacggagataccacggtcgaattcacggcggacgaagtggcacggtttgccgaggaatggtgaccatgacgcgcggcaaacaggcgacttcgcgctgaatacggcccacagtcgaatcagtttgttgacgtgacggaactcgaccggagcgcatacccgaagctgtgaccgccaaaaacgcagaaacgcccctcccccagcaatgctgagagaggggcgatgtttcataagggtgcaaaatattcttttatgggttattcatgcgatttttcacacctgagtttgatttccgggcgtgagtttgagtttcacgcccggaaattaatcagttttggcgaagtgggttgtatgcgactccgaatccgccggcgatgatgcctgcggcggtgctgacgaatccgccgatgtcggcatgtccgaagctcatgaggcccaagccgaccacggatgcgatcaaagcgacgacgtagatgatggtgcgcacggtatccgggaacactggcgtgtatccgtctgcgtgctgtggttcggtgcttgtcatgtggtcaatcctctttcttgcttgtggcggtaacggtgatgtccaaggcgtccagtttggctttcacggccttttccacggtggccgcgatgtcggccgggttggttcccaacgccttggatagcgcctcgatggcggcggcctgtgcggtgacggtggcgctcatttcgcgcacgcgtttgtcgatgtagcagacgcgcgtgtaaatgtcgccgctgctgccgtccttggtgccgccgtcgtcggtgcgcgtaaggatgctgtacagtttggcggtgtcgtggtgcatccagctcaggcgtatccacgcgggcagattgtttttcccgggcgtggcgtcctgtccaataccatagttccaaacgtctcctgcgcttgtcatgtcgttacctcctaatagttggttggctttgttgattacatagttgacgtcaaggccgttgacggccttgtcgggacacccgtaatggtcggtgccgggtatctcgcggtgcagccacacgttgccgttgagcccgtcgtaccacaggcggccccagccttggcggcgggcgatatcggcgcacaggcgggccgaagcgtccatgcacgcgcgcgtgcaaggcacgccggccatgccgccctcgtgctcgatgctcaccgtgctgttgttgctcgcatagttcgcatcgctccaactgccgtcgctctcgctcacgtactggtgtatctcgccgctgcctccgatgccgtagtgggccgaagcgcctccggcgcgttggaaaacgctgtcggtgccggcgagggtgccgaccatgatgtgcaaggtgatgtggcttatggcgtagccgttgcgcccgttgtagtggttcgggctgccgcgccatcgcgcgaaactagcgcctgtcatgctctttgtccttcccgccccgagtcaaggggcaatagaaaagccatcccgaaatgggatggctttgaaaaccggtgtgaaaatcaatgcctatgcgcgccgtgattgaacatgagaactagcacgagcaacagcaggtatatgcctgcgatcgtgagacgcgtcactgcctgtcctccaaatatttttcggcggcgttgacgacccagcattgcgcgtcgagtttttcgagcttggcaagctcgtatcggacggcctcgctgtggtcgtgcgcttggtcgccgtagatcaggctgatgatcgtgttcttgatcgtgtcgcggcagagctcgtccaaccggccatcgaatttctcggcacgctcgccgagacgccgggtcttggcgaaatgctgcgagagcggcgaatcgtatggcaggcgttcgggccgcacgtgcgcgtacaggccggtcgccaacgcgttcaaagcgcccggccatatcctgagcaacagtgtgatgagcgcgcacgcgccgcccacaccgccaaaaccggctagaaatgtctgaaacacattacgtctccttaaaaaatcagttttgcagtggcatgagaccgccgtacagtgcgtccatttttgggacgagcttcttgtattccttccaatccgcttgtgtcatcagattgattgccgagaatcgcagcggatgattcaacggacacttcaactggagggattgcatgctgtccatatgaaaatcaaaaccaaggaacgtgtttccgcctgtattgtcatgaggcaacagaactccaccagtccatagtttgttggctacgaagcagataccattctcataccatctgctaccttccggcacttgggaaacccagaagttcagatggagatcaccggagaccggttcgcccagtaggatatcggcactaggattgacagcgccgctgttcggcgtaacgagtatgccatcagggtcaacatgctgcacggtcgcctcgtatgtcgagatggcactgttcgggagcatgaggagtggatctggaatcagattcgttatccggctcatgccaccacccccgtgagggtcaggcgagcggcatcgtattcccggtgaaatatccgatgctgtcgagcagggtcttgttcgcctgatattcgtcccacgtgcagatgagcatattggtcacggtgacggtcggactgcctgacttgacggaataatacattgacatcggaccggcaacggtggcggtcaacgcgtagccgacacgtcggctcgccatgacgtcgccataccctctcatcgagatagtgccaccggtgacgttcacataggccgtgacccaatatttcacccctagcttgttcgggatggtcgtgatatccacccacttgtcggctttcagggcgatggtcgaggatgggcacgtgcataggttcgttatcatcatcgggcatcaccatcccggtgcgcggcgtcagccgagtggcatggtgtctcccgtgaagaagcccggaagcccccccccacggcattgtcatacgtgtcggcacgttcgatgaggatatcgctcatcatgcctatcgcgccgaccgtcgtggtgtccagttgcaggcggacgagcatctgatcgcagccgtccggaagggtggcggtctggtccaccgtgacggtctggttttggccgaccgccgcgtagatcagttgtttatatgagccgttaatacggaagaagacttgaaaaccggcttgggctatccgcgcgtaggcaagggcgtgcacgtggtacgagccggccggtggaagctgcgagccgaccagcatatattgcgcaaagttgtctcccgtggcggtgctggtcacacgcagccagttgcggctgttcaccacgaccggatattcgacattcgttttgttgttccagatgggttttacggtgccggtgatgttcgggtcggggaaccagttaatcctctgcatgattctccttgtcgagactgtcgagcacatccttcgggatcagtttcatggccgccgcgagctggctggacaggatcgcgatctgtttgttgagtgtgccgatctgttgcgagagctggtcgatgacggtgttcgcgtcggctggaatctgagtcaaaataagtctccttcgaaatgcgggacccccacaatccaatcggattgcaggggttgaaaaaacgggtgaaaagcaggggttagtctgcggcggtcatcgtgtcgatgcgggtcaccgtcttcaattcgtccacagtgagcgtgcggctgagattcgttttcacgtccgtgaccgtcacgttcacggcgtcaccatcgaacgtggcgagcacgccgcgctggtagtcgcgccatgattcgcccgtctggtcggcggacgaatactcgaatccgagtcggcacagttccgcgcgcaggctttccttcggcgggcgcaggtcgagcacgccatccgccgccggtcgtgcgccggattgcgtggcctgtccaccggacccggtgtcgtccgatcgggcttgctggacgtcagatgctgtcatgattactcctttgctgttgtgttgtttgcctttttcgccgggatggcgtgtggaatcccacgccgtcccggcggagtcgatgcgcgtggccgtccccggcccgcgtcaacgccgatggtcggtcagataatcgatcgactgtcggcggaaccggtcgcgcgccacggcgatgcggtcggccacaccgtccagcgtgtcggcgagacgaccgtccgcatcctccatgacgggcatcgcgtccaatccgagcaggcgacgggtctcctcgcgaccgtccggcgacaacgcgccggacgccgtgagcacgggatgcaacgcggccatgcgcgtctgctgacggtccgccaactcgtcgcgctccacctgctcgtaggcgctggtccaagcgtttcgtccggtggccgggtcgatgacgcccgggtctgacccgttcgaccggacccgtatgatcgccgcgaccgcttccgcgtccgtgtcgcagccgaggagctcgccccacgaggcgatcgcgtccaccgggatgagatgacccgtcccgtcgtcacaggtcacggccaacacgtcaccgtagatgttcgcttccatgaaacctcctaccgttcggacaggatggcgagtatctgatagccgtatgggattctgccgccgttgccggcgccacgcacccacaggccgcagccgctcgccgaatcggcattcgagccgaccatgaccggctccgaggcgtcggcggagacatgcgcatggtataagccgaatttggccggggaaccatacgtgtacgtctgcgttaccacccctccaccgttgaccactccgccacgaggatgagaagtcacgaacgttccacgcccctcgctgagcaggccgaggaacccgccgaggaacagatacccggagttgatgtccgcccgtacgccgacactgccgttcggatctgccgctgagagttcggcgaatgtatggtatttgaccgtcgggtcggccattaagcgcagttgcgcgtaaccggcctggttgcctttggaataatccctgtaagtggacaggaaggcttcgccgattttggtggcgttgtccacagccttgtattcgcccaaacgcatgaacgaccccggatcggtgtctctcatgcggcctccgttgattacgatggtggagacttcgcctttagatttggtccgggattccgacgcgatgtaggcatcgcgaccgtcgcgcccgtgcatgaattcgatgcccgagccttcggtcttgtcatcgctgttgataagcgactgtcggaacgtcggtgagattctgattcgacggccggtgaggctcgtctggaacgtgccggtcagcagattcgacacgccctcgccgtccagatagacggtctgggcgtggttcgaatcccacatccgcaggcccgtcgaattgagtttcacgcccgtgttctcggcgtcggagctttggaatatcgcgccggtgaacacataaccatggaactggcctgccgccaccttatccgacgtgatcgttccagccgcgatcttgacagcagtcaccgcgtttgcggcgagcttgtccgtggtgatcgcgccggatactatcttgtcggcgttgaccgcgttggcggcgagcttgtcggcgttaacgctgttcgcggccagcttgtcggtcgtgaccgcgccggccacgatgtccccggcctgaatccgatgcgcgttgagcaacgcgaccgtcatatcctccgtcacgcggagcttcgcggtcgtgaccgagttcgcggccaacttgtcggtcgtgatggcgagcgagacgatgttgcgcgcctgcacgctgtcggcggcgagcttcgcggcggtcaccgcgtcggacaccagcttgtccgtggtgacgctgtttgcggcgagcttgtccaccgtgatcgcattggccttgaccttttcggctgtgaccgcgttcgctgcgatggtcttcgcgccgaccgtgccggcagccagaatgttattggccacgaggtcgaatggcgtgaagcgcgtgccgtcccacgtcagcacctcgataacgcggtctgtgagcggcacgagcacggacgggctggcgttgggagcgccctgccagtacgtgtagaagtcggcaagcatggacggcgaattattcttctcgccttgccagcgcgtccaatacttctgcgtgcgccaccacatgtcaccgggcttgagcccgtcgtgggacggttcgtccggcccacggtagatgaggttcttgccgtccgcggtggtctgcgccttcttggcggcggcctgcgcctgattcgcctgtgacgcggcgttggcggctgtgatctgggccttgtcagccgttgattgcgccgtctgcgcggcggcatgtgccttgacagccgcattggccgcatccgtggccgccttgtcggtcacggccatccaaccgctgccgttccaccgtttcggcgtgttagcgccattcgtcgtgtcgatccacaaggtagtcggcttgcgcatcgacgcatccggagcagtggattggatgagcacgtcggccttgccgttcgccacgccagcggcggcggcagcagccgtattcgccttctgcgcggcattcgccgcatcggtggcggactgggccgcactgtcagcggtggctttcgcttgggtcgcgacactcgaagcattgactgctgtggacttggcggcattggcggactcattggccgtgttcgccagagtctgcgcattgccggccgtcttcttcgcgctttcggcggcggtctgcgcggcattggcggcatccttggcctgacctgcggtcgcggtggcgctcttcgcggcggcagtagcagcattggcggtatcctgcgcggtcttggccgcaccattggccgtatcagccgtgccctgcgcgtttttcgctgcggcagccgcattctcagcggccttcttcgcgtcggtggtcttcgcggcattatccgcgatgtcggacttggcttgttcgatctgccttttgttgtcctccacgtcggcatagcccatgtggttccacttggagccgtcccacacgagcgtgtcgataacgcggtctgtgagcggcacgagcacggacgggctggcgttgggagcgccctgccagtacgtgtagaagtcggcaagcatggacggcgaattattcttctcgccttgccagcgcgtccaatacttctgcgtcttgagccacaggtcgccgacgatcagccctttggaggcgtccggcatgtcaggcccacggaaggtatggttcttcgagtgggcttcggcatacgcctgagccgccgactccttcgccttcgagatctcgccgttcgccgcggtcaggtcgcttttggtctgcgcgatgtccttccgggcctgagacagatcggccttggcctgcgtgagcgtctgattcgccgtgtcgagattcgacttgttggcttggatatccttccgcgcctgatcgagcttggccgtattgtccttcaacgccgtcttgttgtcagccaaatcctgctggattcgtttgacctcttccggcgagaccgccgacgcgaccgtcaccgaggcgatggccgaccagccggaacggttgcccgcatgatccacggacctcagcgcataggagtgccgggaaccggcggccagaccggtcacaagataatcgcccggaccggactgggtggcgctgatgacggtcatgccgtccgcattgacgccctcgccaacctcgatatggtcgaagtccgattccatctgagcgccagtgcttgtcctgccatcccagtggacagtcaccacgccaagctcagacgcgaggacgggcttggatggtacggagcatggcgtcgtatccgactccacagttgccaccacgacggccgaccattcgccgagcttgtccgaatacgtcgggactgccctgacgcgcacctcgatttgcgtgccgcaatccaagccgccgaaaccgagctgagtcttatcggtggtgccggcggaatgccagggcgcgccgtccacgtgcttgcgccactcgacggcgtagctgccaatctcgatggccgtgtcattcgtggcctgcgtgaccgcgctccacatggccgtagccaatccgtgcgcgaaaccatccgaaccaatgtaggcgtcggtctgcacgatcaatccgagaggggccttcggcacgcgatggtcacggtcggacgaggcggtcgtgccgccctcactaccggccaacgcggcgccgccggtgatgcccttgatcttcttcgcctgtctgacggatgcatcgtatttgatgtcgttcaatgcgatgctggcggatagtccctcgccctgacgcatcgacaggtcgatttcctgcacgcgcaccttctcgccgtggctgacggtgggtgctgtaatccaatcgccagcgtgataatcgacgagcggcagactgtccacgtcggaaacgatgagatcgcgcgtgtactggccgcgtaccctagccgcatcatccaaagtgctctgcataaaggcctgagcggtgtccttgtcggacacgccgccctgcgagctgtaggattcccacttgccccaaggcgtcggcgcgctcggattgtccatgcggaaaagcaggttgttgtcgccctcgacgaggatcgtggacgcgaggtcgctgatgctttcctcatacggggcctcgccgatgtcacgggcaagctggagtatgacctgcttgcttagatcacggctcaatgcggtgctgtcggcgttccacagtttcaacatgcgcccggacgtgcgccagtcgcagccaccgccattgaccagcgagctgagaatggtctgcaggtcggtgcccaaggaatagtaaagcgtgtatttcctcgcccacgccgcgccgcccgcgtccttcgccgtgtcgaagccgagcgtcagtccggtggccacgccgccacgctgacggttttcatcaagcatggttttgaggatcacacccggattagagctgtaaaaaggccttttgcccttgttgtcgccgtccgcgagcagatggctggaatcattgttctccgcctttgacagcagccagctgatcgactggccggaataggtgacggtctttgtacggtcgtccgtcttgccgctgcgcccagtgatgacatagcgggcgttatccggctcgcgatagccgtttccatccgacacctccacggccacttcgaggccatcggtaagctctcggtcgaacgcctgggcgtcgccggaaagcatcgagtactcgatcgaaatggcgccatcatcattgtgcagcatggacgcgttgaagctcaccggctccgccaatacgccgattcgctcgccgaaaggccggtatgccacgagtcgcgcatgaagggacttgctcattaatcactcccaggattgcaaaaaccggcatgtcaccttgtccgtgccgccggtctgtttgatggtgatgcgatagtcgccggaatcgatcgcgggccacacctgcaacggttcggtggtccagtcgacgccgccagtctcatccgtgccgcccgaccatgcgtcggcattggccgccgtccacgccttgcggttggccacatcgacgaagaggtaaggacgcgaggcgtcacgtttgccattccacaccagattcgtgccactcaccggatctgaaatggtcacaccagtggcggcaccgaagcgcaataccagcgtggtgatcggcgcgtccgacagccaaccgtccggcaggatgtcgaaaagcatggacggcgaagcattcggcaacccagtccagcgagtccaataccccttgccgctcggctttgaaaccccgcccggcagcagcctgccacccgacgcggccaacgtcacctcctgccactgcacgccacgccaaaacacatccggcaactggaatacggcggtcgctgccctgtggtcatcccacggaatctcgtcaccgtccggctgacaggacgtgcacaccgcgctagcggtcatgctccgcgtcaagccggagaacgtgtcacgctccacacgcgtcagcgacgaggccaagcgacacaagcggtagaagcggtgcatcagagtatccgcatcaggcccgtccgtgatgaatttgagcgtgatttccggcgcgtcgaaagccaccgggccagccggaagcatcacaccactcctgccattcacgctgacggaattgatgcgcgggctgatgctcgtgaaatgggtggtgccgacgatcaaactcgaatgctcaccagtcagctgctgaccattgatgagataatccgcgagaatcattgcaccaccatttccgcttgtgtgtcaccattgcggcattgccgccgtctgcaatctttgctgcgtgctaatgctcgttggagcgatcgcggggtaattaaacgtctgcgtcacatacgtagcaccggcaccgccattgctgacattcgcccgaccagacttcgacgcatccacatcgaaaccgccattgatctgagcattcatgccattgaccgtgcgctgcacgtctttccagccagccttgaggctcttatcaaagccctgcatgatcgcttgaccagcaggcttcaacatgaccttgtcatagctgagcggacccttatgctggacaatccagtcaccgataccgctcacaaagctcttcacttttccgaaagccgccttcagaccatcaagcagaccattgatgatgctcgcgccagcgttccacagccacgtgccggcaccggcgaacacgcccatgatggcactgccgacgccgcccaaaaatccgagcacgccctgcacgacaccatgcacgatctgactgaaaccgttccacgcctgctgccaattgccgtgaatcaggccggtcaccagattgatgacaccctgaatgacattgacgatgccattgaccaccatcgcgatgccattgatgaccccctgaatgaatggcagcatcgcttggatggtcggcagcaatgtcgagttaatgaagccgacaatcgcggaaatgatggtggacaccaaaggcgcgagagcctgaatcaccggcatgagcgcctgaatcacagccatgacctcattgatcatggtaatgacgatcggctggatgccttggatggccggagtgatcgccgtgatcacggaggtcaccacggtcagaacgccctggatcaccggcaccaaaacgcccaccaaggtggagattatcggcgtcagcagcgggattatctgaccgatcacattcgtgatcaccggcatcacggctgccgtcaattggcccaaggccgtcatgagcgcctgaatcgacggctgcagcatctggaatgcctgctgcaggctggctaaaacgtttttcagcatctcgccgaattcgctgcgcaattgcgggctcgtggcgatcaatcctgccagagcgccaatcaccagcgtgataggaccgccaagaccggacagcacgccgccaaacttagacagcaggccgccaatcaccggcactccactcaagccgctcaaagcgccaccaagaccagccgcgccaagcaagccggtcactgcggcgatgggaccggacaacgagccaaggctattcgacaggccgctgaaatcaatcttgccgatcttgtcagcgaccacaccgaacaccttctccagcggcgggccgatcttctgcgccagctgagcaatcttgtcaaacagcgcggtgatgagtggttcgacggcctgcaccatcttgatgaccgcgccgccgacaccaccgaaagccgcgatgagatcattgccgacagaagtcttcaacccggcgatctcatgctgcagtatcgtcatcttgccctgcggggtctgcgccaaggccttgttgatgccgccgaagttggcttccagcacctgcgcggccatggctgccttctcggacgcactgccctcctggaggactttcttctgcgcgtcggtcatggtcacgccatacttcgacagtgccgtggcgttgccggtcatgaccttgccgagcaggtttgctatctgcacgccatcctgcgccgtggcgttgtatcccttgttgttggcgatcatgtcggccagtgccggcgtcaacgtcttgacctgatcggctgtcagcgcgaaggtgccgagctgcgcttgagcggccttgagagtgccggcggacacgacgccggtctgtccaagcgtcttgttcaacccgagcagtgacttctgctcttcgtccgcccaattgttgttcttggcgacctgctggaatttcgcggtcacctcttcggccttgagcgccgcatcgacggactggcgtccgaagttgacgaggtatgcggcagctgcggtggccgcgccggacacgacggtggccatgcccttcgctgcattgccgataccactcacggccttcgaagcgaaaccggaagccttgctcaaccccgaatgcaacgcgttaccggccttcgcggcagcattacgcgcaccctccggcaaagcattccaagcagccgaaaacttctccttgatgttggacgtgaccgcgccagccgtcgaactgatattccgcactgcggcattcacgcctggaatcttgccgacgatttgctgggcggttgaagcgaagccggaagccatacggtcgaaagcgttcttggacttgtccgactctgcggccaattgcgtttcgaggtccttgagacgtccttgtgcagccttgagattgtcggaagccgccttgagattgtcagccgccaccttctgccgaatctgcgcctgctcaagtttgatggccgcagcctgagcttgtgtgctgtccgctccatatttctgtgtggccgcgttcagcttctcctgcgcggcctgcacctgcacgccggcagccttgaatttcagcagcgcgtcagtattcttctgcgacgcctgcgccacatccttcttaaaggactgcaaggcttgcgcgtcaagctccttcgcgccgcttttgaaaccatcaccgaaggcactgcccagcttcgacccttgcttgccagcgtcgaagcccttgccaaaggccgtcttcatgtcgccgacggctttgccggtttctttcgcaacgttctggcggaagcccttcatctgcgggaaaatgctcacatgcgcggaacccagctcgctaccgccagccatgacagcctcctctattcacttgtctttttgaatccgaagatgctgctcatcgactccaaagccgtccgacgctcctcatcggtcacttcgacgtgctttccaccagctctttcaggcgcgaggtcaccaagaatcgacgtgccaccagcctgaatcgcggtgatgatggccgtcgcatccatcggcagcaccatatgcacggcagacatgccgcaatacgtcgacggatcagccgaaaggctctcccacaaggcgatcgcgtccgcgaaacggagtctgccgcccaagtcggcctgcagactccatccacgcgccgcgaaatcagcccttattcggtcgccgtcttcccctcggaggagctggcagaagccgacgattttcccaaatcagcgccctgcaccttggcaatgatttcgccataagcgttgaggatgttcatcggcaccatgaccggctccttcgccagctccttggcctcctcctcaccagcgaaagcagtcagcatgtccttcaacgtctggatctgctcaacatccgacttaatgtcggacagcttcacgaaatcatcaatcgacagcgccaagggcagcttgtaaatgtggccatgcggtgccaaaaaccatacggagccgtccttgatgagatgcttcacgtccatctgcgtggcgacagcctcaagcgccttgtcctcatcctctgcagtccatgcgtcgaagtcggcggcggagggcatcacattcttggtcatttcttccttctttcaaacgactgtaaaaattcctttgctccactggatgaagaggaagaatcccagcacatgcgaagaaaggaagaaagaaacacatgctaggaagaatcaatgtcagtcggcgaccggctgagactcggaatcatcagcctgatgatcgctggtatgaggaccgggtgaaacagtcggagtcacgaaggactccaaatacttgctgttgccggaatcgcaggcgtcatcctggatccattcgatggtccaggcgtcgccggtgttcttgcctgcggtctcctccccaggctcattgccggtcagattcacgacacccagacggcggcggtgcgtgccgtttttgaaaacggtctccttgtagcagaaccacttgccgtcctgaatgatatcggtcacgtggtagacgccattggtgtccggcgtcccgatggtcatctggcgcgtgatgctgttatcctcggccacggtgaactgttcggtcagcgaagccttgccattaatgctgtagccgggctgatggaacttgatcgcatcatcggcatcacgattgtcctgcggtgcgccatcctcggtgataaggccgacgaaaccgcctttgctgaaaatagtgtccaagctggtcttcacgtcggccacggtcggcgcgatgagagcagcgttcagcgtcttagacgcgtcgtagggcgcaaaacggtaggcgcttgtaaccacgaccttcgcggcgctaaggtcattgccagctgaatcagcagccatatcttgtcctttcaaacaaaaaggcgttgaaacacaacgtttcaacgccttgaaaattcagaaaaacttaaattattggaatgcaccaatagtggagaattcgagagtcagatagcatctggcgatattcgcgtcctcggccacgaaatacgggccattgcacccgtcctcttcgattgccgctatcggagaaccgtcaagctcgcagatggaggggtcggtgagcagaccgtagattctggccgccaggtcacggcatggtttcggagcggcacgagccccgtagcgcacggtcacgccgacgctccggtcgaagagcacgcgattcgactgcgagccgccatcgtcacgcaccacgacgagcggtcgtgagccgtcgtaatcgtccggctcgcgattcgaaacgatgatcgtcgggaaagacggcttaagcctggcacgtagaaaagagcagatccacaattcaatgtctggcggcaagaccatggtcatgttttgcctgccttcaacgccttgcggagattgcccgtcttcgactccacgagcagggtcttcttgtcggtgccgaccaccatgcatgtggttcgatgctcgtgcttgacctcctcgatctgcaagccatcacggtaatctccgctgtccaccggagcatgtgctttcgcatattcgagcgtcttctcggcggcacgacgggtcatggccttgacgccagccgaatttaaaatctcgtcaaaatatctgtcgttgaatttgaccatcactcccaaaagccgtcaccccctgtattcggatagtggaatctcgatcgtcggctgccatgatgtgaaagcattcgcgtcacgactcggatagccgctgacctcccaacgtcgcccgtcatccggcaacgcctgaatcctgtcccccggcatgatgtccaaggacgggtcaggagacgtgaggtaagccgtgctcgtggtctgctcgcgtagaccgtcgggcgtgcgtgtgctgctggagctggcgagagcgccggtgaaatccaaagtctccggattggaccagtcctcgccagcctgctcgccggaatacgggtcatcgactttcctcgcgcgcagtcgccgccatttggtggtgcccggcatgctgaaggacgagccacggccgagataatccaacgcggaagtcacggcttcaccccccacgacaagcggtaaggctgcaacgtgcgcttctcggaatcgaaaagcgccacgttaggcacgccaccatcggaacctgaccggtaggtgacgcttgagccattcgtggattgggaggataccgtgccgggcacctgcatcacacgagacgcgatgtccagcaggatcatctgcacttccggcacgtcctccaaatcccagccatcagtgatggtcgcttccacactccccggcagatcagggaaggtggcgccattgaccagcacaaggctcccagcctcgctgaaacgcgcatcctgcacgtgctccacgccatcaagcttcaggctcgaaagcgcggtcacatgcttggatggcaagagaagcgagtcaccgccatgaccatccaaacgaatcgtgcgggtgacggaaggcgcgacatgccagccgcaatgcttgcgaatcgcagcctgagcggccctcatcttgaaaccggcatcgacttggaaagagtcggcgcttggaatcagatcaccaatcacggcagtcatgccgcacccccaatcacttacttggctgccatcaggccagcggccaccagagaatcgataagcgcatcgaattcctgcttggtcggcgcggtagaagccgcctttggcacattcttcgccaccggaagagagacggcaccgccgatagtgaccggcttgcccttggcgtcaagcgccacaagctccgccacgtcctgcgtcttgtcgacgttcgcctctttcggagtggcgaagcgcacgtacttctgcgtcatgatcaggccgccttaccgagagtgaccttcacgaaggccttcggatacttgacctgcaggcccagacgctcggagacgcggcacttctgcttgaagtgcaggaaatcgtcagtgtcggagtcggtcatcttcacgaccagaccacccttgcgcagcaccttggcgcttttgaaggcaccgaccagcgcggtgccttcggtgatggcggcggtggccacggtcgggatgttccacagcttggccccatcggtcaggttgaggtagttgccgttcgcatccttggcgatggtcagcttccaaaagtcaagcggattcatcacgtaggcgtcggcttggaagttggtggtggtggtgatctgcagggcggccttggacaggcggtcggcgtcggacagttcatccttattcatcgtctgaatttcacggttgaacaggccggtcagattgttttcactgccattgccggacagcagctgcgtctcctcctgcagcttcaggtcatactgcgctgcgtcgttgatttcgccgatgacccaggacagatcatccatcatgtcctcgctgatgccgaagaagctggccaccttgccgatcttgtcctgcttccaagtcggatccttccaatggacctgcggggcggcgccggtctcctcgaccatcttggcgttgccttccagctcatcgaaaaccgggtactgcaggacggtgccggtgatagcgccggcagagaacaggtcggccacgaccagcggacgctgatacgggcgggcaggctcggtatcggtctgggtcagatacggcgtgtaaccggcagacggcgcaccctcgacattggtgtcggtgttcgccttgcactcgacctcgtaaccatgagcgatggcggacttcacgtcaaggcccgccgtctgcatggactggacgtaatattcgccgacgctcttggcatggatggcatcggagccaccgacatgccgcacaccagacttggcgttgagctggccgatctgcgtgagcagatcatcggcctgcttcataccgtccatctgacggtcgatgccctcgacctcagccagcgcatccttcacgaatgcgatggtgtcgccatccgccttgccagcggccagcagaccctgcttctcctcgagctgcttgacaagcgcggctcgcttttccttgagagatgccattacggtcactctcctttccgcccaacttgggcaatctttattgcgagttgcaacgcttccgcttcggaaaaaccgtccggctcctcggacttggccccttcaggctcctcgttcttggctgcaccggcatccgatgccttcgcatcgtcactctggtcattgtcattgttgttgtcggactgagtggtgttctcagccacgaaatccttgagtttcttcgcctgacctgtcaggtcatcggcgatctgcgagagaatgtctagattcttctgcgagagggggcgtccggtcttcaaccggctcagcgcgtccttcacgtcaacgatgccggtatcctgattcgcgccgatcggcacgaaggacgcctcatacaccttcaattcgcgcagttcgttcgctttggtgccgtcatcaagctcaacctcgccctcgtccaccacgtcgaacgcgaaggacagttgactcagacgcttttccttgatcaggtggtagacctgcgcggccttcggagagtccatgtcgaaatggcctttaatccaccagccgtgatcgtcctcgcccatcgaatcgacgccgccgatgttgtaatcggggtcatccatacgatgcccatacaacactggcagcgtgttgccgctgtcctgccatgccttgatcgtctttctgaacgcgccgttcgccaccacgtcaccgtagcagtcgggttcgcgggtgaaagtggaagggtaggcgatgaattcgccgtccttgagcgccgagtcctcgccgtcggccttgaatcggcaatcgaaatccttaaagtgcatcatgcacctccttgaaatgcgttcgcatgtcctccgtctcctgcaatgccctcacaccggcatcgaattgccccaaaccggccttgatggtcaggtcggcctgcagttcgttctgccatttgagccatttgatgtcatcgacgcccataccggcgccgaaacgtgatctgacgctcttctccaagcggtcgcgccaagcattgacgattgccgccgttttctcgccgtcgtccgattcaatggccgaaccgtcggctggacgcgacgggtcaccgccatcctgcgggcttgactggccgcccttggtgacattgagcggcacaaccagttcgtcaccgccatcgacgcgcggcagattctgactggcgcgcgcctcgttaggcgtaatccacggagctcccaccgaagtgctcatcacactggcctgctcctcgaaatcgccggaaagcttgctgcggatgtcgaattcgatgtaattcacgtccggcgcaccgaccttcggagcgaggaaagtgtttatcctgtcctcgatcatgcgcatggtcggaccaagcgtctcggaatacagcatcttgcggaattccttggtatttgagaaattcgcgttatcaaggatgccgaccatgaccggcgagacgtggtagacgcttgcgacggtggacagcgaaagcttcgtgacctcgctgaattcctcctcacgagcattgaagcccaaacgcttcaactccatgccatcctcaagcaatggcgtggcaccggcctgcgctcccctgtcggtgaattccttccacccgcgcatgaaacgctcacggtcggcgtcattccattccggcgcatccttcggacgcaccagcacgctgccgatacggccgccgcgcttccacacctgagtgcgatacgaccatgcctgaatctgctcgttgataatgtccttcaaggccctcacgggagtaacgccctgcgtcgggtcatcagggttccacccgtggaacacaagcatgtcatcggccggaacatcatagtatgacgtgcccaaatcaggataaacgcgataataggccggctggaacacactgccatcacgcttcgcctgcacccagcatggcggaatcggctgaatctgccagctaccgaacttgtcggcatcccgatcaggcgtctgcatgacaacccagtaagcgttatcgtaaagcgccaagtcagccacaagctgacgcatcaactcatagcccgtcatcgtgccgttcggctgcttcagcagatttatcagcacatcatcggtcacacgctgcctgtctgtgtcgctgacacgctcgaattccttcaaaccgacctgagcgacattccgcgccagaaaagtaatcacggtacgcaaatgcggctgcgtcttgaaaagctcggcctccgtctgaccctgaatcacggccatctggtcagacaaatcaaaggaaatgctgtagcgcggctggaaaacgttcctcaaggcgttccaaaggcccataagacacctccaatcgcttcaaaaaatcaaagaatcatcaatccatgtcccgaataggcggaagccttagccggttcggcatccacagcctgcatggtctccaacgcatacaatgcctgcgattcggcaaccaagccggaaatctgcaatgctgatttcgtcctgtcccacacctcgacctcgccgagccttcgggatacggccacactcacctgctgttcgatggcgggctgcggaaggtgccgcagcttgccctcacgtacacggtcgtggaaacggccgcagcacgcgcccaaccggaagccttcgatgagatgcaccgtccaacctttttcggtgagcgggtcgatgaagtccactgccggacagcccttgccctgcacggcgatctccgtgatatgcggccaacgctcctgcaaaaggtcgagataatgcggcacccacaacattccgtcacggcgagcgatcagctccacatgaggcaaaccgtccgcacgcattccggcagcggccacatacgtggtcttacggtcagccgacgtgtcaacggacagcaccacacgattctcattcggaatcgtggaacgcgagtcgatgccgctggcccacagtttcggactgatgaaaggaatgatgtccgccgtaacccactgacacaggacttccgtacggaacgcggcctcggtcatgccgtcaatatccgaacggacgctcatgacggtcatcggcccgtagccgagcgacggattcgcctgacggatagcgtcggcatcatccaccggacacttgtccggagcgctccattcgaaatagccgaacgatccgtcctgctcgccggacaggaacgcgtcggacggattgccaccgtcggcgctcaggcgcgtccactcgtcaacaagcttacggcccttgtccacctgcttgcgcaacgccacagaccgatagtcaccagcgttcgaaatgccccacaactggctcgaccaaaccgccttcgtggtctgactgacggcattccagccatcatccgtatgctgctcacgaagctcatcaaacaccacgcgcgcggcgctctttgctcgaatgttcttatcggcgcggacgatataccgggccttcgagcgggtgatgatcgcctcctcgccgttcgtgttgacgaatttctgcgtcatcgcggcgagatccggaatcaccagatccgcttcctcatcagtcgaaggctgaggattgcaccactccttgacctgattgtacgggcccttcgcattgtccaacgtctgcgcggcaccgaccacgaggaacttcaccggcggcaccctgtccggatgcttgttggagtccacgaacagccaccatgcggccaaaacgcccatcagcgtggtcttgccattctggcgggcaacaagcacgatgaccttgcggaaacgataactgccatcctccaacagttcgagcgcatgaacgagcagccactgctgccacgggtaaaggtggacatgcagcatgatctccgcgaacgcgatcaccgcgaaaccattgctcgtctcctttgttaacggccggagcggcggcgtgaagatacgcggcaaggtcacgccatgcctcatatcgtcgatggcaccgaaaaccgtaagattctcagacgccatcgcaacctcctcagccgaaacgcttcataaactcgtccatctgcacgatcttcgaactggaagatgccgaagtattagacgtggcttgccgagcctcgccagccaaagcgttacgagaggaaggcgtggccccaagctgcgtgagcacattcatcaaatgcggcaccagatacagggccttcgtcacctccacgccggtaccatgcgccaccgcgtaatcgatctgcgcgcagatcatgcgaccggactgtacaagagccgtgtcagcatctccgatagactcccccagcccatcgatcgtcttctcatatgcctgcagcagaccattctcacgcttttccggagcatcaagcagacgcatacgctgctcgccgatggaaagacacttgtcaatcatcctcgcgtcgcccttaagagcacgcggatacgctgcgcgataaagattatccaaacggtcaagctccacctgccgctccgtatccacatccttacaacgctgattctccttcaaaacgcgacggatcgcgttctcagcagacttaacgtcgcgaaaccccagctcgtcacgaatctcggcaatgctcatggaagcggagaacagcttcagcgctttcctgtccttgtcagcaggcatcggacacctcactcagtggtaaaatcatgctccttgccgtcacagcgtggaatgatgccagtgtgctcctggaaacgtcggcagatgacatcgccatatcgagggtcaagctcgcagagcacggcgcgcatcttcaaatcatatgcggcaataagagtgcttcccgatcctccaaaaggatcgaaaacgatgccgccaggctggcatgagttgcttatcatcgcctcgataagaccaactggcttcatggtcggatgctccgcattgcgtgagggcttgtcaaactcaaacaccgtagcctgcttgttatcgccataccagtgggctccaccacggccaagccttccagcgccaccgggcgtgaaaccgtaaagaatcggctcatgcttccactggtagtcggaatggccaaggacgatggtgttctttacccagacaaggttctcgcggaacatgcagccggcggcctcgaacgcctcctggaagaacgtccttgccgtgtcggcgtgagccacatataccggagtgccaggcttggagcatcggactatctgaaggaatgcgtcagcgactacctcctggaaatccacgccggaatcattctgaatggtcagtttatccttcgtcttgccttcatacgagacgccatatggcggatcagtccagacgcaatccgcctgcccccccccaaacgctttgtccacgagagcgtcatcagtgcaggagccgacagcgagaacactgtcgcccagctcccaaatctgcccctccttggtgaacgtcttgccctcatcgggcacgtcgggcgcatcatcggggtcattcaatatggacggcttgcctgcggatgcaagaatcgtcttcaaatcatcctcggaatatccagtgccctcaaggtcggacaccgactggaggataacagccaaatcagcctcgtcatagccacctaaatcggctagacgattatcagccagcacaatctgcgcagcctgatcgtcgtcaacatcaaccgtggttgcctgaatggtcttccacccaagctgcttcgcggcaagatacgtgtgattgccggctagaatctccatccgcttcgaagcgttcgtgccgagattcaccacaatcggacgatactggccacgcttgcgcagagaagatgcgatggcatccacgtcaccgcgacgtggattacgacgatacgtgtggagttcggaaatcggaaactcccgcacctcaagattcatcgttcccttctcctttcatcattaacgcccctcacgcgcgcgatggggtgccgaacgcagcggggagaggaaaacccaccaagcgtgaggtcttgcgttcttcgttggttttcaggatttcaccgcccctatcccgtcggggttggtttcgaatgctgttttgaatgctttgattgcgtttgtgaatcgtgtgatgagttcgtctgtgcttggtggcttgggtgtgatgcgtgtggtgtatgcgtctccgactttgtaggtgttgacttcgttgtgggtgacgttgattgggatgttgacggtgaatgagccgatggggaatgtcttgtcgctgattgcggcggtgagctctagtgtgactggctgctgtagcatcattgcctccttgctcatgctgttgttatccattgtcttgagagtgttccgatgggtgttggtgggtcttggttgcctctgagccggttgcagctggtgtggcttgggcggaagcctgctgggtcgaactggagttcttggtgtttggagaccgggtagaggtggtcaagattgtatgattcgtcgctcgtgttcttttcggcggtgtagtcgattggcattccgcagagccaacagaccgcatgccgtgctttgcattggttgaagaatgcggccttgtctttttcgaattgacggctggtcttgcggactcttggcatgtggtcaccgccttgtggtgcttcgggtggggaatcgaacccacgacatcgatgaggggcactgttttcttgtcatgggcattcaaaggaccatggaagccatggccggcttggtatccgccctgggtatctgtgctatcccttgtgctctgacactgagctaccgaagctggatatgaataatggcccaaccattttctggctgaaccattctacaaacatacgacagtatagcatttcaacggtgacagtcaagtagtgcggccaactcgccgaggttgaacgtgtactgccgcttgtgttccgtcggcgtggcgtggagtttgccgcgtttgagccattggctgatgaggttgcgtgatacggtcaggccgtatcgtttcaactccttggctgcatcgctgggtgtgccggtgatttgcacttgccacagtctttcgtctcgggctgctttgattgctggtgccgcccattcgctgtggcagtctgggcatgtggccgattcggcttctggcgtgccggtgagcatgctgtggcagtttgggcaggtgccgaggattatgagctcttcttccggtgtcagggcttgttcgttgtgtctggtgatgtgttgcaggttggtgtagtcgtctgctgcggtgctcatcgtcaatatggtgtgtttgttggtgatgatgcgttgccatgccttgttccatggcaggttgccgtattgcgtcctgattttgcctgcttgttcggcgagccatgcttccgattcggcgatgaggtcttgcgcgcgggtgtcgatcgggagtggcgcgttgcctttgtttggcgtgtggcttgtggggccgatgtgtgcctggcggagcatgatgcttcgcagggctggtagttgggtgtgtccgagttggtggatgagctgccagtagtcttcacggcagtttgcgcagagcatgttcgcggacgccggtttcatgggcttgtggcagtgctggcagtcggtcaaagtcgggtctccttgtcgtgctgctggacgatggccgcgattgcggctttgggcacttgtggcatgagtggcgcgatttcgtcgagcgtgtatccggcctgatgccatttgatgatcatgttctcgagtattttcttcatttgcttttccttggttcgatggtcttaatgattcgctgcgaagtatcgcaggtcacgagcacctcatacggccggtggcgggagtcggcgcgctcctgtgccacatccgatgcctcttggagcgtttcgtacactctgcatgtgtacagtctcatatcacccttcggccggacgatgtagccggtccagatgcttgtgtccaacgtgcctacgtcgttcactggtattcctccactgtgtcgcagccgatggtcgtgccatggtctgtcaggcaggcccatgtcacgtcgccggtcttgaccgtcttcatcccgtaatcatgatgcgtgcccacataccaagacgcatagatgctgaatcccgccagaaagagcgttgcgatgatggataccaccagtgcgacaatcagacgtttctcgaccttgtccaatccgcccatcactcaccgtcctttccgattttgttggtctccttgtatgggttttcgcttgtatattgcgggaagtcgcattcctggtctttccaccctgcggcgtagccttctcgccatgctttggctagttcttcgtgcgtgggatgggtggtggttctgctgttcatttcgcgttttcctccttgttgagttgtttcgccatctggcaggcttgttggtctggcgtggcggttttctcgtctcgtccgagtttttcgagcacgtggcggcatttccatgtgtgggtgtgtggtttcgagggtggtatgccgctcatgttggccctgcgttggcaccagcctttccattggcgcgtccagtcgttgacggttctggtttcgccgtggtggcggttgacgaatgcgttccatgcgccggtgaggtcgaggttcggatattccgcggccagtgtcctgtccgtttcgccgcactcccgcgaatcaccgaaatccttcacgcttgtttctttggagaaagaagaagaatattcttctttctctttcttttgggttctggtgttctggtgttctggtgtttgtcccgatgtcacaacactgtcacgctgtgacatgcttgtgacatcgctgtgacatcgggatttgcttttgcgttccttggcggcggcgcgcgcgtgcagcacctgttccttggtacggttgtggacggtgtagtcgtggattatccagccctcgtccacctcttcgagcatcccctcgtccacgagcgcccgcacctgttcgggggtggcgccgatgttggagagcatggcgcggcgtgggatgaaaccgtccgtgagcctgtcgccgcacaacgagagggccatgcagtacacgcccacagagtcggcgcggcccctgcgcacgaggtcccgcaccttgtcgttgtcgtagaagccgttgacgagctgcacgtatccgcgccttgccatcggtcaatctcctttccgggctggttcgcgtcctagttggggaatagcgggcagaacggttctggttcgtcgagcttgtacccgcagtacgggcaggtgacgtaataatcgcccacagtctcgccgcagtgggcgcattccacgtatccgatgctcatgattcctccttgaccggtttgcagttgtgtggcgcttgtgagattctgctggtctggcatgcgtatgatcggctgccgtcgcggatgatgatggcgtccgccgtttcttcagcccagccgagataggcaacgagggcgaggaacagtacggagaacagtacggtagcggcgatggcgagtgttgcggccttgccaatgcaactcattcgtttaccgccttcctggcggtttcgagcatctccttggcctgtctgatatatccctcatggaagccgggaatctcaccggcataattccatgcgtcatcctcgtctttcgccgcgtggctatcgacgccatcccattcgcaactgtcccagcagagccgtttcgccacagcctcgatctcggcgtcagccggtggcgcattgcggccgcgcaggtacgcttcctgtagatcgtccgtgtcacagtaaaactgttccttgacatgcgttccattccagtagcgggtcggatacgccttctcggcttcatcatccgcaatactcaattcgtcctctttccgttcgctttgaccattgcccagaggatttcgcttgcgggacgccgcctgtatgacaggtcgttgtatgactgcacgtggccgagaatcagtttcgagccggtcgaatccggtgtcaggatcgcgttcacgcgctccggcaccatcttctgccatacgatctcgtcgcacagttccttcgtgcagaccagatagttctggtcgccgtagaacgtcaggccgttgccactcttgaagtcagccatgcatgacttggcctcgaagaactcgaagcagcctttctccacgctcgctggcaccggctcgccgttgatattccatggcttgaagcccacgtagtccactcgccgctcgtcaggcgtgttccggtcgaaattgacctcgctcgcccaaaaagcggtctgattcttcagacgcttctccaccagctcggacagcatggcagtggtttcagtcctgctcatttcgtgtcctccttgctgtagacggcttccagaaagtcttttatgagccgtttcgatggtttctttcctttggcgctcatgtcgatgaggcagacgggtgtcttcaggcctagcgtgccggcggcgatgagccggtggtagccgtccactatctcgaattcccttacgcggtctgtcttggtgccatcgatgatgattggcttcatgacgccgtggaggttgacgctgtccatcaaagaggtgttcaaaacggtctcgaagaagagccgctggaaattcatccggcatgtttcggaccacatcgggccaagtgccttcgattccacaagccatacgccagcagcgttctgtggcatgacgaacccctccgtgccaaaatcatggccgaaattatccttgagccatgaacgcacatcaatatcatcgatcatttcgcgccctcgctttgattcggcacttcggacggcatggagccggaatagccgagcatggaacggcaaagctctagcatttcatggaatgcgttaacttggccgtcatagaagtctcggtcgctctttctgcggacatcgaatctggaaagcgcggcttcatgacagcgacttttcgcccagtcgatgacttcttggagggtcttgtctttttcggtcacgttcgtagccatggttagtgttcttcctcttcgattcggattgtgattcggtaccagccttttcggatgcttggttctccacctcggtaatcggggccgatgatgtgttttgagtcatcgtcgggccagaagccggtatcggtgagcgcgtcaaggatggctttgaccatgggcgccgcgttctccgggtcgaagcgcccgtgggtcaatgggtggatgatcgcggtgacgtgcacggggaagtgttgtggcctgtggtggccgttttggagccagaatctggcgaatgccatggcacgctgtttgactgcgcttgtgtgcgcgaatttcactcgccagtggccgcgacggttttgcgtccaccattcgtcccgtggaatgtccacgatgaattcctgcatcattcctcctcttcctcggcttcgatttcgcattcggggcatgggatggggcgcgccggatacagcgcgcacccatgcctgggacataccggttccacgtccggcggttcaatccattcgcgcatcagaattcaggctctgctggcgcactccacggatcatcggccggagcctgcgactgctgttgagcctgctgcggctgctgatagccgccaccgttggcgttgccgccttggtatccgcctgactgcatcttctgcacctgagccgtcgcataacgcaggcttggtccgatttcatcgacctgcaactcgatgacagtgcggttggagccgtcctgcgcctgataggaacgctgctgcaaacgaccctgcgcgatcacgcgcattcccttcgcgagactgttggcgcaatactcggccaagtcacgccacgcggtgcagcgcaggaacaacacatcaccgtcaatccactgctgcgactgcctgtcatagacgcgcggagtggcagcgatgctgaaattcgccaccgcaccgccattgctggtcgtacgcaattccggatcggcggtcagattgccgacgatcgtgataacggtctcaccggccatcactcggcctccttgacatcgtccgcattctcgacttcgccgtccgcttccatgacctcggccgtcacgtcgtccgccgcatcggaggcgattaccggctggaacacgtcgctgtagtccggcgtggtctcgtcaacgctcgcggccttcttcgcctcgatgctgaccggcatgtacttgaaactgcggcggatgatggtcttcttcgccatctccacgaagttcttcat

SEQ ID NO: 3304 - DNA, 19284 bp, Unknown
  R151_18m  MAG No. k141_5793
ctgccagtcgccaccatcgatgccggctggcgcggccagattattccgggcgatggtcgagatatacgtcagatcgttggacagcgtgtcgtgcagttcgatcgcgagctggttgccgtggcgcagatcggccagcgccgattccatctgctcgttttcgttctcctgattcaccacgcgcttgcgccagcgcaacgcaatgcccagtaataccagcagcacgcttgccgtcaacgccgccgacgccgtgaccagccacgacccggtcaccgcatagacgatggccgccaccgcaagcacaccgatcgggccgaacatcgccagcggatgattgagttctatatcgatatcaatctgatgatgcttcttgccgtcggcgtgaccatacgaatacgacgaatgccgcgaaatgataatcggacgtttcaccggcccgctccccttatgcgccttgcgcttcttctaccgtgtccccacacacccatcggcgccttcatcagtgcaggttcatgcgaatccatgcgccgataagttccttgagattgccggcgccgagcttgtcggccgcacgcatcagatgcgtgcgcacggtggtttcggtgatggacagttcggcggcgatctgcggcatggtccggccgcgggaccacagttccgcaacctccatctcacgcgcgctcagccggttgtccttctcggccttgatgcgcgcggacgcaacggccgcggtctcgaaccgcacgtcgccaccatcgccccatattttgccggcctgcacctggcggatagccacggcctgcaatcgcacatcatcgttcttgctcatgatgccctgtgcgccggcccgggccatctcctgggcatgtcggcccacaatcgaggcggtaatggccagtatcgccgtggtcgcgttttccctgcggattgcacgcaccacatccggaccattgatgtcgttcatcgcgatatcggccaatagcacagcaggcgggtgtttggtggccgtgcacagctgaatggctttgctgccttcgctcaccggcggcaacaattcgaagtctggcaggaccttcgacaaaatcgactgtaatgccatcagggccatgcggtcgttgtccatgatgagcatggtgggccttggcccatcctgcccgctgatatccggcatatgcctacgtgcgctcagctcttcttgggcttgagcgcggaaggcatgggcatcggaatcggcttacggggagccggtttcggtacattgaccgccttcttgggtgccgatgcggggaattctccactggtcgccttggctgccgcttcggctgcccacttggcgtactcgtcgaggtcgtcctcctgcgcggcgggagctgcctcggcggcaccggaagcgtggtcgtcagcagcagaatccacatccttgtccgcatactgatcatcaatatcggcgaacgggtcaggagagcccgttcccggctcctgctcgctcagctcttttgccagctcatcgtaatcggtatcggtggtcaggtacttgagctttcgggcaattttctgctgttttgctttttgacgtccgcggcccatctgaccccctgcgattactgtgctgttcgattcatcaacaatagagagtaccactaatagtggcttgttcgttgtcggctcacacttttaccataaaaagcgtttatctgagccctatttaaaggattttcgcatgaccgacgagcagcaactgacagcggcaggcaatgagataagcgcgagcttcctcgcggccaaaaagcgttcggacgaaacgctcgccaagctggaggccaagccgtcgtccttcaccatgttgaccggcgaccgtccgaccggccggctgcacctcggccactacttcggctcgatccgtgagcgtgtcgccatgcaggagcgcggcgtcaacacgaacatcatcatcgccgactaccaggtgatcaccgaccgcgacaccaccgagcacatccaagacaacgtgctgaacctggtgctcgactacatggccgccggcatcgatccgaacaagaccatgatgttcacccactccgccgtgccggccgagaaccagctgctgctgccgttcctgtccctggtcaccgaggctgagctgcaccgtaacccgaccgtgaagtccgagatggaggcgtccggccacgcgttgaccggcctgctgctcacctacccggtgcaccaggcgtgcgacatcctcttctgcaaggccaatgtcgtgccgatcggcaaggacaacctgccgcacgtggaaatcacgcgcaccatcgcccgccgtttcaacgagcgttacgccaagaagaacccggtgttcccggagccggccgctattctgtctgaggcaccggagattccgggtctcgacggccgcaagatgagcaagtcgtacggcaactccatcatgctgggcgccaccgccgaggagaccgccaagctcatcaagaagagcccgaccgattccgagcgccgcatcaccttcgacccggttgcccgcccgcaggtctccgccctgctgaccaccgccggtctggtgaccggccgcgacccgaaggacatcgccgaggagatcggtgattccggtgccggcgcactcaaggcatacgtcatcgaatcagtcaacgagttcctggccccgcaccgcgagcgccgcgccgagctggccaaggacatggactccattcgtgacatcctgcacgacggcaacaagcgcgccaacgccatcgccgaggagaccctcgaccaggtgcgcgaggccatgggcatgaagtactgattttcccgccgctcgtagcaagacgccgtgtcagccccaactgggcaactgacacggcgttttttgtattgcggcgtctgctgtgtcctatcttcacttcgaggggcggatttcttgttttccggaggtctatctccgcttcgaggggctgttgctcaagtaggcgaggcacaaaaacggcggaatgacgttggcgtgaatgggattttatctgagattgagcgcatgaccagccccttgaaacggagatagacctccggaaaggctcaaatccgccccttgaaacggagaatcaagcgttagtaactctcaattcaaaaaacacaacatgttttccgtgcaacgcggctatcaagacggacctctggtcacttcatgccgatggcttgcatcaatacgtacgctccccgcacagcaatgtcattacgacgtgttgcggcatagcgcgcatggcttccggagtatcggcggcgtatgggtcggcgtccaacaacaccatatcggccgggtcgccggatgcaaggcggtcacggccagtggcggtcgaggctgccagcgaggtgcgcacatcgaggcactgctcgggctggaacggctcgcggtcagagctttcggagccgaacacggcggcggaaatggccagccacgggtccagcggggccacgggcgcatccgagcccatgcgcagcgtggtaccggcgtcgtggagggccctgaacggataagggataccggccgggttggcccagaaacgggtgatgacgtcgcggtcatccatggcgtgctgcggctggatgctggccgtgagccccagctcggcgaaacgcgggatatcgacgggtttgagcatctgtgcgtgctcgatcgatccatgtgcgtgcgtggcggcgactgcgttgagcgcaatggtgttcgcttcgtcgccaatagcgtggcaggcgatgtcgaagccatgctcggtggctaggcgcatatagtcttcgatttgctgcggcgtgtagctcagcgtgccatacgtcggcggctcgatgcccgaatacggcgtggagcagtaggcggagcgggtgttgagcgatccgtccgagatgagcttcatggcgcccacatggccgagcccggcgctgcccggcagtgggttgccggtatgccaacccgcgtcaatggcggcttgcaaccgctcggggtatacaccagcgtccacgcgcaaaccgttaatgccggccgcgaaacgattggtccacgtatcgatgttttcggccatttcataatcgcggatgcccaccacgcccttgcttgcggcgtcctgttcggcctcgcgcagcagacggtcagtctcttcagcagcgcccggcaccttgtcgaaggcggtgtaggcgttgaaccattcgagttcaccgaccagaccggattcgtccacatgtacgccaagcctgcgggccgcggcggagttcacccatccacagtgcatgtccgcgctggagagggccaccggctgttcgccggtcacggcgtcaattgcggccagtgtgggctgctcgtcgtcggcccacagcgagtgacggaatcgcatgcccaccacgaaggcatccgggtcaagcgtgccggtggcgcggcgctcatccagatgacggcgcaacatgtccatcgcttcggcggcggaacgggcattgatgaggtccagtcggcccagcgtcttagcccattgcgtgaagtgcgtgtggcagtcccacaggccgggaataacccacaggccgtcggcgtcgatggtggtttcgtcagcaggtgcggaggccgacgttgggattgagacgctgccagaagcaatggcattcgtcgcgtatgccaacgatgtcgtatgcgccttagtctgcatcgtgccgtccgaagccgagaccgttccagcagggccgacagacgcaacaaccccatcgcgaagcaccacatccacgcggtcccgagaccccggaacaccggcattgacaatacgcaccaagctactcatacccgccatcatgccacctttgcatgaacgccatggagattcgttcaagctgaatcgcgccgtcggcggcgattcccgctggctgcctgcaaacccctacgttccatgtaattgcgggatggcctgcaactgcgatgaacacccatagtttatccaccgacttatccacatttatccaccgaaaaattggggcggtagacaaggccgatagccggactctacactgcgaggacaaagcgaacatcacgaaggggtgatcatcatgggtagctcaacggcattgaccgagctgacaatgcagaagtatcaacgaatgcagacgtgcgcagatgttcaacgacgaagcgcatggcacccaccttatgccctgacaacagcgttggagcttttgtcaattgaagtaccccgcatatcaagcaaacacagaggccttgcaactacaaccattgttgcggttccacatgccaatgacaaacggcacattgtgggggtcaaagtggttgtatggcctttcccactagacacggtcataatcgagggacaattcacatgcacttcaccagcttgcacatgggccatgttctccgcgtatctcgaacttgaagaactcatcgttctcgctgattccatgatgcgacgagatcgaaggctctgcagaacaaccatcgacgccctttctctgtatctcgatgaggccgaggcccaggtgcgagccgacaaagagaatggcaccaattcgtatttgttccgcgggtataacaaatgccgtcgcgccctgcttttggcgcgcgcgggcacagattcctccatggaaacacgaactcgtttggttctcttgaaatacggtctggattgcccgcaggtgaattatccaatattcgcaggaaacaacaccagacccatatatctcgatcttgcataccctgaattcaaggtatgcatcgaatacgaaggctctcatcatgccgggcaatggctgaatgacgcgagacgccgccagatgatcgaagacgctggctggaagtacattcaagtcaccaaattagatattggcgacgaagcgggagaagaggcccttgcccgaagagttgccgaaaggatacaggaggttacgggcaaaacggtccagctcacgatgcggcaaaccacccagcaaattagcgatgtccgaaagctacgccgtattccgctgtacaaacggctgaaattcgagcctctgctgccaattattccgacgacgcaggaataataagcccggtagagtcagtccgcaccgtccgcaccgcgctacggtattcaaaacccatttcaaggggctgatttggcctccgccggaggtcttattccgtttccaggggctgctcatccgctagaccacgggtatcaatgcccgtacgccaacgccattccgccgttttggagccgcgtctactcaggcatcagccccttgaaacggaagtagacctctccagaacgtcaaatcagcccctcgaagtccgttttggcctcaatggttcctgccgaaccacaaaaaagccactcctctgccatacgaggcgaccgcacagcaggcacgtgtcatttgccgctgcggacctcggactccatggcttccatgggctcgtcgacgagcacggtgccggacggcagggtgccgggcagcggatcgtccatgtagtggtcgaattcgtagagcatacgctcgttcggcttggcggtcagcaacgaaaccaccacgatgaacagcagcgaaatgatgaacgccggcagcagctcatagatggcgaatacgccgcccaagggcttgacgaggttgtgccagatcagcacggccgccgtgccggacagcatgccggccacggcgccggccttgttggcgcgacgccagtatagcgagcacagcatcaacgggccgaatgaggcgccaagcccggcccacgcgtaagacaccacctggaagatcgacgagttctggtcgtatgccaccagaataccgaacaggaacatgaccaccagcgtgaccctggccacgatcatgacctgcttgtcggtggccttgcggtgcagcagcccgcggaagatgttctcgcccatggccgaagcgccgatgatcagatacgaggagctggagctcatcgaggccgcgaaaatgccggagaccaccacgccgcacatgaagctcggcagcagggtctgcgccagcacgatgaaaatggtctccgcatcggtggaggtcagcagttcggtgggcatcatcgcacgtcccaccaagccgatgcacaccgcgcaacccagcgaaatcacgcaccaggaggtggcgatgattcgggacttgcgcacttcttccacgctgcggatggacaggaagcgcaccagcacctgcggcataccgaagtaacccaggccccacgccagcatggagatgatggtgatgatgccgtagtcggagggcgcgccgaacacggccttgcccgcctcgacgagctgctggccggtggccgggtccagcttgggcgcggccacctgcgtgccggacaggtagccggggatggcacgcaggaattccacggtgttgtcgatgccgcccgcgctggccacggtgccgatgaacaccaccgcgagcgcgaagaacatgagcatgccttgaatgaagtcggtcatcaccacggacaagtagccgcccaccacggtgtagacgaacacgaccaccgcgccgatgatcatcatgacgtggtagtcgaaaccgaacaacgtggcgaacagcttgcccacggtcacgaagcagctgcccacgtacacgctgaagaacaccaggatgatcacggccgcgatggtggagaccacgcccttcttgtcatggaaacgcttggcgaagaagtcaggaatggtgatggcatcgccggccactaccgagtagcggcgcagtcgccgggccacaagcttccagttgagataggtgccgagcgccagtccgatggcggtccacatcgggtcggccgcgccggtgaagtaggccaggcccggcaggcccatcagcagccagccgctcatgtcggaggcttcggcgctcagggccgtgagccacggccccacgccgcgcccgcccgcaaagtattccttggaggaggagttggagcgttcggagtagatgaatccgatggacagcatggccgcaaaatagatgaccatggccagcagaatccagaaatcgttggccaactgcgacacctccccaatcatgacgccaagcggctaccgccatggcagaactatgtgctgatatgcgtgctgatatgcgattgacgccggagcggcgtcatacagaccgtcacagccgtgaatacggccgcaacgcacttcgcctgatggtagtggatacaagggctcaagcaccttccaccgtttccatactgagacgctgttttatccgagctccccacctgaggggagccaagatgacggtcagatgtcgtagcgccaggacttgtcggtcaccacgcgggccatcgccaagccgatcggcagacagataatcaccatgaacgcacggaacgcccagtccagcgcattcatggtctggaagctgccgaggtaccacatggcacggtacatatacagaccgggcaccatgatcacgatcgacggcacggtcaggcagatgcgcgggtagccgaggtgcggcggtagccagccacgtcgcacggatgaacgccacgccgatgccagaatgcccgccaggaacgcgccgatgaaggtagccatctcgggtgccacgttgaagtcctgcaattccaagcgcagcgtgtccgtgatcgcaccgatcagggcggcggccaggcacatgcgctgcggcgaattgaacagcacggagaagccccacacgccgacgaacgccgccacgaaccgcagcaatccgttgacccacgggtcaagccccagcggttcaaagccttccgggtgcaggtgcaccatcacggccacggcccagcctgccagcgtggccatcaggatgatgcacagcacgtacgccacgcgctggatgcccgaggggaagtcgattttcgccatgtcgagtccgccggtgatgagcgggaaaccggggatcacgaacagcatggcgccgatgtaggccgtatcgtgcgagagcgcgactgggtcgaaaatgccgatgagtcgcaaggtgccggtgcaggcgagcgccgccgcggccacgcacacaaaggtgacgaagaactggttcagatggtatgcaaacagccggcgacgcatccactggccaaggcccgcgcccacgaacgcaccgatcatgtcgtatgggccgccgccgagcaggaacacgaaggccgcgcaggccagggcggaggccagaccggagaaccacggcttgtacagcggcttgcggcgctcaatcagatcgagtcgctcgtgcgcctgccgcacggtgataccgcccttggccttctcttcgtcggagcgctcgttgaagtgttcggcgtattccttgggcacgcgattcttgcacttcgtactgcttgcagcagggctttcggcggttgcgccgttcgccgccgcgccctcagcgcccgcctcggcattcgccgcgttcgccgattcaaccgactcattggagtcaccggtaaacacttcggcatcgtcgtaggccttctcttcggccgctttgtcttcgaccggagtgacttccgcgctgtccaccaaaagtcggtgggcttcttcattgtcatcatccaaggacttggccacggaggtcacgagtaccttggttttcaacgcaagatccagcgtctcgtccacgctgccgttggccgcctcagcctcggccttggcacgttcgcgcaggcgcttggccagatcggccgaatactgcgaagcgtcacgttcgtccaaatgcttgaccacgccatcggacagttgcgaatcgacgtgatacatcgaccccttgccgagattcacggagaaccagtcggcgaaatgttccagcagccagatacgttcggtgttcacgccggtggtcggcaaatccacgacttcggtgatgcggttacgaccatccgtgcaggtggcctcgatatccgtcaggttcacgtcggcgcgtacgtgcacgcccagcgggtaggcgatgcggtgcatcatttcacgcacgcggaaggagccggtgccggctcccaggtccagcatgccgacccgtacaatcacgctggctttggcggcgataccggcgtccaccaccggtttttcccaatcgcgcgcaatatcttccatgtccagcggaatggagtgggtgtggaatttacgtacagccgttgcgcctttcgcttcgggcgcactttttttcttctgttcgctcacatccctcattactactccctgcctcccccgccagcaatcgtaaggtgctcaaatcttccgcgaatcggacagtgtctcatatgctgtccgatattcggtctctataggtggacaacttggcgcactatatggactccgtaacgcaaatagcgatttcgcggggatacactattgcccacacaacaaccacgttgaatatgggctgtgggctcgcaacgactggcctcaacaactgcggaggagccgcagacgaccggtagaccgagcaacctgttattcggcaaaggaggttatatggcaacacctgaagaacagatcactcccgctgacgccgccatcgtcactaccgggaccggccgaaagggcccggaggagcatgatcttcccgaaagcctgaagtacgacatggatctgtgtcttgagatcctgcgtaacgtactgggcgaatacaaccccgaactgctgtctacgttcgacaccgtgcgtcattacgcggtggaggccagcgccgagcatttcgccgagctgaaggatccgaaccccgaccaggatggcctgaaggaggccgtgaacgtcatcgacaacatgacgttgcacgacgcccagctgctggcccgcgcattcgccacgtatttccatctggcaaacctgtccgaggagaactaccgtgtttccgtgctccacgagcgcgagaacaacgtgtccgttgaccaggcggtcgacccgatcaacgagctcaccgtcgcctaccaccagctcatcaatgagactggcccggccaaggccaaggaactgctcaaccagctcgaattccaccctgtcttcacggcgcaccccactgaggcccgtcgtaaggccgtggaaggcaagatccgccgcgtttccgaattgcttgaggagtacaagcgcctcggcggctcggataagaaggaatgcctgcgccgtctctacaacgagatcgacgccctgttccgcacctctccgatcgcgctgaagaagccgaccccggttgaggaagcggacacgattctcgacatcttcgacaacacgctgttcaacaccatccccaaggtctaccgtcgcttcgacgactgggtcctgggcgataaggccggtctcgtcgagcccgcttgccccgcgttcttccacccgggcagctggatcggctccgaccgcgacggtaacccgaacgtcaccgccaaggtgagccgcgccgtggcccgcaagttctccgatcacgtgatcgccgcccttgaggaagccacccgcaccgtgggccgcaacctcacgatggaagccgagaccacgccgccgagcgccgagctcaagagcctctggagccaccagaaggaaatgagcgagcgtctgaccgacaaggccgccctgatctccaccaaggagatgcaccgcgcggtcatgctggtgatggccgatcgtctgcactacaccatcgagcgcgatgccgacctcatgtaccactcctgcgacgacttcctcgccgacctcaaggtggtccagcgttcgctggccgccgccggcgccaagcgttccgcttacggcccgctgcaggatctgatctggcagaccgagaccttcggcttccacatggtggagatggagttccgtcagcactccgtggtgcacgcccgcgcccttgcggatatccgcgagcacggcctgcacggcgagcgcggcgaactgcagccgatgacgcacgaggtgctcgacaccttccgcgccctcggtgccatccagaagcgcaacggcctcaaggccgcccgccgctacatcatctccttcaccaagagcgcccagaacatcaaggatgtctacgagctcaaccgcttggccttctcccacccggaggacgtgcccaccatcgacgtgatcccgctgttcgagcagcttgaggatctgcagaactcggtggacgtgctcgaggaaatgatcaagatccccgaggttcaggctcgtctgaaggccaccggcaacaagctcgaggtcatgctcggttactccgactcctcgaaggacgccggcccgacctccgccacgctggccctgcactccgctcaggagcgcatcgccaaatgggctgagtcgcacgacatcgacctgaccctgttccatggccgcggcggtgccgtcggtcgtggtggcggccccgccaaccgcgcggtgctcgcccagccggtcggttccgtcaagtgccgcttcaagctcaccgagcagggcgaggtcatcttcgcccgttacggcaacccggtgctggccatccgccacgtcgaatccgtggctgcggcgaccttgctgcagtccgcgccgagtgtggagaagcgcaacaccgagatgaccgagaagtatgccgacatggccgctcagctcgacgaggccgcgcacaaccgcttcctcgacctgttgaacaccgacggctttgccccgtggttctcgatcgttacgccgctgaccgaaatcggcctgctgccgatcggctcccgcccggccaagcgtggcctcggcgccaagtcgctcgacgacctgcgcacgattccgtggatcttctcctgggctcaggcccgcatcaacctggccgcctggtacggtctcggcaccgcatgcgagaagttcggcgatctggagaccatgcgtcaggcttacgaggaatggccgctgttctccaccttcatcgacaacatcgagatgtccatcgccaagacggacgagcgcatcgccaggatgtaccttgccctcggcgaccgcgaggacctcaatgagaaggtgctcaacgagatggagctcacccgcaagtgggttctggccatcgtgggcgacaagtggccgttgcagcaccgccacgtgctcggccaggccatccgcatccgctccccatacgtggacgcgctgtccgtcactcaggtgctggcgctcaagtcgctgcgcaagaaggtggacaaggaagagctctcgcaaagccagcaggcaggattcatctatctgatcctctgcaccgtttcaggtgttgctgccggcctgcagaacacgggctgatttccggccgaccgatcgacaaaagcgagcggggaggttccgtgccgataaacggcgcgggcctccccgctcgcgtcatccggccctagactggccggcgacggcgcacgccgggcgggcgcgcagagaacggacgcgcggaacgggcacctcgacagatcggaggggacatgggcaagccagcgggcgggcgcgggaacaccgggtccacggacggcatcaaggcggggggcgacgccgggaacgaacgccacgcttgcaaagcgaatccggctacaaccgatggcattgggaagaaacacggcacagaagatatgtcagaaagtttttccggcgagaaatgtgctttggcaccgaaagcagcagctaccaaattccttaaggcgagtagatgctatgtggttttgggcaaggccagacgtgtgctgtggtggctgggattactattgctttcaccagcagtaatgacatgggctgaacgcgataattacagcctcgtttgcagcgtgttgacactttctcccccaccctgcagtgatttgaatacgtatggctccagacttacagcagtgctgggcttaggttttctctgttgggtgatgataccggttgtttcttgcgtgaaatccgtcattcgaagcttatatcccaatgtgcctgacttgggtacgtcgatggcttcacatgtcgtaatcggaattgtgtcatttttcatgctctgcgtatctttgcctcttcttttcttgggcataattacaatgcatatataaacgaacaggcctgcccaaatcctggggtgaaataggtcgagcaggcctgtgagttgttcaggttaacgtcccatgttttcaaggaatgccgcatagatcagtgcaagggtatcagtttccatttgattcggaagacggctggcatgtgccgcttggagaaggacacggacgggacgatggacgcgcacgaggggaaccacacgcccacggacggtgccgggatggagggcgagggcggcaagccagacactaggccgggcgacagactcgcgatcatccgacgtaacccggggctgtccgtgtttacccacgccgcgacactgacagccatcatggtcctatacaactggttcggtcagacttaccttctcagcagattaagcctagcctatattctctatttcttccccggcctgcttataaccccaatgacggcccttttggttacggctttccttcatgacaggctgtcttggaagaagattatctgcatcatagtcctgtcttactgtttgaccatattgggtgtattcctgaacgagttgtggtgttggcggaaagacgcagcactcgaaggtttgcggaatatttggctttttatcgatcagccaacaccggcgattaccttttatggattgcaaggatggcccaccatcatctatgggattgggctggcgctccgcagcctgatcaaacgaagcaccagtctctgatgatgaacgttagtattttccaagaacaaggttcctgatgccgggatgggaacgatagtcacatccccttgtccaaccaatgcctcacagacggcggcaaggtcagcaccgggattccattccatgacggtcttcatgttccccatagcggatgcaagatcgcccgcccacccggtccatgcgtctgggatgagcaggccgttgagataaccaagcgtcgtgacgcacatatgggccaagtccacctgctctccggaagcatcggtcatagattgacgccatccggcgattttcaaaagacaagcacaacggacgatacggatacttggacgggatttacgatgtgtctgacgaaagttaacggcggtcccaaatcaagtcaccttgtcgaggagcgaacccgtgcagccgcactccccatgattttccaaagccattgaccggactaacttgagcgcatcgtgggcgacaagtggccgttgcagcaccgtcacgtgctcggccaggccatccgcatccgctccccgtacgtggacgcgctgtccgtcacccaggtgctcgccctcaggtcgctgcgcaagaaggtggacaaggaagagctctcgcaaagccagcaggcaggattcatctatctgatcctctgcaccgtttcaggtgttgctgccggcctgcagaacacaggctgatccgcgcctgaccgaccgacaaaagcgagcggggaggttccgtgccgataagcggcgcgggcctccccgttcgcgtcgcacggccctagactggccggcgacggcgcgcatagaacgggcgcgctggccgagtgacagactcggatgatcggaggggacatggacaagccatcgaatgagcgcgggagcaccgggccaacggacggcatcaaggcggagggcgacgccgggaacgaacgccacatttgcaaagcgaatccggttatgatcgatggcattgggaagaaacacggcacagaagatatgtcagaagatttttccggcgagaaatgtgctttggcaccgaaagcagctaccaaattccctaaggcgagtagatgctatgtggctttgggcaaggccagacgcgtgctatggtggctgggattactgctgctttcaccagcacttattttgtgggcggaatggggcgccaatggcgatgatgatactataatctgcagagtcttaacgttctcttcctcttcgtgcatgaatttaactacggcaactgagtatgtacgtagacttaccttagtattgattatgggggtagtctgctggattgcggcgcttgtcatctttggcgtgcgttcatatatgcgatctgtatatccggaacttcgtgatcattcctcttccgcctcgcatgtccttgtgggaatcatatcgtttctcgtgctggttatggtctttcccgttcttgtgataacactactttccgctctaatgactctatgacgttttatcagaggcgcattgcgtggaatggctgaatcattccacgcaatgcgatcacaatcatgattgattaacggttcggattttcaagagattcagcataggataatgccaatataccagcctccgcttgactcgggagtcggtctgcatgtgacgcaatgagcagtgcttttttacttccggatacgttatcgaatattccaagatcgattccatcaacgagctttcgaaatgcgatgaccaggttgtccgcacttcccttgaaccgagactgatagaaccgtttaattcgattcgtctcgctttgcgcgaaagcgtcccgcatagcggtggacaatgacctttcggaggaattgctctgcatggaccgcgccagcaaccatgcatcacagtccgcgagaacatcgctgtaactgaatcccatacgggcgtcttgctcgccgagatgagcgtgcagccatgacgccaggtcctctttcggggtattcgccaggtagcttccccaaatctgcagcaaatccagagcccatccgcccagatcaccgagaccatagtccattggatcgttcgtaacgccccatgtcaagtatcccaaggatgtggcggccatatgggcgatgtcccgattgggcagcgtgcctttgatgacaggctgtgcatcacatgcgacaccgcatgcctgacgcgacaaggccaattcgctgggagtaaccggctccggggtgtacgcgtgccatagtgcctgcgtgccggaacttccttccgaccagtactcaggtttgcgaagccactgcaggatgagttgaccgatgctgtcctcataaaccgccacctgggtacccagagcggcaggggctttgtgacactcctgctcgggtgtcgccgccggtctgcagaacacgggctgatccgcggctgaccgaccgcttgacgagcggggaggttccgtgccgattgacggcgcgggcctccccgttcgcgtcgcacggccctaaactggccggcgacggcgcgcacggaacgggcgcgcgggccgagtgacagactcggatgatcggagggggacatatggacgcggaaagggacacggacgggacgacggacgcgcacgagggggaccacacgcccgcggacggtgccgggatggagggcgagggcggcaagccagacactaggccgggcgacagactcgcgaccatccgacgcacgctgtggtggataggactggcgctacagctcccattcgctttgactctgatccattttgataccccttacctgatattggagcgtatcctatgcgctattccgccaagactggcaagcgacccgtcatcaatcgtcggcattcccgcacttgaaacggaatggtgtcgagaattcctggcactagtcctgggcgcagtttgctgggttacagctggagtaatgagattagttgcggacagcccatcaaaccatggaaaagaaacccttcctgtacgcatcttcgccggaatcatcaccatcatcgtattgatggccaccggtattacaggactcttcctcggcatagcggccttttagaagtttccccgtatctggcagaggaattccaaatcgaaagcacaacagcgaatgtgtgggcagacgacacatctgcccacacataatgcattatgcgagctaccgtcttggctgatcaatgaatgcagcgaacgcccgagcactcacttcagcttcctgcttatcaggaagcttgtctgtaccggcagccttttttaggatgctttcgctcattccaatatttgtcaaaccaagtgcatcaagaccgtccgccattgttgaatatgcactcaccacattatctgcgcttgatgcaaaacgttcgtcgtagaatcgaacgatacgatgggtctcactctgcttaagaaaaattgaagcaaaacacgcagagccaacaggccggattcatctacctcatcctgtgcaccgtctccggcgttgctgccggcctgcagaacacaggctgatctacacaccagcgcatatggggaagccccgctcgatgtgagcggggcttccccgttttgtgtgcatctttcaccatcttgcaataattcttacatgtaaacagagagttcttacatgaaagaattattgaaaggtgatgaaagaacctactttcacgcgcgccaatcatcccaacacgtatcgggatgacggcccattcccctcgcggcgcaacttgcccgcatcctctagcttcttcaacaaccggtatgcactgatatagctcaggccaaacaaatccatgacatccgccgtagtgacgacaccatcatttttttcggcgaactccagaacaaggccactgcgccgggtggcatcgatgtcacgctggcgcacgtaagacgccagcccctctgaacgtttgtacactcgggcactcagcatatacgaacgagagctcccgctaccgaccccctctaccaaaccagcttccaccagattctcaacagcggacacgatgcgtcgatgctccaaatgggagaaatcgcacaactggaccacagtaagcctgcgatgctcgcgcagcagcgagagcacaatcagcgaccagaccggcaatggagccccacgtcgacgttcctcgtctccaatcatggtcacgaatgcctcgtcaggcaccacacggcggaggaacagaatgacttcttcggcaccggactgcgagtaatccgggaaagaaccgcctgccgcaatcgacccggcatagatggtatccacgcctcgtccggtgcgttcaacatatccggcagctttcagaatcagggcaagctgcggattacgggaacgcggttgtgcagtaagcaggttatcttcggagacaccctctatgaatcctccggggttggctatggtcaacccatcatcatcaaccaggaacctcaccgaacccattcgtgcataatcgcgatggcaaaaagcgttaatcattgcctcacggaatgcccctcgatcgaagtctggcagatcgacacgaatcaagccgctcatgacttcgtggctgggattccacggctccatcagctcgcctacacgatcaaacatatccaccaagggc

SEQ ID NO: 3305 - DNA, 3484 bp, Unknown
  R151_18m  MAG No. k141_5983
cagcgacgagcgagaaatcgaacgcctgaagggagacagggcgattggccatgtgcgctacgccactgccggctctggcggcaccgacaacattcagccgttcatcttccgtttccatgatggagatatggccctgtgccacaacggcaacctcaccaactgcccgtccctgcgccgcaagctggaggacgaaggtgcgatcttccactccaattccgacaccgaagtgcttatgcacctcatccgccgttccacaaagcgcaccttcatggacaagctcaaggaatcgctcaataccgtgcacggcggctttgcctatctgatcatgaccgagaacgccatgattggcgcgctcgatccgaacggcttccgtccgctctcccttggcaaaatgaagaacggcgcatatgtgctcgcttccgaaacctgcgcgctcgacattgtcggcgccgaactggttcgcaacatccgcccgggcgaaatcgtggtcgtggatgatcacggatacaagatcgtgcagtacacgaaccagacccaactggccatctgctcgatggaattcatctacttcgcacgcccggattccgatatttacggcgtgaacgtgcattccgcacgtaagcgtatgggtgcccgcctagctcaggaatcgccgatcgaggccgatatggtcattggcgtgccgaactcttctctttccgcggcttcgggctatgcggaagcggcaggcctgccaaacgaaatgggcctgataaagaaccagtatgtggctcgaaccttcatccagccgacgcaggaactgcgcgagcagggcgtgcgcatgaagctgtccgccgtgcgcggcgtggtcaaaggcaagcgcgtgattgtcatcgacgattccatcgtgcgcggcaccacgtccaagcgcatcgtgcagctgcttaaggaagctggtgccgccgaagtgcacatgcgtatcagctcgccgccgctgaagtatccatgcttctacggcattgatatttccactaccaaggaactgatcgccgcaaagaagtccgttgaagaaattcgcgatttcatcggtgccgattccttggcgttcctgtcactcgacggattggtcgaatccatcggcctgggtgcggacgcaccgtacggcggtctgtgcgtggcctatttcaatggcgattatccgaccgccttggatgactatgagactgatttcctgaagtcgttgactccggaagaccgcgtccgactgcctgaattcgccctgtacaagagcaagtacgaaggcaacgaatacaccactacttcaccccaagaagaacactgaaccctagaaaggtttgatatgccaaaagcatatgaagaagccggcgtgagcgttgaggccggttacgaagtcgtcaagcgcatcaagtcccatgtggctcgcaccaaccgtccgggcgtagtcggcggtattggcggcttcggcggcctgttcgatctggcttccctcggatacaaggagccggtgctaatttccggcaccgatggcgtcggtaccaagctggtcgttgccaagatggccaacaagcacaacaccatcggcatcgactgtgtggccatgtgcgtcaacgatattgccgctcagggtgcggaaccgttgttcttcctggattacatcgcctgtggcaagaacgatccagcactgctcgagcaggttgtggctggcgttgccgacggctgtgtacaggctggttccggtctgatcggtggcgaaaccgctgaaatgccgggcatgtatgacgaagacgagtacgatttggccggtttcgcggtcggcgttgccgagaagtccgcaatcgtggacggctccaccatcgctgaaggcgatgtactcattggcttgccgtccaccggcgtgcattccaatggcttctctctggtacgcaaggccctgttcgagaaggccggctacacggtcgacaccgtacttgacgaacttgatggcgaaaagctcggcgacgtgctccttaccccgacgaagatctatgtgaaggctctttccccgctattcaaggccggcgtggtcaagggtgtcgcccatatcactggcggcggcttcatcgaaaacattccgcgtatgattccggacggcttggctgcgcacatcaatctcggctcttggccggtgctgccgattttcgatgtgctcgagaaggccggcgaaatcgatcatatggaaatgttcaacatcttcaatatgggtattggcatggtgttggcggtcaacgccgaagatgccgataagaccatggaattgctcaagtccaatggcgaagccggttatgtgctcggcaatatcgtcaagaagaccgatagcgacgtcgaactgcagtaaatacatatacgggggtgagccataacggccacccccttttatttccaaagacgttcctgaacataggattttcccagaagggacataacaggaggaaacatgaaggttctggtcatcggttccggtgcacgcgagcatgccatcgctcatgcgcttatgcgtggcggcagcgtcagcgaagtcacagtggctccgggcaatccaggtatggagcttgacggcatccgcatcacgcagatcaacccgtccaatcatgccgcgctgattgattttgtaaagaacaacggctacgactgggtgttcgtcggtccggaagtgccgcttatcgagggcatcgttgacgatttcgctcaggctggcatcaaggcgttcggtccgagcaaggccgccgcacagatcgaggggtccaaggatttcgccaagcagctgatggagcgtcacagcattccgacagcaaagtatcagacgttcagcgatttggagcgttccacgacttatgttcgtgaacacggcgctccgattgtgatcaaggctgacggtttggccgccggcaagggcgtgaccgttgccatggatgaggaaaccgccatcgccgctcttgaagacattttcgtcgatcatcgtttcggcaacgccggtgcgaaggttgttatcgaggacttcctagagggtcaggagttctcgctgatgagctttgtgaacggcactgatttctggccgatgccgatttcgcaggatcataagcgcgcatatgatggcgataagggtccgaataccggtggcatgggtgcgtatagtccggttccgcagatcggtcaggatgtggttgataccgctattgagaccattgtaaagccgaccgttcaggctatggctgatgagggaacgccgttcactggcattctgtacgctggcttgattgccaccgctgacggtccgaaggtcatcgagttcaatgctcgttttggcgatccggaaacggaagtcgtgctgccgaagctcacgtctgatctcggcgctggcatcagcgctctgctcaatggcgagactccggaattcacttgggataacgacaatgccacgcttggtgtggtgctcgccgccgacggc

SEQ ID NO: 3306 - DNA, 5044 bp, Unknown
  R151_18m  MAG No. k141_6189
actcgggcgcggcgatcggaccgcataaatcctgggtgccttgctcgtcgaatcgctccgggaacgggtcggcgaaaccccacgagtcgatcagcggccacaaatcctgaccatcctgatcgccttcgggcggaaccaccagcaatgccgtgccacgcggcgcacacgggaacttatgaaaattgccgacccacccaatcggactgcagtccgccgaccggatcggccagttgggcgggagcgtgcgcgccatcaaccaaaatgcggatgccgcggcgatgggcttcggcggcgatgcgctgggccggaaacagcatagcggtggcggaagtaatctggtccaacacgatgaacgacgtacgctcgctcatctgcgcggtcacggcgccgaccacgccattctcgtcggcgtcaatggtaactggtgcatctccctcatccatgcgaatgatacgaatcgcctttcatcccaatgatttcgctctcgtggccgatacccgcatgccgtcatgttccgtaccttggaatcagaagtcgagagatatggtccgaaaccgaatggagcggaccgaagcagggagcattgaagatgggatttctcaagaacttttctgaaccgtttgcgttcgcgctggcattgtggccgtttgtgtccatgctgctgacggtgccggtgctggcgttgctgtatcatcgcgacaatcgcatccgactgtcgtcggccatagtggcgtatggcacggtgctgtacctgctcggcctgctgtgcttcacactgtatccgatgccggccgatgcggcagcctattgcgccgcgcaccatctgacgccacagctcaatccattgcagttcatcggtgacatccgtaccgatggtctcaccgccgtactgcaaatcgcgtttaatatcgtgttcttcctgccgttaggcttcatcatgggccgtatctggcgttggccgctgccggttaccgcagtactgtcattcgccacgtcgctgtttctggagacgatgcagctgaccggcctcatgggcgtgttcccgtgcgcctaccgtctgttcgacgtggacgatctcctgtggaacacgaccggcgcgctgatcgggttcgcgctggccatgttctcgctgcgcctgattccggcgcgggtcgccgatacgacgccgaccaccacacccggcttcatgaggcggctgatcacgttcatcatcgacatgacgctgatcgggttcgccgtgatgccgacgcatctgttcgtcatgatcgtccaatcgaacctgccctcgggctccaacggctcatggcagtcgatggaaccgtttgactggaccggttcgatcctcttcctagcggcgctcatcctcttcgagggcgtggtgccatggttgcgcggcggctgcacgttcggcggcagcttcacgcacatgacgatagagacccggccgcgcgaagggtggcttcgcgtggcgttctatgtggcgcgcatggcgacgctgatcgccgtggcgtggtggcatagtggcggattcaatctgctggtgttcatcggcctcggcatcttctggctggtcaagcgtcagatgccgtacgacctgatataaaccggcgctccgctgcttggcgttacaggaaaacctccgaccactggtcgggattcggaatgctgcgcagcgggccggccaacgatacggccaatcccgctacggaacagaccacggctacggccatcaccgccgtgaaaccgagatctggctgttgcaacagccagccgaccatcgccgggcatgctgcgcccagtatgccgaccgtggtttcaaatacggcagaagcccgcccctgcatgttgtcgggtgtcttgccgtagagaaagcccagcagaccagcgttcaacgcggggaacggcaggacggccagaatctggcagatcagaatggccgcgtagctgtgcaggaatagcagtggcatctggctgaccacgaacaacgccagcgcgcccgcaatcagtttccctgtgggaaccatatcgactagcttgttggccaacagcgagccgaccaaagtactcacgcccattgccgtgccgagcagtccgatcatgaccgcgttggcgccacgggtggccaacatgatctgcgcgccggtgatactggctacgcaggcgatgttcaccattgcaccgagtatgatcgcgtataggaagacgcgcttaatcagggcccatcgccagccttcgaccaagtgcgtgggaaatggcacaacagaagtgccgtgggcccaaacggcgaccacggcttagcgcgacgagtcaacgcgcattagctgtctgcgaacgacaccaacaccttgtacataacaatgcccctttgcaaaaaacaaactccaattattgtaccagttcgagcatagaaccaggcgcgtcactgggcacaacataatcggccatcaatggtttctcggcttcgaggggctgatttcgtccggtggggacatctacttggctttcaaggggctgttcaaacgccgaaccgcaagtataaacagctatgtggcaacgacatgacgccatttcagagccttgtctacttgggcatcagccccttgaaacgcaagtagacctccggcgaacgccgaatcagcccctcgaaaccgagttaggcattcttttcgcgtttgagctgccgttcgagggcgtaataggccgcataacagcaggcgacgaacggaatcatgcaatacagggtcgaacgttgcgtctcatcgagcaccacgagcaccagcgcgccgatgcacatcacgatggccagccacggcagcaccgggaaaccgggcgcacgatagccgagctcatcggcgctgtgcccatcccgcgcccatttgcgccggaaacggatatggcacacgcatacggagaaccacaccaccagcgtcgccaaacctgacacggcgaccaacaccagatacacggtcgaggcggcgatcacggaagacagcaacgccagcagtgagcccgccatgctgaacagcacggcccacaccggcacaccacggaaattcgtcctagcaaaacgttcgggaatcagccgctccttggccagcgaccacaccatgcgcgaacacacgtacaggccggagttcgcggcggaaagcacagccgtcaacaccacgaagttcatgatgtcgccggcgaacggcataccgattgactggaacaccagcacgaacgggctcgtatccacgccggcctgatgccaggggatcaaggccgccatcaccagaatcgagccgatgaagaaaatcgccaggcgcagcaccgtggtgtgcacggccttgggaatcgcacgcgagggatccttggtttcgccggccgccacgcccaccacttcggtgccggagaacgcgaacaccacggtcagcagagtcgagaaaatcggcgcgataccgcttgggaaccagccgtcagccacgaagttgcccagcaacggcgcggaatcatgaccggcaatcggtatggcgccgaagatcgccagcaggccgatcacaatgaacgcgatgatggcgaacaccttgattgacgcgaaccagacttccgcctcgccgtacagccgcacggacatgatgttgagcgcgaacaccaccacaatgaacacggccgaccacacccaggacggcgaatgcgggaaccatcgctgcatcaacagccctgcggccgtgaattcggaggcgagcgccaccgcccagttcagccaatacaggatggcgatggtgaacgcggtgccggggccgatgaaccgtttcgcgtacatatggaagcttccggcgtacggcatggccacggacagttcgccgagcgagaccatcacgcaatagacgagcagggagccgaccgcataggcgagaatcgcgcccagcggaccggcctggtgaatcgtatagccggagctgacgaacaggccggtgccgatcacgccgcccagggagatcatcgtcaggtgacgcgactccatcttccgttcaaggccggtatcgtccttgggtgtgccggctgccgccatgctcgggtctcctttggtcgggtgaacagttgtgtctcgtgtcggttgtgcgggcggcgctcgatgccgcctaccatatgatagcggtaacacgaacagcgagtggaacacgaggagtttggaatgatggaactgtatatcggatcgcatctgtcgacggccggcggatggaatgcgctgctggaacgttcccatgaggagggcggtaccgcgttcgcgttcttcccgcgttccccgtacggcaagcgttcgaaggcgctcgacccggccggcgcggcggcgttcggtgcgcgtctgaaggctgagggctatgggccgttggtcgtccatgcgccgtacgtctacaatctggccggcaaggatgaggccaagcgcacattcgcgatcgaggcgttggccgaggacatcgagctgctgaccgccatccgcgaggccggacaggaggtgtatatcaatattcatcccggcgcgcatgtgggccaaggcaccgagaccggctgccggctgatcagcgagggactgaatcaggtgttcgagcgcgcggccggcgtcatggtgcttctggagaccatggccggcaaaggcacggaatgcgggcgcaacttcgaggagctcgccacgatcatggatggcgtggagaataaggcgaacgtcggcgtcacgttcgacacctgccatgtgttggatgccggctacgatttggtgcacgactacgacggcgtgatgcgccagttggatgaggcgatcggcttggccaaggtcaaggcgattcatgtgaacgattcgcagtttggcctcggctcgcacaaggaccgtcacgccaatatcggcgagggccagctcggcatcccgtttttcacgcgactggtcaacgacccaatcatggccaagctcccgatgatcctcgaaaccaaggagcagacgcccgccacgcatcgcgacgagatcgagttgttgcgcggattggtgcaaaagtagtcgtagtcgacc

SEQ ID NO: 3307 - DNA, 4686 bp, Unknown
  R151_18m  MAG No. k141_6532
cgggcaattccttggaattgcaccggccagattcctagaccctaacggcctaatggtagcggggcatggatttgaaccatggacctctgggttatgagcccagcgagctaccgagctgctccaccccgcgtcggcttgtctctcagacagctctatctacaataggtgcagattccagaaagtcaacatcggcgtgtcgtgtcattttcccacggttctaaaacgtgaatcggctcacgcagcgaggggtttggggcggagccggagtcggggtgataacgcgccataaatggccgttataggaatgccctgaaccgttatcccgaatattgacataataggaacatgcctatcaagatccccagtggcctgccggccagagatatcctcgattcggagcgcatcttcgctctggagaagcccgaggcggagcgtcagcgcgtccgcccgctcaaactggtggtcctgaacttgatgcctaagaaaatcgagactgaaacgcagctgctgcgtctgatttccaagtcgccgctgcaggtcgaaatcgacttcatgaagacctccacgcatgaggccacgcacgtttccgccgatcatctcgtcaagttctacgaaaacctcgatgcgttcaaagacaactattacgacggttttgtggtcaccggcgcgcctgtagaacatatgccgttcgaagatgtggactactgggacgagttcaagacgattctcgactgggcctccacccatgtgttctccaccatgtacctgtgctggggtgcgatgggcgcactgtactaccgctacggcatccacaaggtggattaccccgagaagattttcggcgtattcccgcagtacctgcaggacgaatactgcttcctgaccaatggcttcgacgagattgatctgcagccgcactcccgcctcgccggcgtgaacgaaaacgaggtacgtgccaaccatgaccttcagatcttgacttgggggccgcagtccggcccgggcctaatcgccacacgtgacttctccgaagtgttcgcgctcggccattgggagtacggcaagtacacgctcgccgaggaatacgagcgcgatatggccaagggcatgaccaacgtgcccttcccgaagaactacttcccgcatgacgatccgaagctggaaccgttgttcgtctggcgtgcccacgccaatctgctgtggcgcaactggctcaactgggtgtaccagaccacgccgtacgacctgaccgaggtgccgcagctcagggctgagaagaagctcggtactgatcgttcgattcggcatgagccgggcgggccgcgtgaggatgacttcaagccgtttgttcatgacggatacggggttattcagggctgagcgttcgcaccgtggacggcaatccgtccacgatacggacaacctgatgaacataatgccacacatccgccatatgcgaccaatagcgcgcgaagccggcgaaacgcccgggaaagccttgcgccagtaggcctcggaaaagactcgccggtgtaatattgactttgtctagacacaggcaaataatcactcttcagtcattcggagtcgaatgcccagcgtcgactccccgtccgcgcccggcatgctccatccgaggggcgcgaaagttacgagtacgtcacattcgcacatctcttgggtttaaactgacacctgatattgaagaagcaggaggcgtgatatggtcggttcgctcggcgcaggattgctgttggctgacgaggcaggcgctcatctgccctcggttggtgacttccttcccccggagattctgttccagggaactccgtttgctatcaaccgcattattttgattcgtatcgtggcaaccatcgtgctgttggtggtgctcggcgtgaccgcaaagcgcgccaagctcatccccggccgttggcagggcgtggtggaatacggtcttgacttcgtgcgtgacaaggtcgtctatgacgtgatgggcgaggttcgcggcaagcgctacgtgccgatgatcaccaccatcttcttcacgattttcatcttcaacctgtgtggcatcatcccgggtatgaacatggcggccaccgccactgtggtcatgccgctggtgttcgccatctggaccatggtccagtattggatcgccgccgcacgttcgcaaggtcttggccattatctgcgtcacgagctgttcacccccggtgtgccgtggccggtctacatcctgttgaccccgattaacatccttgagttgctggtcatccgtccggcctccctgaccatccgtctgttcgccaacatgatttccggccacctgatggtcgccacctgcctggcattcgcacagtactggatcgtcgatgcagccaacaagctgcaaggcatcccagtcggcgcgatgtggttcgtcagcggtcttgccatgacgtgcttcgaggcgttcgtcgccttcctgcaggcttacgtcttcgccattctttccaccgtgtacatcaacctaagcttcccggaggagtgaggttcaaccccctctttcggaacccggcctcgcctaggtaggcaggaccgaacgaaataagatttataacgtcgccaagtacgttagaaaggaaacacaatggatatcatcaccctcgcagcggtcgccggcaacctgtccgtcatcggttacggtctcggtgcggttggccctggcatcggtctgggcatcctcttcggcaaggccatggaatccaccgctcgtcagcctgagatgtccggcaagattcagaccatcatgttcatcggcctggctctgatcgaggtgctggcactgatcggcttcgttaccgccctgatgttccactgatcgaacgttttctcagtcgaatacagaaggcaaaacgaatccaccagtgaaaggaggacttcataatgacgctcgcagaaggcggaattgatctgttcattcccgagacctatgacattgtgtggtccctgatcattcttgtcatcgttgcggtgttcttctacaagttcttcatgccgaagttcaatgcgatcttcgacgagcgcgccgccaagattgaaggcaacatcgccaaggcggagcaggctaagaaggacgccgacgaggccaaggccaagtatgaggcccagctgagcaccgcccgtgtggacgccgccaagattcgcgacgacgcccgcgcagaagcgtcccacatcatcgccgacgctcgttcccgcgccgagtccgatgcggctcaaatcaccgcatccgcacagcgctcgatcgaatctcagcaccagcaggccatcgtctcgctcaagggcgaggtcggcgcacttgccaccgccttggccggcaagatcctcggtgccaagctggaagacagcgacgtgcagtcctcgatgatcgattcgatgatcgacgacctgggcgccaagaagtgaccgtgaccatccgtaaccagaaagggaggtgaccatgcgaggagaggcatcacgtattgcagaccgcgagtcgcgtgattcgctggccccgaaactgcgcgacacccgtgaggacgcgtggcggatcggcaacgaactgttcacgatcaccaaggtgctcgatgacagcattcagctggaacgcgcactgaccgacccgtcccgcccggtcgccgacaaggtggccgtcctgaagggactgctcggtgacaacgcgcatcctatgaccatggagatcatgaccgacttggtctcccgccgttggagccgtgcgcgcgacatcgccaacgcggtggaggacttcggcgtggacgccatgatgtactacgctgacgccaccgacgccacgctgcaggtatccatcgagctgtccgagctgcattccgcactgctgaacctgccggtcgtccgctccaagctgtacgactgccaggccaccagcgaggcccgtgtgaagctgttccgcgaggtgttctccggcaagaccctgaacaaggtcaccatgaggctcgccgaacacgccacctgcaacctgcgccgccgccgctacttggagaccatccagtggctgatcaacaagttctcccgccacatgggcgagtcgatggtcaccgtgaccaccgccaccccgctgaagaaggagcagattgagcgactggtcgaggtctactccgccaaggtgggccgccaggtgcacatcaactcggtggtcgatccgaccgtactgggtggcatgcgcattcaggtgggcgacgaagtcacggacaacaccgtggtcgcacagctgcagaacctgcatcgcaaggtgcagacggaggcgactccggcctgaccggccgagccaatccgtccaacaccacacacaagcaaagacttgactgaacaataaccaatagaaggagtgatcatggcagaactgaccatcgatcccgcctcgattcgcaaggccctcgacgacttcgtgtcgtcgtacaagccgagcgacacccccacccaggacgtgggctatgtcgccacggccggtgacggcattgcgcacgtgacgggattgcctggttgcatggccaatgagctgctgacgttcgaagacggcacgctcggcctggcgttcaaccttgacgcccgtgagatcggcgtggtggtcctcggcgatttcgcaggaattgaggaaggccaggaagtgcgacgcaccggcga

SEQ ID NO: 3308 - DNA, 10187 bp, Unknown
  R151_18m  MAG No. k141_6814
catcgttgcccgacgtgttgccgatcaccacacgctttccttccgcgcatcgcgcataaaacctcggaaatccgccgtttctgttcattcagcccgagcaccatgccggtgccacgcctcgatcggcggctgagaatatcaacgccgccagcgaacaatcctcatcaagcagcaggcatcgcaaggagaacaccattgctcgcggatcgcccagccaccataaggtgtaggcgatcacggccaatggttgtatgcagtacggcaccggtgaggcttcggcgatatcgagcaacataccgatgccggcatggcaacgctccttatccggcatcatgccttcatcctcgaatgcgcaagtcagcagctcgcccattcgtgttctcgtacgcgccagatgcggtcgcgccgcgaattccataagccatgacttggggcaacggctttcatcaataaccaacgagagaatcagcgcatcacgaatcgataaggtctcacgcatgcccaccgcaaacgcggccatcgtctctcggcctaggtcggtgttcccggcatcaagacaagacagccattcgtccaatggttcggccacccagtcggcattagcctgttgcgcgcctcgaagtcgtcgatcattgcgaaattcctgtgatctcgtctccaactcgtcaaagacaaaaggctccgtctgttcggcggcgtgccgtttggcgtgtcggttcttacgcggcttgtgtggcgtgttgttgttcatcatatcctccttgactaatggtgtgcaatctattggtgttgtggtgcgcgccgagccgggtagctcatgcgccgagggggtgtgtgcccactatggctgaaaacgccgtatgacgcaggaaaaaacgaccattgtggttctagcttcaaaacccttgattcccaacgttcttgtgttcttcaaaccctgtggataagttattaggcatgtgcacaactgctaacaaccgcgaaatcatcgagccacgcatcattcagttggtgcgggaactgactgccgctcccgccaccgatgaggttgccgacgccctgaaaccggtgatggaacaggttgtggaccaagcctcctcctccagccaaggaggcaaacgactgcgtgcgttgctcgcattggacgccttcgatattcttgccggcgacgtgactcctgatcggcgtgacgccatgatcgacctagcctgtgccattgaagtgtttcagacggccgcactggtgcatgacgacatcatcgacgaatccgatctgcgccggggcaagccttccgcacaccgtgccttggaacaggccgtacacagcggtgccataggccgtggcttgggcctgatgcttggcgatattctggccaccgcctgcattgaaatcacacgccggtccgccagccgtcttcccaacaccgatgccttgaacgaggcgtttcttaccatgcagcgcgaggtggagatcggccagatactggacttggccgtcgagatgaccccgttgtctgatcccgaagctctggcgaacgcctcattgaacgtattccgctggaagacagccagttacaccaccatcgccccactgctgcttgcactgctggccgcaggagagagcccggatcaggccaggcattgcgcgttggccgtaggccggccgctcggactggcgttccaactggccgatgacctgttggatgtcgtcggatcaagccgcaataccgggaaacccgttggcggagacattcgagaaggcaaacgcacagtgctgttggctgatgctctgtctgcggcagatacggaggataaggccgatctgattgccatcttcgaagcggattgtcgcaacgacgaccaggtagcccgcaccattgaactgttcacgtcgaccggtgctcttgatcgatcccgcgagcgcatcgctgccctatggggtgagtcccgtaaggcgattgccggtcttgaactgaattccgaagcgcagcgccgtctgaccgaggcttgtgcgcgattcgtccccgaatccttgcgatagtccacaatgcgagccgccgggtcatgagaccatgaacaccggtgaaaacccgtgacaactatgcgccgatgctccggccgcgtaaccggggccatgtacactgaacatgtttagtcgtgattaaaggaaccgtacgatacaacatgagtgagaacgagcccgcgcagatgattgagggacgctaccgcatcgtgcgcaatatcgccgagggtggtatggccaccgtgtatgaggccatcgatgagcgtctggggcgcaccgtggcgattaaggtcatgcacacacaactcgccaaaggcccgcatcgggagcagttcgtcgaacggttccgccgcgaggccaattcggccgcgtccatcgccaacccgcacatcgttcaggtgtatgacaccggcgagttcaatggacttgattttctggtcatggaatatgtgcatggcgtcaatctgcggcatgagatgaacgcccaaggcacattctccgtgcgtgagacgctgcgcgtggtcgcggagacgttggatggtctggcttccgcacatcgcgccggcgtggttcaccgtgacatcaagcccgagaacattttgatcaatgatcgcggccatgtgcagatcactgatttcggtctggccaaggccgccagccaggccacattgagctccaccggcatgctattgggcaccgccgcttatctggctcccgaaatgatcgagaacaatcaggccaccgcgcaaggcgacctgtattccgtgggcatcatggcatgggagatgctgaccggcaaggtgccgttcgattcggataatccggtgacgcttgtcttcaagcatgttcatgaggacgtgccgtccgtggccacggtctgtcagggcattgatccgtccgtggcggcgttcatcgcccatctgaccgcgcgtcaggtggatgcccgccccgccgatggcgcggcagcagctgaggaattgagccagttggccgccaaattgccgctggaggcgtggcaataccgtttgcatgccgaacccatcggaggtgatcataccgatgccaccgctgcagcgctggtaggcaatatcgccgagcaggccccgctgaccggcgtacctgccggtgcagcaacgttcgagccgtccgtaccggcgtttttggccgatgatgtcgcaagcaataccgccgataccggtggcgccgcagacgtcaatcctccggctcctccggtcgcccccaccacggcacttgattcgtcgacgccagccgatgcttcggctccccataagacgcaaatcatggcacagtccggcagcgagacacaagtgctgcctcaggccggcgatgccttcacccgagcgcttgccctttccgatgagccggacgtcgcttccaacggcaccgggccaaagaagcagcgcagcaaaaaaccgctcatcatcgtactggtgatcgtgctggtactggctgcaatcggcggaaccgccggctggtggtggtttgccggaccgggcagctattggagtgtgcccaagccggatgacgtgacctgcgatgcgaatgcaggcaccgaatgctcgttggccggcgcggattgggccacgtatgagagcacgttgaaggctctcggcatcccctacaagacgcacaaggaatacagcgacgacgtggcggaaggcaagatcatctcttcttccgtgaacaagaccaaggccgttgtgaacagccgcataagcaagcgagccaatcaggagcttacggtggtggtgtccaagggcgtgcggatgaccatcatcccgaaggatattctcgacgcgaattcggccaatggcaaggacccgttgaacgcgctcaagaaggccggcttcgataatgtcaagcatgacgagtcgaaggatgagtattcgatggacacgccgcagggtgtggcattgacgatctcccctgatcccggtaccacggccaagcacaacgatgaggtgacggttactttgagcaagggaccgatgccggtgaccatgcctaacatcgtcggtaagacccaggatgagatgcaagccgcgctcggcgagttgaagctcacggccaatgtcaccgaacagtacgatgacaaggtcgaggccggtcaagtcatttccgcgtctcaggaagccggagcccagctgaagtggggcgatagcgtggacgtggtgatttccaagggcccggagatggcgacgataccgtccggccttgtcggcaaacaggaaagcgccgtaaccaagacacttgaaggtctcgggttcgaggtgaaaaccgacaaggtgctcggtggcctgttcggcacggtacgtaccgtgaaaagtggcgatacggacctatccaacggcggcaagattcgcttgcgcgatgccaacggcaaccccaccgtcatcaccctcaccatcgtgtgagatttgaatgaggctccctctgtcttgagacgagggagcctcatttgttaattacttttcggcttcttcagcggcctgctgggccttgagctcggccttgaccttctgggcgtattcgttcacgaattcctgaccgctcattttctggattgcggtggaaacacgatcggtcagcgaacgcaaatcatcatgtgtaatttcatcagccggcttcttcgcaacctcaatcggcttgccatacaacaccttggtcttgcccttcttgggaatcgacgtgccaatcggctgcagcttgtccgagccgatgatggcggtcggcacaatcgggcaaccggtctcgaacgcaagtcgtgcggcaccggtgtgtcccttgtacagtcgaccgtccgggctgcgcgtgccttcaatgtggataccgaacaggtgcccatcctcgataatctcgcgtgcatgctcgagtgcgccaagcgacttgctgccaccggaacgatcaaccgggaacacgcccacggacgtgaaccaccacttcttgaacttgcccttcaatcccttgccctcgaagtattcggctttgcccatgaagtgcaccatgcgcgggcaggtaatcggaatcaaagcatcgtcaatcaccgccagatggttggctgcgataatcgcgccaccctctcgaggcacgttattcagtccactgacagcagggctcaaacgatgatgagcaatagggccgagacctttgacgaagaaccagtagagcacttggcattcctcccgcagacgaactagccattggccggtcgcctgattagagtgacagttatgactgagaaccagaatagcaatgccgacggagagcggccaacccccacgccgggcaacggacaggattccgatacttcgtccaagtcgtcgactcccggtgccgccggaccggccacgaatggtgccgatacaccgcaatcgcatgacgcgaacgatttggatgcggcgtgggccgcgttcgaagccgagcatcaggccgacttgcatgacgtggcttcctccaggcaggccaaaaagttcgagaagcaggccaagaaacgcgagaaggaagcactgctttccgtagatgacttggatatcggctcgttcaccgatgatgctcgcccgagccgtggcggcaaaaaaggcaagcagtcaggcccccgtgatttcaccggctccagctggctggataccgataatgtgatggatgcctatgatgatggcggcttcactcccccgaaccctgatcttggtccggtcaaagcatctacggtactgctgacggcgttgctcatcatcggtctcgcaggcgaaacggtgatgatattcgttcccggcttgaacgcgattcctctcttaggcgcgctgctcaatattctcttcggactgggcgtcattttgggtctgggcggattggtggccaaaatcctcaaccgcaaagaccgccccggtgatcagggtggctattacgacgacggcgcgagggtgtagttcgcgtaggttgtgtagtccttggctcccctctctgaggccgagccgttaagcaaacagcccagtgggctgtttgtaggcgaggtgtgagcgatagcgaaccaatgtatcgcaggcgtagctcgtccgtaattgcggccgagccaagataggtcacgaattgaagtcgatggactcctgcaactcgaaatagttgataatgaaggaaaggtaaacatattcgagcaaacccattccatatcacgccttggacttggcggtttcgatccacttgttgaacagggcttcagccttgccggagtcgacagcatcctcggccagcttgtaggcctcggcgaagcgctcggccagtgtgccgttgccgaccagattgccgtcagccacgatggcggaggcagcgttgagcagcgcggtggtgcgggacgtaatgtccttgccggccaggaagtccttaaatgcgttggcgttgacgtccggcacgccgcccttgagctggtcgacggtaatcttggcgagacccagatccacggtcgggtcgaactcggtttcggtgaccttgccgtcgcgaatctcccagacggaaaccgggccggtgggggcgagctcatccatgccctcatgcgaagtgtagaccaagccggactgaccacggctggcgtagacggcagccatgatcgggctcaccttgcggttggcgcagccgatggccacgtgtgccgggttggcggggttggtcaacggtcccaggatgttgaagacgcacggaatgccgagcgcggcacgaatcgggcccacgaagcgcatggccgggtggaaggtgcgggcgaacgcgaaggtgatgcccacctcgtcgcccacttcgccgacggcctccggcttcaaatccagcggcaggccgaggtcttcgagcacatcggcggcaccgcacttcgaggatgcagcgcggttgccgtgcttgacgatcttcacgccggctgcagcggcggccacggagcccatggtggacaggttcacggtggcgaagccgtcaccaccggtgcccacgatgtcggtggtcccaccggacacgttcagcggcacggcgtgggagaccatggccttggcggcaccacgcacctcgtcggcggtcagtcccagctgctgctgcatagcgagcgcggcacccacggcggccggattggcgttaccttgcatcaggtcatccacgaaccactccgattcctcagcagtaaggtggtctcccccgaccagcttggtgagaatcgacttccatgtgatctcggccatgatgccctccttggcgtttcctacgccgtgtgatgtatgttcgccgctcattgtaatggttcgtcatttcaaggccctgaatcttccatattgcaaaatatggcgctattgctgttttcgtggatgtcggttcgtcgtcgagccgttggtttcgtaagcgtgaggggcgttcccgcgtattctgttttccgaccaaagaaatgaatcacgaagaacgctgggcaaaagcccattcaccggattgccgaacgtcaaaggcacggttgcagaggatgcgcggatcacggattcgccgccgcgttccgaacccgtgctcgagatccgggtgcgtccacgtgcgggtatgctccgatgctcccgatgcggaaggaggcgccgcgggcatgaccaggacggcggcgtgcggcgtcgtggtcgcttccgtgccgtgggccgagccgggcagccggttcacacgcgatttcgaatcggaacgcgcgtggccgatgagcgtcgcgaaccagaagaccgtaagcggtttcccgcacgtcgcgtggcgcaccgccggaagacgccgcccatagggccgccgaacggttgaaggcgtcgatgccgtcttcgttcggcggcctcacgtcgatcggcgtggacgagaccggctaccgcaaaggccacacgtgcatcaccgcggtcgtcgaccacgaacggcatcgggcgatatgggcgcacgacgggtacggcagggacgtgttcggcctgttcttccaaacgttgacgcccgaacagcacgcctccatcagggtcgccgccggggacggggccaggtggatcgactcatgcgtgcatgagtggtgcccgaacgccgaacgcgcgcccgacgggttccacatcgtcagttggacgagcgacgcgcccgacaaagtcaggagacacccgtggaaccaggcgcgccgcgacggggacgagaaatccgtcaagcgcatgcgcggcgtcagatacgccgtcctgaagaaccccggcaagctgaccgacagacggtccgaggcgtccgggaacctgcgggacacggaccccaaggtccggccctaccgttcatgacggctcagggaacccctccggacgctgcccaaacgaccggccgaccaggcccgggccgaactggaccaccgggtgctccgggcgtcccacagccgcatccccgagatcgtcgaactcgcccggaagatccgccgtcatgggcccgccatcctcaagacaatcgaattgggctgttcaaacgccaggctcgaggcgtccgacaacaggatcaaggtcaccatccgcatggcctacggcttccaccacgcgaacaatcccatcgcgcttgttatgctccgccgcggcggactcgacatacgcccaccacaaccaagaacccaacccacgaaaacagcagaagcctcttttttgtgctatcccgtaaaactgcgggacggcagctcattttcgccgttttagccgtgccgtcccacatcaccctttgtggaccgtgacaccataacaccgagaatggcggaatttcaacgattccgtaattcgtactgcgggacgccacgctagtcaatcgattgacactcgtgccatcccgcaacagtgtgggatacgacgtcaaaatccgcgaaaatcgcgtgccgtcccgcgcgtacggcaccgcacgaatacatgctgatgaaccgcacaaaaaatggctccccgtgtggggagccatgagctagttactaactagcgatgcgtcacttctcgttctggccgtggcacatcttgtacttgcggccggaaccgcacgggcacggggcgttcttgccggtgccagggaaggtgcggccgtcggcccacggcgtcttgagctcttcgctcttcggacgcttggaaaccgggaccttgccttcggcgtggctgatcggagccggtccggcaacaggcagcgtggactcgccggccccggaggcggctgcggattcggcgatcgcctgcttggcgtccgtatcctcgtcctcttcctcgacttcgccctcggcggcctcgaccacggattcgccgttctcgtcggggccggaggccacggcgatggtgtcggcgctttcggtggtctcctcgacctcgtcaacggcctcgtcggtggtggcgacctgcttgatgtcgatgtggaacagcagctggacggactcctccttgatggcctcgatcatggagttgtacatctggtagccttcgcgctggtattcgaccagcgggtcgcgctggcccatgccacgcaggccgatgccgtccttgaggtaatccatctcgtaaaggtgctcgcgccacttgcggtcgagcacggcgagcaccacgcggcgttcgagatcgcgcaagccggtctcgccgatggtttcctccatttcaccgtactgctgcctggcgtcctcgacgatcaggtcgcgcacggcctcgacggccttcgcacccttgaggccgccgacgatcttcctgacctcgtcttcgtcgaccttggtggggatcacggtgttgagcgccttgaacaggccctcccaatcccagtccttcggtttctcggatcccttgttggcacccttgatgtaggactcgacggtgtcggaaatgaaacgcaggatgtccttgtggatgtcttcgcccttgagcacggcctgacgctcggagtagatgacggtgcgctgcttgttcatcacgtcgtcatacttcaacacgttcttgcgaatctcatagttacgggattcgacggccttctgcgcggtgcgcacgcccttggtgacggacttggcctcgatcggctggccttcctccatgcccttggccatgacctgggccacaagctgggtgttgaacaggcgcatcagatcgtcttccagagacaggtagaagcgggactcgcccgggtcgccctgacggccg

SEQ ID NO: 3309 - DNA, 6123 bp, Unknown
  R151_18m  MAG No. k141_6873
agtcagcacaagggctgtggctggtgtgataaggctcatatgttctgtccgtgcgagccctgtgccgccacactacgatgggttctggtaatcgcctgaagaatcctgaaaggaccgaaaatgactcttctgcagcatgaactgaccgatttcaaggtgaacgcattccagaacaacgagttccatgaagtgaccaaggacgatgtgctcggccactggtccctgttcttcttctacccggccgacttcaccttcgtgtgccccaccgagcttgaagacctggccaagaactacgccaagttcaaggaaatcggctgcgagatctactccgtctcctgcgacacccacttcgtgcacaaggcttggcacgacgccaacgagaagatcgccaagatcgagtacccgatgcttgccgacccgaccgccctgctggccaaggatctcgacacctacaacgaggccgatggcgtggccgagcgcggcgacttcatcgtgagccccgagggcaaggtcgtggcctacgaggtcatctcctccaacgtgggccgcaacgccgaggagctgctgcgccgcgtgcaggcctcccagttcgtccacgagcacggcgaccaggtctgccccgccaactggacccctggcgaggaaaccatcgagcccagcctcgacctcgtcggccagctgtgatcgacactgaataggcggtaaccttggctcccctctctgaggggagctgtcgctgaaagcgactaggggggagtgctcgcgagagctagcctgatccgatatgcttccctcagtctcactacgacagctcccctcagagaggggagccagtgtatgtaagggagttttcatgactcagaccaacaatctctatgacgtcgtcgtcattggtggcgggccggctggcctgacggccggcctgtacttggcccgcgctcgctaccgcgtgctgattctcgaaaaggacgatttcggcggccagatcaccatcaccaacgaagtcgtcaactatccgggcgtgggccgcaccacgggccgcgcactcacccagaccatgcgccagcaggctcaggactttggtgccgaattcctctccgccgaagccaccggtctcgacgtggatggtgacatcaaaaccgtgcacacctcacgcggcgacctcaagacgttcggcatcctcatcgccaccggcgccagcccgcgcaagctgggcttcgagggcgaggccgagtacgccggccgtggcgtggcctactgcgccacttgcgacggcgagttcttcaccggcaaggaagtactggtggtcggcggcggattcgccgcagccgaggaatccgtgttcctgaccaaatacgcctccaaagtcaccgtgctcgtgcgcgaaccggacttcacctgcgatgccgcagtggccgccgaagccaagaacaacccgaagatcgacgtgcgttatcaggtcgagctgaagggcgtcaccgccggccaaggaggcctgcgagaagcctcgatcctgaaccttgccaccggccagaccgaaacgtggaagcccgccgacgtcggcaccttcggcgtcttcgtgttcgccggctatgtgcccgccaccgatttggtgcgcggcgtggtggagctcgacgaccacggttacgtggtcacgcacgactacctcagaacctcggtgccgggcgtgtacgcggccggcgatctgcgcgtcaagaacctgcgccaggtggtcaccgccaccgccgacggtgcgattgccgccgtggaactggagcgttacgccaagcagatgagcgagaaaaccggcttggtgccgccgcgtcccactgcttccgcttatgaggagtccgaggccaaggccgcctccgccgactcggccgctggcacgacgcccgccccggctcccgccaaacgcagcgccgatgccgcagccgcagccagcgccgccaagaagcccggcgaactgttctccgccgccatcaagcagcagcttggcgtggtcttcggccgcatgacccgcccggtcacgctcgctctcgagctggacggcactccgctttcggcggaattgcagggcttcatcggcgagatggtcgcgttgtcgaatggcaagctgaactcggtcgccgtcgatgccgcagggctgatcacggcggtggatggtgcttctgtgcctacttctttggtggttggcgagccattggccgtcactttgccggacggcaccgaactgcccacttatggttcgttggacgattccggccgcgccacattcgacgtcgccggcgtcctgccgctcgcccgcccgaccgtgcgcatctgcgtgccggctgagggcgacggcaaggccggcaaggacggcaatggttcactggtcttcaccggtctggccttccacggcgtaccttccggccacgagttcaactcgttcgtgcttggcctgtacaacgcggccggtcccggccagccgctgggcgatgacctggtcgaacgcgcgaagtccatcacggacccgctgaacatcatgatcctcgtctcgctcacctgcacgatgtgcccggaaaccgtgcttgcttcccagcgcattgcctccctgagcccggccgtgcgcgccgaagcctacgacgtctcgcacttccccgaacttaaggaccagtacggcgcgatgagcgtgccctgcatcgtcatcacccacgccgacggcacccagcaagtcgaattcggcaaaaagagcatcccccaaatgctcgaactggtcggcgcgtaagccgcacgacctcaggtactcaacagcaacaacaacgattctgccaaaatcgtgacgtacatcgattgatgcgatcgatgcgcccgactccggcagaatcgttgttttgcggcagctcagcctcggtcttcgacggccttcgtgacgtttctgtcgccgaggtacttgaccaggctgatgctgatcagggccacaacgaacaggccggtgagcaccgggatgagtgcggcgtagcggtgggcctgatcaggcgcgtgggcaactacgaacgaggccaactggttgccggacagaccggcgaacgcccaggcgctcagcgtcagaccgtgcgtggtggagacggttttggtgccgaagtgctgatcaagcagcacgggcagcgtcgagaaaccgccaccatagcccgcgttgacgaggaacagcatggccagcacggcccacagcagagcgttgtcgatgctgttggtgaagatctgcagcaagcacacggcaatcgacatgatgaagattacctgatagacggtctcgcggcgcttcaggtggtcggagagtgtggagaagcccacgcggccagccgtgttgaacacggagtccacggcgagcaccagtccgatgatgccggagatggcggcggcaaacttggcggggctcaggttggcatactgcgggaaggccctgagcacatcgtgcaggatgtccttctcttggctgatgagggccaggccgcaggtgatgttgatatagaaggctatccagatgccccagaacacgggcttcttgaggattgtcttgcggctcacgtgtgaggtcgcgggatcgtacacccagccggccggacgcttgatgagcaggaagccgacgaacatcatcaccgcgtagaccgcggcgaggatgaagaacatgctgaccaggccaaccgtgccgatgagatattccatcagtgggctggcaatggccttggccaggccgaagccggcgacggcgatgccggtggcgaggcccttgttgtcggcgaaccaaagcatcaggttcttgaccggagtcagataaccgacgcccaggccgatgcccatgatcgcgccataacagatgaacacgcccggcaggaagttcagggcgatgctcacgcccgtgccggcgaagccgaccacgaagcagaccatggagacgagtgcggatttcttgatgtttttctccaccattggcccggcaaacgcggcggacatgccgaggaagaagatggcgagtgagaagccccattccacggaggcggggctggcgtggagacggtcagcgataagctgcttgaacacgctccagcaatagacggtaccgattgggatgtgaatcagcagtgcgggaataatcgcgctggtccaacgattctcggtaaaccttgccatatatggacggatcctttcgtaactggtgtacgatgacctgccgacccgaacgagagtcgtatcgcccatatccacgcacatcacgacggcatgcccccgtgaaccatccgggctgcacgaatcgaatcaaatcgaatcgtgcgaactgcgaacaattcgctaaacatccttggtgtgcatttcatcggcgctgctggctcttgtcgacgccgacaaacagaactataacgctgttatggggttgctgtggctgatttctgtggtcggaagctatgagctttctcacatcgaaaacagttatatgacggtatcggcgtgattgatacgtgacgtctgcccgtggacgcggcatatccctctcggaaaacaatgactccgtcatgtccatttcttggtttgacatgttttcgtttgcagcgtcggtgctcaccacggtgaccgcggcgttcgagtcgccgggcagggcctcgaccgagggtctcatcctcggctgagatgtgggcggtactatggattcttatcgataaggttcgtgatatgcggagatggtaacgatggtgaccttaaaggatgtcggcgaactggccggagtgaccgccaccaccgcctccgcggccctgcgaggcaaggattacgtcaagcccgaaaccacgcaacgcgtgtgtgacgccgcccgcaaactcggctacaaaatcaacctgtctggccggtccctgcgttctgggcggtccgataccatcaccttccttacctcgggcctcgagggcgactatttctcccatctggccatgtgtgtggctgaggaagtgcacaagcgcgactcgcacatgctcatcgaactgtcccggtatcttaccgacgacaacgatctgtcgtacacgttttcggacggcatcatcgccatcaatgcgtcacgtgcggtcgatatcctgaagcggcacccggccgtcatgctggaaaactacgacaccagcctgcccatcgacaccgtgaacgcgccgagcgacgccggctcacgggcggcaatcgaacaccttatcgcgcgtggctgtgcgcgcatcggcatcgtcggcgacaatcacgatcccaacaatcccaacatcattcccggctcgcgtgatattcgtatgcgggccgccaaggagacgattctcgcggccggactgccgtttgacgagcgccgtgatttcatcaaatcctcgtggtcgattgacggcggtatcgaggccgggcgcggcttggccaagaaaggcaagtgcaagtacgacggtctgtactgcctgaacgacggtattgcgctcggtattctgcgtggtctggcggacgatggcgtaagtgtgccgggcgatgtgcgcgttatcggcttcgacggcctgagccagagcatgtacagcgtgccgactttgaccaccgtggccaccgatttcaagggcatggcggataccgcgctgaccttgcttatgcggcgtatcgagaacctggacgacgagttcttcccgcagaccgtgaatgtgggctataagctcattgagcgcgaatccactgcggcgtagagtctttggccgtgttgagcttcaattgggtgattggactggcaccagcggctgatatcagatatgccgaaagcagcgatgatcggatttaagttgctggagatgacaggatggattgctctttacccctttcaccatcttgcaataattcttacatgtaagaactctctgttaacatgtaagaattattgcaagatggtgaaaggggatgctcatgttgccggccaaagaaagtttgacggttgagttcaagagtgagcagaagcgccctcaatcgcatgatgaaattgttgacaacgtagtggctctagccaataccgaaggcggcacactgtatctcggtattgaagacgatggcactgtgaccggcgtatgtgacgagcatcgcaatatcaat

SEQ ID NO: 3310 - DNA, 41444 bp, Unknown
  R151_18m  MAG No. k141_7008
ccaccttgcgggccgcgtcctgatagcgcaaatgatcgaacacccaacggcgatcgtcgtacagggaatgccggtagctctcgaacagcgtgtctatacgtgcctgcaacgcatccaagtcggcgtaatcatccagctgatatcggcaccagctcgggcggattggcggatggggtgagatgatcttcgctcatagtcactaccatagtgccgtgccggcatgggcccgaaccatgcctgacatgcggaccggggcatgttgatgaaatctcgcgactcgcaggtgacaaacagtgagatgttaacgcccctcgtaacacggttatggaacgataggcgactatggataaacagcaggagtttgcgctgcgcacggtcgaagaacgcgacgtgcgctttattcgtctgtggttcacggacgtgttgggaacactgaagtccgtggcgattgctccggccgaactggaagccgcgtttgaggagggtctcggcttcgacggttccgccatcgagggcatgacccgcgtgtccgaagacgacatgatcgttcaacccgatcccgcgacgttccagatcctgccgtggcgcggtggcccgcaaggtaccgcccgcatgttctgcgacattctgaccccagacggcgagccttcgctcggcgatccacgtcacgtgttgaagcgtacgctcgccaaggccaaggacaagggcttcacgttctacgtgcatccggaaatcgagttctacctgttcgaaagccaggacgactggtccaaggccccgaccccgatcgacgagggcggctacttcgaccatgtgccgcgcagcccaggcatggacttccgccgcgccaccgtgaacatgctcgagcaaatgggcatctcggtggaatactcgcaccatgaggcggggccaggccagaacgagatcgatctgcgatacgcggacgcgctcaccatggccgacaacatcatgacattccgtacggtggtcaaggagatttccttggagcgtggcattcgcgccagcttcatgcccaagcccctggccgacgcgcctggttccggcatgcacacgcacctgagcctgttcgaaggcgattccaacgccttctacgaggccggtcaggagttcaacatgtccctgaccgcccgccagttcgccgccggcatcctgtaccatgcggccgaaatctgcgcggtcaccgaccagtacgtcaactcgtacaagcgcctgtggggcggcaatgaggcaccaagctacatctgctggggccacaacaaccgttccgcgctgctgcgcatcccgcagtacaagccgggcaagggcaactccgcgcgcatggagttccgtgcgctcgacccggtggccaacccataccttgcctactcggtgctgctggccgccggtctcgatggcatcgataagcagatgcagctgggcgaacccaccagtgatgacgtgtgggagctcaccgacggcgaacgtcaggctatgggcattcagccgctgccgcgctcgctggacgaggcgctgaagatcatggagaaatccgacttcgtggccgacgtgctcggcgaacacgccttcggctacttcctggacaacaagcaccaggaatgggaggagtacaaccagcaggtcacgccttacgagctgaagaagtatctgccgaagctgtaatcgcaagcgttgcacatgtgccgaaccccgtcgatgattggtcatcggcggggttttctatagcgtgtcgtggtggtgggtagcgggcagaggtgggaatagtgttgtcgctgagttgatacgaaaaacgattgacgtaaccgacgaatcagcttgtagtacgagcgagagcactcaagagagcacccatgacgaacacacctgcgaacaccgcgcgcaccgaccgcttcttcaatctgccggtcaccatcctgatcttcgccagcttcatgctgggcatgagcgaattcgtggtagtgggcatcctgccggacatcgcatccggacttaaggtctccgaagtgaccgtgggtaatctggtggccatcttcgcattcgtgtacgcgccctgcacgccgctcggatccgcattatccgcccgattcccgcgctttctcacctatctgacgttgatgggcgtgttcctcgtcggcaatatcctgtgcgccttcgcgccgaactatccggtgctgctcatcgcccgactgctcatcgcctcggtgtccggcacgctggtggccatctccatgaccttcgcgcccgacgtgaccaccgacaaataccgcaccaagttcattgcctgggtattctcgggtttctccatcgcctctgtggtcggcgtaccggccggcacttgggtggccaatactttcggctggcgtgtcacctttgccttggtttcggtgctcaccgccgtgctgatggcatcgatggcagtgtctctgccacgcaactcacatccggcgaagatcggtttcctgaggcaattccgtctgttcttcgaccgccgcatccagctcggcgtggcggatgtggtctttggcgcagccgcctcctacgtcttctacacgtatctctcgccgatcatgcgcgacgaaatcggtgtgcccgaacgctatatcagcgtcggcttggtggtctacggctgtgcctgcctgtggagcaacctgtacggaggcaagctggccgatcggggcaggggggtcgagccgctgacccacattcgaccgatctactgcgtgcaggccgtctgcctgtgcctgctggctttcgcctcgctggtgccggccggcggcgcactgctgctggtggcgcttggcatgctcatgtatctgcagaattccgcttcccaggtgctgtatatggatgtggcctaccaatcccatcccggttcggtgaatctggccgcctccctgaattccatgtcgttcaacatcggcatcgccatcggctccgcggtcggcggcctggtcaacgacctccttggcctgacctggctcggcccggtcggcgcgatttttgcgttgctggcagccggcaccacgacactgctgcgtccgtacgtcagcccggtcggggaatgacgggtggcgtgacgcgcgggaacgaagggtttttcccgcgtgtccccgcggcatgccttatccgccgattgccgtccattgataacctgctatccaaataaccgataaggccacagcatgtcatcctgctgcgaaaccttaatgttaggacaccggctgcagggggacccggctcacgggcgcccacctgcgcggattgatgattatcggcatgttcagcgtgaaaatggggatgacaatatgacggatgcgactgcgaaagccgcgccgaaggcggaaagacggcggcgcgttctccgttccggcgctcgctcatcgatagtggtcggcggcgccatcgtgctgttcttcgtgctgctggcgccgctggccgggccgttgtcggccatcaccggcaacgacccgtacgccgagcatcccgaggccttgggtgccgggtcggtgccggccggattcggcggcggcatcagtgcccggcactggttcggcgtcaccccgctgcgcggcgtcgacctgttctccatcgtggcgtacggctcacggatctcgctgggcatcggcgtcgtctcgtcggtcatctcgctggtcatcggcgtggcgctcgggctgctggccggctatttccccgggttggtcgatgcgctgatctcgcgcacgatggacgtcttcttcggcttcccgttcctgatcttcgcgatcgcgctgtcggcggtggtgccgcagggcttcccgaggccggtgctgctgacgctagtgctcggattcttcggatggcccggcatcgcgcgtcttgtccgggggcagacgctgacgctgagcaagcgcaatttcgccgtcgcgtccaaggtgatgggcgcctcgcctgcccatgtgctgtggcatcagatcctgccgaacctcatgccgctgctcatcgtcaacatcacgctgtcgattcccgggcgcatcggcgccgaggcgggcctgtcgttcctcggcgtcggcatgaacccgccgacgccctcatggggccggtccatctccgacgccgtgcagtgggccctggtcgacccgatgtatctgatcttcccgggcgccgccctgttcctgctgaccttcggcttcaacctgcttggcgatggcctgagcgacgccatcgacccgcgcaagggggtgcgtgcatgagaatcctgcaatacatcggcaagcgcgtggcgagctcgatcgtcgtcatcctgctcatcacgctggcgctgttcctgatcttcttcctgctgccgaccaatccggcgcagctgtcgtgcggcaagccatgcacgcccgagcagctgcagcgggtctccgccttcatgggcaccgataagccgtggtacgagcagatgggcaattacgtggcgggcatcttcgtcgggcgcaccttcggcagcggcggcggcgccgtggtctgctcggcaccatgcctcgggtattcgttccgtctcaacgaatcggtgagccagctgatcctcgaccgcttcccgatcaccgcgtcgatcgcggtcggcgcggccgtgctgtggctggtcatcggcgtggcgaccggcgtgtgggcggccctcaagcgcgatacgctgatcgaccgcacgctgctcgggctgtcgatcgtgggcgtttcggcaccgtcatacctgatcggcctgctgacggtgatcgccttttcgctggtgctgcagatattccccagcggcgggtacgtgaacttccacgacgaccctgtcggctggttcacgcatctgctgctgccgtggctggtgctggccgtgctcagcgccgccggctacaccagggtcacccgcacgcagatgatcggcgagctgagccaggactacatccgcaccgcccgctccaagggcgtgcccgaatcggtgatcatcttcaagcacgcgctgcgcaacgcgctgctgcccgtgatgaccatgttcggcctcgatctgggcgggctgctcggcggcgcggtgctcaccgagaaggtgttctcgatgcaggggctcggctcgctgctgctcgattccgtgtcgaacctcgacctgcaggtgctggtcggcgcgacgatgttcgccgccgtgctggtcatcgtcgccaacctgatcgtggacatctgctacagcctgctcgaccccagggtcgcgctcggcacgaagtagtgcggctgcggccgcaacacgcgatacttgccggtctgctccacggaccggcaccgatagagaggaaaaccatcatgaagaacaacgcatggcgcgtattcgcggcgggggcttgtgccgcggtactggcgctgtccggctgcggcgcgtccaacgacaacgccgccaccggctcggcgagcggcaccaccgtcaagggcggcacgctgaacgtgctgctgtccagcacggagatggatctggacccggccaagagccagggtctgccgaccaccacgaacggcaacatcttccgccgcctgaccgcgtggaagatcaccgacaagggcgagacgaaggtcgtgcccgatctggccaccgacaccggcaagtcgagcgacgacggcaagacgtggacgtacacgctcaagaacgggctcaagttctccgacggcacgcccatcacctccaaggacgtcaagtacgggctggagcgttccttcgccgactcgctgaccggcggcctgagctaccacaagacgctgctcgagggcgcgcaggactaccacggcccgttcgacggccaggagctcagctccatcgagacgccgaacgacaagaccatcatcttccacctcaacgcgccgttcggcgactggccgtgggtcgtctcgctcgccgcgttcacccccgtgcccgacggcaagggcccggcgtccggctacggcaagctgccggtggcctccggcccgtacaaggtcgagtcgaacgaggccggcaagcaggccgtcttcgtgcgcaacacctactgggacaagaagaccgatccggtgcgcaccgcgggccccgacaagatcgtgttcaagatgggacaggacacctcggtggccgcccagtcgatcatgcagggcaccggtgaaggcaagaactcgttcctgtccggattcgtgccggccgcgcagctcgcgcaggcgcaggccaacccgaactacaagaagctgctgaccaccagcggcgacggcgcgctggaatacctcgccatcaacacccaacacgtgaagaacgcgaagattcgccaagcgctgcagtacgcggtcgacaagaaggcctaccagacggcttccggcggcgagatcgccggcaacttcgccaccacgctcattacgcccggcatcgagggccgcgaggactacgacctgtacaaggccgatccgaccggcgacgtggacaaggccaagcagctgatcaaggagtcgggcgagcaggccccgaccctcaagctcatcgccacctccgctcaggccgaaaccgcctcctcgatccagacgagcctcaagcgggccggcgtcaaggtggacatccagacactcaacgacgatgtgtattccgatacgctgaccaacgacaagggcgactacgatctggccatcagctcgtggcagcccgacttcccgtcgccctacgccaacatctccccgctgttcgactcctcgcagatcggccacggcaactacaacctggcccgttacgcgaacccgaaggtcgacgagctgatcaagaaggccaccgagaccatcgatcagaccgaggccggcaagatctgggccgaggccgacaagacgatcatggccgacgcgccggtcgtgccgctgatctattcgaagaacacgttcatccacggatcgaacgtgaccaacttcgtcatcggcaacttcccggcgtacccggactacacgcaggtctcgctcgccagcgcgaactgagccggcatccgcatccggcgcgcgccggcggcatggtccgctggcgcgcgcgccggacgcattccaacgcttgtgcatccaaggagcttccaatgagtgaaccacgcgcgatcgtgaccgtggacggtctggccgtcagcttcgacgagcgggaggtgacccacggcgtcagcctcaggctgttcccggggcgcatcaccgctctggtcggcgaatccggctccggcaagtcggtgacggcgatggcgctgccccgtctcgatccgtcggtggccagcgtgaagggccacgcgtacctcgacgacgcccttgtggatgacgggccggactccggtccgggcggcgacggcaaggacgccgccggccgcggcatcgatctgctggccgccgacgcgccgctgcaacgcatccgcggcgaatacatcggcacggtgttccaggaaccgtccaccgcgttcaatccggtgttcacgctcggcgtacaggtcgcggaatcgctcaaataccaccagaagcagctcagcgccgccgagcgcaaggccaaggtgctcgaacagctgcgcgaggtcgggctcgacgacgccgaacgcgtgtggtcgtcgtacccgcatgagctgtcgggcggccagctgcagcgcgtgatgatcgccatggcgatcatcaaccgacccaaggtactcatcgccgacgagccgaccaccgcgctcgacgtgaccacgcagaaggcgattctcgccctgatctcctcgctggcggtcgacctcgatctggccgtgctgctcatcacccacgacatgggcgtggtgtggcaggccgcgcaggacgtgtacgtgatgcacaacggcgtgatcgtcgagcaggggagcgtcgcgcaggtcttccgccacccgtccgacgactacacgcggatgctgctcgacgccgtgccgcgcctgcgcatcgacgagcatgcggcagacggcgaacatgcggccggcggcgaacgcatcacggaaagtgacgcgctcggcggcggcaggcgcatcacgcaggtgaacgacgtggccgtgtcgtacaaggccggcagcttcgccgtcaaggacatctcgttcgatctggtggccggcaggacccgcgcgctggtgggcgaatcgggagccggcaagaccacgatcgccaaggtgatctccggccagctcgcgccaacctcgggcacggtgctcatcgagggggaggatctcgccaaggcgcatggcaggcgcaagcgcgagatcctgaagcatatgggctatgtgttccaggacagcggatcggcgctcaacccgcgcaagtccgtggcatggagcatcggcgagccgatgctcgtgcagggcgggctcagcgagacagaccggcgcaagcgcgtccttgaattgcttgatcaggtggagctgcccgccgatgtggccggccggttcccgcaccagctgtcgggcggccaacgccagcgcgtcggcatcgcgcgcgccttggcgctcaacccgtcgctgctcatcgccgacgagccgacgtcgtcgctggacgtgaccgtgcagcgcaaggtgctcgacctgctgcgccggctgcagcgcgagcacggtttcgcatgcctgttcatcacccatgacctgggcatcgtgcaggagatgtccgacgtgatcacagtgctgcgccacgggcgcgtcgtggagagcggggagaccggccgcgtgctcaaccatcccaaggccgagtacacgcgtaccctgctcgacgcctccccgaagatcgacctgtgagccgtgccgctcgtcatccggccggttctccggccgtgcggcggggcggcgacggcgcggatgacacctagccttaccgtggtttcggttttttgccgtcccgcccctatcggcgcgcggcaccgaaccagttggtgtatatgagggcgaagttgcggttgccgtagctggagcatgagtcgccctcgccgaacccggccgccagcgaggcgtcgttcggctggtagggcgtgtagatgtagagcagcgcggtcgccttgttctcgatgtacacgttggtgccgccgcacccggcatccgggtggtactggatgtagttcagcgcgttggcgtgatagccgtaggcgctttcatgcgccacatagtattggtagcggtgcgccgccccgtacacctgtctgaagaagccggcataggccggatcgcagttcgcgttgtccgggcagctcagccccatggcggccttgtactggaagtccgtcggatcgacggccgtgaccaggtgctgctccttctgcagcacggtgagcagcaccttctggctgatgccgcacgcgcgcgccgacttgtcgatgatcgcggccgcggtctcctttctcgcgccctcgtacgccgcgcaatactcgttcgccgcctggtcctcggtgtcgaaggtcatggttttcaggcaccgggaaccgctgcacgccgcgccctgcttgtcgaggaacgcctggacctcggcctcgctcatcgcattggcgttgaagaactggccgtccgagatgatgtcgccgggattgaagtcgtattgctgcgtcagctgcagctggcgggcctcggcctcctgcacgtcgcgacgccactggacgacccgcacagtgcccacgaccagcgcgaccacgcatgcggccgccaccacggtgaccagcacagccgcgacgcgctgcgccaacccggcccgcttccaccagcgcgccgggctgagcggatacctgcgattgcgcgggcgtttgcccgggcgacgtttgcgattgccgcctgacacgccccgccccgcgacaatcacgttcgccctgccgcgcggattggccggcttgcgccgttgcgtcgtcgccatcgctacgccagtgccttcttgatgcgctgcaggctcaccggcttggcggtgccgagttcctgcgcccacagggacacgtagaattcctcgagcatccagcgggcggcggtcgcctgcttcatcagcgtctcgtggcgggggccggccggctccgccttggccttggccatcgccttgtcgaccagcgtgcgggcctcgtcggcctcccacgcccatcgcacgtcgcggttcttgtcggtcttcgccttggccaggcgcatgagatcggcctgcaggtatcgggagatgttcgccagcgcgtccgggggagcggcgccgacgaatccggggaacaccagcgtggcgatgtgctcgcgcaccgactgcagcaccgaaagcatcggcagatcggccttgccgccagtggccttgtcgacttcggcataagccttgagcacggcgatcacgtcatgcgccacctgatagacggtgtcctcgtacacttcgcgcacatcgagcaccgcattggccaacgcctcatcgtccgagagcctgtcgacattcggcatcagccgtttgaccgtggccagctgcaggtcttcgaccagatccttggtgaacttgtacggagcagaagccagcatcaacgcctcggtacccagccagcgcgacgaaatgcgttcggccggcaaccgcagcgcatccaatgcgccacgccagagcatcgtggcccgggactcggtggtggcacccgccttatgcaacaggttcgcctgactgaccagcttgccctgttctccagcctgatcggcctgcttcttgaccatttgacgggccgacgcctccgcctgcgcggcgaacttgcgttgcagcgccttcagatccttggacacacccagcaccttgacggggccgcgcgcatgccggcgtccacgagggtgcttgccggccggcagttgctgctccaccgagaacgtgaccctgagatacggggaaagacgctcgaccagttccggccccagcacttcgggatgaatctgcgcacccttggtggcgatggccgccttggtgaacacatgtgccaaatcaggccagccaacggtcgtgccatcctcatccaccggcggcagattcggcttctgctgcgagcccgagcccggcagatccgggtaatgctcgtcgatccagtcacgaatcgcacgcgcggcatccggagccggcacgaactggacgcgcagctgcttgggcagcgccttgatcatcgacagaatcagctcatccaacaggcccggcacattccatgtgaactggtcgggcgtgatacgcgagagcgccttcaacggcacatgcacggtgacgccgtcggccgggtcggccggatcgtatacgtagctcaaacgcaggtcgatgggttggccgtccgatccggtcgtatgccaatggtcggggtaatcgtccagactcaccgaatcgctggatgccagacgctccaccttggccgggtcgaaatcaagcagattcggctgacggtcatgctcggacttccaccatttcgccagatcggccacgctggtcacatcgttgggaatgaccgcgttgtagaagtcgaacagatcctcgtcggacacggtgtccgccagctggcgggtgcggctcgcgtcatcggcggcatcctcgagaatgtcacggtttttgcccacaaagtcgtcgtaactgaagcgctgctgaatatcgccctcgaccagaccctggcgaatcaggaagtcgcgcgcctcaagcggattgatgcgtccccactgcacggcacggtcctgtacgatcggcagaccatacagcagcacgcgcgcggtggccacagccgagccacgcgaacccgaccagtgcggctccgcatacgtggtgcgggtcaattggccggccaacggttcggcccacgccgggtcgatggccgccgaatagcgggcccacaggcgagaggtctccaccagttcggtgctcatcacccatgacggggtcttcttggccacggcggaggcggggaacagggcgaaacgggtgccgcgcgcgccctgataatcgttcttcgactgcttctgggcgcgtttcatcgcacgggcgcgcgccgcaccggtcagccccgcgaaatcggaggccttgggctcacgcaccacctgcatgcccatcatcgacagcaatccggcgagcatcgacttgtggatgccatccgcatcccacgagcagcacagcgaatgcgcggcctgctgattcaacggcagctggcgaatctccaagcctgggcgggaggcgggcaacgggtcgccgaccttgaacttcagctccttgcacatctggcgtagctgggagacgagatctttccactggcgtatcctcagccagctgagatactcggttttgcagatacggcgcagcgcgttgttgctcgggtcgccgtccgcttggaacacgcgatcccagatgttcagggccgtcaggaagtcggaggtctcatccgcatatcggttgtggatacggtcggcatcctcacgcttgtcgtccgggcgttcacgtgggtcctgcaagctcaggaacgccacgaccacgagcacctgggccagaagattcggcgaaccggttttcgcggcctcgataaccatacgtcccagacgcacgtcgatggggatgcgcgccagctgacggccggtatgggtgagcgtcacctcgccgcgctttcggccgatggccttgagctcggtgagctcattgaaaccgtccgacacggccttcatatccggcggatcgatgaacccgaagttcgtgacgtcctcggccgtgcgggccacgcccaccgacagcatgtgaagcaccacggcacccagcgaggtacgcaggatttccggctcggtgaagcgcggtcgggtctcgtaatcctcacgcgaatacaggcggatcgcgatgccgtcggccacgcggccgcatcggccggacctctggtcggcactggcctggctgatcggctcgatcggcagacgctggacctttgcggtcttcgaataccgggagatacgggcggaaccggggtccaccacgtagcggataccgggcacggtcagcgaggtctcagccacattggtggcgatgacgatgcgctgatgcaaatgcgattcgaacaccttgtgctggtcggcggcggacaatcgcgcgaacagcggcatgatctcgatggcgtccggtcggcgcatgtcgtcggcgcgcggaccgtaatgatgccgcagtgcggcctcgaactcgtggatgtcgcgctcgccggaagcgaagaccagaatatcgcggggaccgcgctcatgggaggagtggatcaccagttcggcgcaggctcgagccacggccgtgggcatatcggtgatgccgtcatcggcataggagtcgccggaccggccgcggggccggtcggaatcggattccgcgatggcgctggccagctcgtcgtaatcggcgtcgccggggcgggcgcccaccgcgaatcccggcacttcgcgcatcaacgcgggcgcggtgccaagcggctcatagaccacctgcacggggaaggtgcggccggaaacctcgattaccggcaccttctcatgcaaggcgtgctcgaaatgctcctggaacttgaccgaatcgatggtcgcggaggtgatgatgagcttcagatcgcggcgctgaggcagcagtgccgtcagatagccgagcagaaagtcgatgttaagactgcgctcatgcgcctcgtcgatgatgatcgtatcgtattgggtgagtttcggatcgcgctggatctgggcgagcagaataccgtcggtcacgactctcaatcgcgtgctgggcgagctttcgtcggtgaaacgtacctgatagccgacctcgtcaccgagcttcacgcccatctccgaggcgatacgttcggccaccgtgcgcgcggcgatacggcgaggctgggtgtgcacgatctgcttgccgtgcgtgccacggccaagctcaagcaggatcttcggcagctgtgtggttttgcccgaaccggtctggccggacacaataacgacttgggaacgtttgaccgcgctggctatctcatcacgcgcggcagatacgggaagttctgcaggatactcatatttcatgacggacttcaatgatacggaagcccttggagctcgcgtatttgctcgcagtgaacccctcgccgagcgcatcgtccagccaggggatcagcgaatcggagccgagattcttctgcactacgagataggcggcgccgcccaccttgagcttcggcagccaagccataagcaatgtatgcagcgcttccttgccgactcgaatcggtggattcgaccaaatcgcatcaaacgtgaggtcgcccggcaccgtctcgcagaacgccggctggttctcggcgggcaggggagtgctggactcgtccacctgagccgcatgaatgttcgtgcggccgttcgcctgtgcgttggcatgggtcaggtccagcgcacgctcgttgacatccaccgcccacacgttcgcttcgggcgactcaaacgccaatgtcagggcgatagggccccagccgcagcccaaatccaggaaatcgccggtaagcggcggctcgggcgcatgcttcagcaataccgatgtaccgaggtccacgcgcgagccggagaacacgccgttcgacacctgagcggtcgcctcatggccgcgcaacgttacgttcaatgtgcggcgcacatctttcgacgcgggttccgcagagaaatactgttctgccatggtcgctccatttctgcgggattcgccgctctcgtatgccgacctgtatcagccggcctatgccggtacgtgccgatctatgccagcatgtcacctcatgtgatgataataaaggaccatagaagaatcgtgaaccattccaaccaaacgaggcgcacttgaccgacaacacccagtacaccgacatcgaccgcggcaacaacgacgttacccctgaaggtgtgctggccgggcagtccgaagtgctgctcgacgacagccagcgcgcgaccggctggcacgaggacgccaaccaggaatgggaggagcgcgaggcccgcaacgagctcaagcatgtcgccggtctcggcgagctgcaggacgtcaccgaagtcgaataccgcaaggtgcgtctggaacgtgtggtgctcgtcggcgtctggtcgtccgccgtcaccacgcaagccaaggccgaggaatcattgagagagttggcggcgctcgccgaaaccgccggtgcggtggtgtgcgatggtttgctgcagcatcgctccaagccggatgcagccacgtacgttggttccggcaaagccaaggagattgccgacatcgtggcgcgtgaggaagccgatacgattatcgtggacgacgacctgtcgccgtcacagcgccgtgcattggaggacgcagccaaagtcaaggtggtggatcgcaccgcggtgattctggacatcttcgcccagcacgccacctcgcgtgaaggtaaggcgcaggtggagttggcgcagctcgaatacatgctgccccgactgcgtggttggggtggttcgctgtcccgtcaggccggcggtcgcgcggcaggcgcggatgcgggcatcggatcgcgaggcccgggcgagaccaaaatcgaaatggaccgtcgtgtaattcgcacgcgtatcgccagactgcgccgtcagattcgagagatggccccggcacgtgaggtcaagcgcggttcacgccgtcgcttcggcctgcccacagtggccgtggtcggctacacgaacgccggcaaatcctcgttgaccaaccgtctgaccggttcggccgaactggtggaaaacgcgctgttcgccacattggacacggccgtgcgccgcgccaaaacccgcgacggacgcgcttacgcctacgtggacacggtcggcttcgtgcgccgcctgcccacccagctgatcgaggcgttcaaatccaccctggaagaggtggccgaggccgacgtgatcctgcacgtggtcgatggctcccaccctgacccgttctctcaggtcgacgcggtcaatgacgtgttggcggacatcgaaggcacggcctcgattccgcgtattctcgtattcaacaaggccgatcaggcggacgaggcgacacgtgaacgactcgccgcactgcagccggatgcgttcatcgtctccgcctataccggtgagggattggacgagctgcgtaccgcggtcgaaagtctgctgccggtcccgcatgtgcatgtcaacgctctgctgccgtatgccgctggctccctgatctctcgtgtacgcgaatacggcaaggtggacaaggtggagtaccgcgatgatggcatacagcttgaagcggacgtcgacgcccatcttgccgctcaggtggtcgaacagtccattgactaacgtgataaacatcacagtttgtttgtgagcgctaacaaccgttggaaacattaccataccgttatcagacagggtggtgtgctggtagcaaaacgtcttagcgggtttatagagtgaaaaccgttagttacaaggcctgccattcatcagcagaccgcctttgaagagaggttcatccatcatggcggaaactaccgttaagcccacgaagcttgctgttattggtgccggtgccgttggctccaccctcgccttcgccgctgcccagcgtggcgtcgctcgcgagatcgtgcttgaagacatcgccaaggagcgcgtggaagccgaagtgctcgacatgcagcacggctccagcttctacccgaccgtgtccatcgacggttccgacgatcctgagatctgccgcgacgccgacatggtcgtcatcaccgctggtccgcgtcagaagccgggtcagtctcgtcttgagctcgttggcgctaccgtcaacatcctcaaggccatcatgccgaacttggtcaaggtggctccgaacgccatctacatgctcatcaccaacccggtcgacatcgctacccacgtggctcagaagctcaccggtctgcccgagaaccaggtcttcggttccggcaccaacctagactccgctcgtctgcgcttcctgattgcccagcagaccggcgtcaacgtcaagaacgtgcacgcctccatcgccggcgagcacggcgactccgaagtcccgctgtgggagtccgccaccatcggtggtgtccccatgtgcgactggaccccgctgcccggccacgatccgctcgacgccgccaagcgcgaggagatccaccaggaagtcaagaacgccgcttacaagatcatcaacggtaagggtgccaccaactacgccatcggcatgtccggcgtcgacatcatcgaagccgtcctgcacgacaccaaccgcatcctgcccgtgagctccatgctcaaggacttccacggcatctccgacatctgcatgtccgtgccgaccctcctcaaccgtcagggcgtcaacaacaccatcaacaccccggtctccgacaaggagcttgccgctctgaagcgctccgccgagacgctgaaggaaaccgccgcccagttcggcttctgataaaaaatcgctgtacggagcgcctttcacaccgcacaaggttcgaactacctttgtaggccttcaccttgtgcggcacgaaaaatcgcacacgtacagcgattttttataccctgctgaatgcttccagagggagcattttttattcgtggaattcgttggaggagggggagctatagccctcgggctcaagctggaaggtggtgtgggggaccgagaccgggaagtgctcgcgcaggcaatcctgcagttgggtgaggattgtggcggcatcttccatggtgaggtctttgtcgactaccacgtgggccataagaatcggcatgtcggtggacaccgtgctggcatggaggtcatgcacggcaagcacatgcggcacgtcttccagatgctcgcgtaccttatcgagatcaagaccatccggtgtttcctccagcagcaccttgaccgcgttgtgcagcagcttgatggcgcgcggaatcatcatcagtgcgatgacggcaccggccacggcgtcgaagccattccatccggtggagatcattaccagggcagaggccaccacagacaccgagccaagtgcgtcgttcattacctcgaggaacgcggccttcatgttcatgttgtcttcgcgctgcgaggcaaggatgaagatcgagatgatatttgcgacaagacccagaatgcctacgaacagcagcaagccgatatcgtcgatttccgctttggagccgccgaacagacgcatgccggcctctaccaacgcatagatgccgacgataagcaatactacggcgcccgcggcagcggtgagcacctcaagcctggcccagccccaagtacgagtgttgttgggcttgcggcgcatcagtatggcggtgattgtggatgccaccagcacggacatgtcggtgagcatatgaccggcatccaccagcagggccagtgagccggttaagacggccgacaccacttcgatgaggaagaccgaaccagtgacggtcaacgtggcaatcagcctgcgctggtgcgcggcagggtttacggatgtggatggtgcgggtgtatgggtatgggccatatgtactccttcgctctatcgagttgaaaccgcttctcaataccatttgcgatatggtctgaatacgacgaaaccccggcgcgaggccggggtttcgtaagctgtgcgtgactatagcacgaccagcgcgattcggtgcacgctgatcagctggtggcgaacaggctataatttgcgcagtacggtgaccaccttgcccataatcgtggcatgtgtgccgtcgatgggcgagtatgcggggttgtgcggcatcagccagacgtggccgttttccttgcggaaggtcttcaccgtggcctcgtcatccaacagagcggcgacgatatctccgttgacggcggaattctgttcgcgcaccaccacatagtcgccatcgcagatagcggcatccaccatggaatcaccgtggacttccagcatgaacagggtgccggagccggtcagccgttcaggcagacgcatgacgtcatccacatgctgttcggcggtaatcggcacgccggcggcaatacggccaacgagcggtacgtcatgtgattcggcaatggcttcggcggggaattggtatatctccgccacattgctggcgctggttgcctcttcgctggcttgtgatggcttttcggcattcggggcggatcctgccatcacctcgatggcgcgacccttgttcgcgttcatgcgaatgaagcccttgtcttccaaaacttgtagctgatgcttgaccgaagacggacttttgagcccggcggcatttccgatctcccggaaagagggagcaaagccttgttcgtcgatatgcgtgcgaatggcgtccaacactttgcgctggcggtcggtcagggtggactcgtccggcttctgcttgggggagaggggaatggtgctcacgtcagggctcctttcgttatgtcaccatcataacgtgttgttcgtgtgaaatcaaacatctgttcgagtttcgacttgaccgtgtcgaacatttgtgccattataagaacagttgttcgatagaacatctgttcgagagaggtggtcgtgatgactggttcaatggtgatggccccggcccgtagcgcacgtgtagctatgcagcatgctggaacgtcccgccggaatgtgcgtgggcggattatcgcagtgatgatcgccttggcgctggcctggtgtggtttcggcgcgcgcttaccgctcagcgggcccaatcagatacgggtgccacgcaggtgaccagctatatcgtgcggccgggggatacgctctggtcatatgcttcggctattacacctgctggccatgatgtatcggaaacagtggatgagctgattacgctgaacaatctcgagtccggaacattgcaggccgggcagcgcattattgttccggttgagtaaatgaaacccgagcggcatggtttttccgcccgtacacgttattctggagagcatgcattgccctttttgccagaaccccgacaccaaagttattgatacgcgcattagcgatgacggtcattccatccgtcggcgtcgcgtatgcccgaaatgcaacaagcgttttaccacggtggaaaccagtatgctgctggtcactaaacgttcgggtggcgtggagccattcagcagagacaaagtgatttccggcgtacgtaaagcctgccaggggcggccggtcagagaagaggatctgaagctgctgggacagaaagtcgaagaggatcttcgctcccgaggccttgccgaagtcacctcagatgaagtgggcaaagccatcctgaaaccgttgcgtgacttggatgtggtggcgtaccttcgattcgcgagtgtgtaccagaactttgcaggtctggaggatttccaaagcgccattgatggtttgcgtgaataatatgcgaatgccatgcaccgtgatatgcgagtgattcgcaaaccatggtgcgaaccaatcatgaagccctgcacttatgaaagagacccgtcagcgacgggtctctttcatatcaatcgaggatgagctgcgtcagctgatgacacgcatgcgaacggtgccctcgatgttgcgtagtgcttcaagcgtggcggcgctgggcttctgagccacgtcggtgaccacatagccaagttcgccttcggtggccaacgactggaaggaaacgttgatgttctcttcgccgagcacgcgattgacatgagccagcacaccaggaagattgtcgtgcagatgggcgatacggcacacgcccttgcgttcacctaggttgatctgcggtaggttcacggacaatgaggtagaacccttgaaccagtaatcctcaagacgctgagagacgaaatggccgatggattcctgagcctccaaggtggagccgccaatatgaggagtcagaatcatattgtcttcgttggccagtgaggtctcgaacggatctccgctcttcttcggctcaacggggaacacgtcgaccgccgcgccagacagatggccggaatcgaggtgctgcttcagagctcccagatcggcgacgaaaccgcgcgaaaggttaatgaaaatcgcgtcctgcttcatgtgggcgaattggtcttcgccgaagaagccggtgttcgacttgcggccatccacgtgcagggtcacggcatcggactgttccagcagttcgttgagggtatcgcaacggtgggcgttgcccagtgccagtttctcctcgatgtcgtagaacaccacgcgcatgccgagggcctcggccagtaccgacagctgggagccgatgttgccgtagccgatgatgccaagggtcttgccgcgcacttcatgcgagccggaagcggacttgtcccacaggccatgcttgatgtgatgcgtgtgtgcgggaatgcggcgcatcaagcagatgatgtcgcaaatcaccaattccaccacggaacgggtgttggagtagggggcgttgaacacggcgatgccacgcttgccggcatgtgccagatcgacctgattggtgccgatgcagaagcagccgatggcgcttagcgtaggacgcgcatccagcacgcgggctgtgacgttggtcttggagcgtacgcccaccaagtccacgccatccagcgcgtcgatgagttcgtcctcgctcagggctcccttcatggtctcgacttcgaaaccgtgatcacgcagcgatttggccgcgtcggggtgaatgttttccaataacagtgctttgggcatgcttcataccttagatgttcagggacttttcgtccgttcttgtccgaactataaccagtttctgggtcggcctggtcattgccacgtacaggtccgaagcggcgaccaggcggctcggcgcgtcatcctcgatgagaccgggctcgaccaccacgacggcatcgaactccagacccttgaccgtttcggtgccgcagacgctgatttgctcatcccattcgggctgctcgatgagccttgcgtattcggccgggtcaagaacggcggccagtttgcggcgcacggcgtcgcgcaccggggcgatgagatcatccggacagatgacggcgatgcggccggtgccgtctgccgaaacgaattgttcggcaagctgcgccgcctgctcggccgtcgtttccagcaaggacgacatgtcgggcaccacattgcgggacaccgaatcggggatggtgcgcaccgcattgaccgtggagatgtagaggccttccttctcggcgaatcgtgaggcgagttcggaaacttcctgcggattacggtagttgatggtcaactcgttcagatcccagtggctttcgccgaacaggcggttcatcgatttgctccagcgtcgggtgccacccagcgccgaggtctgcgccacatcgcccacgatggtgaacgagcgggaggggcaacggcggatcaacatacgccagtccatggcggtcagttcctgcgcttcgtcgaccacgatgtgcccgtaggtccattcacggtcggccgcggcccgctgcgcggtcagctcggcgtcgtccccgttcatctggtcgagcagcatctgactggagacgatgcctccacccagaccggtcgcggccagcgtgtctttggcatactgctcttcggcggcacgacgtgcgtcggcggcggactggcgggccaccgtcttgggatcggggcccagcatatccatcgcttcgtcgagcagcggaatatcggagcgggtcagcggggagcccttggggcgggcaagtgccgcgatgtcgttgtcggtcagccaaccagccagagacttcagacgttcgggatgggcgaacagctgatcgatgagccatggggcggtcatcggcagccagcacaggttcagggtcttgcgcacctgctcgttcatacgcagcaacgacatcgcgcggttcagctccgcctgatccggcgtgtaatcaagctgttcggcataacggttctgcatgctggtcagcatcgaacggataaaggtctcgcgggccttgttatgaggttgccgggtgcgcttcgcgtccgcctgcgcctgctcgatatcagtggccagcattggtacctgaatgccgctaatggttactgtcggcagaacagcgggaacacgcacgcgcgcggcgatggcattggccactacggaggtcatgcgtcgatcgcccttgagcttggctgcataaggggagtcgaccgccgtggcggtgatgccgggaatcagatcgctgatggtgcgtgagaccacgccggtctcgcccaaggagggcagcacctgatcgatgtagtgcaggaacgccgagctggggccaacaaccagcacgccggaacgttccagcgtgcgccggtgcgtgtacagcaggtaggcggcgcgatggagcgccacggccgtcttgccggtgccgggaccgccctgcaccaccacggcacgattcatgtcggagcggatgatgcggtcctgctcggcctgaatggtggccacgatatcggtcatcttgccggtgcggcgtgagctcagcgaagccagcagcgcaccctcgccggtcaacgtgccggcggaagacgcctggccgacttggtcggaatgcacgtcgagcacctcatcctcaacgcccacgacttcgcggaaactcaaggtgatatgcctgcgcatcacgatgtcgccgtgattggagggggtcgcctcatagaaaggacgtgcggcttcggcacgccagtcggtcagaatcggctcatggtccgggctcgacaggccgatgcggccgatgtaatgacggtcgccgttcttggcgtcgagacgaccaaacaccagccgatcctcaacgctgcgcaattgcgtgaggcggttttcgtacattgtggcaaaggagtctcgttcgctgcgttgcgtgggggatccgtgggagccggcggcgcgtacggtgtccaggcgttgccacatttcggctcgcagatcatccaatcgtccataggcgcgatcgacggcctgctgctcctcatgcagctgggaggcgtaactcgacatgctgttctcttcgttccatttccgtggggcagaaaaaacttaaggcattcaaatttaccgcacaccccctacgtcagtgatgcggacaacccggaataggtgaattcagcgtgaattcgccatgctgttcggtcggtggagtgcgcaacgtggattggatgtgcggagcgcccattcgtgcgacagtcgtggccgacacgcgcaatccatcggtaattgccctaaaagggtgagcaaatcgtgcatgagtggggagaaatggggaatcgtggggtagagtggtgaaccagttggccgaagtgtatcccacgtaacgatgaaggaggtggagccatggttgccgatcagacgattcgcgacgctgatgccaacgcacaaggctccaccactatggctgatctcatggctggtctgccgccgctgcttctcggcacatatacgccgaagatcgacgccaaaggccgtatggcgctcccggccaaattccgctcccagctggggcagggcctggtcatggcccgaggccaggaacggtgcgtgtacctgctgccgttcgatgaatttcgccgtatcgcctcgcagattcagcgtgtgtcggtgggaaacaaagccgcccgcgaatacctgcgtgtgttcctttccggtgccgtcgatcagcagccggacaagcagggccgcgtgctggtgccgcagatgctgcgcgattacgccaatctgggttccgacgtcgtggtgatcggcgttggcacccgtgccgaactgtggaataaggacacgtgggagtcctacctcgccgagaaggaagagggatattccgatattgctgacgatgtgttgccggaggtggaattctgatggttgatgtggcgaatattcatctgccggtattgctggacgattgcgtgaacctgatggcgcctgccctggaacatgagaacgccatcgcagcggattgcaccctgggccttgccggccattccatcgccttcctcaaagccgcgccgcaggctcggctcatcggcattgaccgtgacagtgaagcgctggggctggccaccgaacgcatggaacgggaggggctcgccgatcgattcatcccggtgcatgccgccttcgatcagctcgatcaggtgttgacggaccgaggcatagaacgtgtggacgccgtattcatggatctgggattatccagcctgcagatcgacgaaaccgatcgtggcttctcctattcgcatgatgcgccgctggatatgcgcatggacgtcagccagccgttgacggccgaacggattcttgccacctatgatgcggcggaactggtccgtatattcaaggaatacggtgaagagcgtttctcgcgtcagatcgcccgcgccatcgtggcacgtcgagacaaggagccgtttaccaccaccgcacagctcaaccgtctggtcgatgaagtggtgccgcaagcccaccgcccggcgggcaatcccgccaaacgcgtcttccaggcgttgcgcattgaagtcaacggcgaattggacaagctcgcctccacattgccgcaagccgcgaaccgactgcatgtcgggggacgactggtggtggagtcctatcattcgctcgaagacaaaaccgtcaaatcgttcatggcacaagggctgcgagtggatgttccggctggcctgcctgtcataccgccggatgcccaaccgtttttcacggatctcacgcgaggtgccatcaaggccgacgaacatgaaatcgcagccaacccgagatcggcttcggtgcggttgcgggcggtggaagtcagccgtgagattccgtcacgatggaggaaacgctttacgcaaaccgcgcagggcctgaatgacgtcaagatacaaggctccgcgtctccgggcagagccaaaaacacagcgcgaattcgtacaaggaggggataacggcatatggcaaccgcacgtaacattcgatcgaacgcggctccggcctcgaaccggccgcacaccaagcatcagtcctcctcccgacctgagctgcgggtggtctccaacccgcgtggagacgagcggggcaatgtcgtcggacgggtcatcgaatggaccagaacaagaagcgcaccgctggtgcacgtggccatcgcagtgatcttcctcgtcggcaccttgttcggcgcgctgatgctgcgtacccagatggtgcagaactcgtttgaggcggcacagatcgaaaccaacatcaacagacttacccaagatatcgaagacgatcaggccaaactcgatcaattggtcgcgaacctgcccgacaaggccagcgacatgggcatggtcccgcagcagggatcagtgtccatcgacttaagcggataccagtccaacaaaggcggaacccagtgaacaccattcgtcgcatcgtagagttcgccaaggtcaagaccttcgcgttcaaatgcattgccatcggcgccgcattggcgttggtggcgtcggcatgcgtgattcagctggcctccacccagctcatcggcggccgtcaaaccgcacaagcggccacggctaaccgcaccctgaccgtgacgttgagcgccaagcgtgggcgtatcctcgacgccaacggctccgtgctcgctcaaagcgtggagcgttatactatcgtcgccaatccggaggctgcacaggagttcgagccgattacttgcaatgacagcacccgtgattactgccacgaaattgacggcaaacccgtgggtgctaccggagcggcggccgtgggccgactgctggccaaagtcctggatatgaacgccatggaactgggagctgatctgtccggtaccgggcagtatgtgattctgaagaaagacgtgaccccacaggtcaagcgcagcatcgaggcgttgcacctgggcggtattgtctggggtgagctgagcagtgaaagactgtatgcggatggcgatctcatgggcgcgctgcttggcggcgtgaacgacaacggcgatggcgtcgccggcatcgagcaggtcgagaacaagacgcttaccggaaccgatggccatgaaacctaccagcgtggtaatggcggcgaagagattcccggcaccatgaccgaatcggtggcggccaaaaatggcgacgatgtcaccctgaccattgaccgtgatgtgcaatggtatgtcaaaaaggccttgaaggaggccgaatccaagtatggcgcagcgtgggcgatcgccgtggtgcaggatgtccagagcggggagattctcgcactggccgatagcgatgaagtacaggctggtaccgatgcggcgaagatgagcccgtctcgggccgtgtccgaaaccttcgagcctggttcggtgggcaaggtcatctccatgtccggctatctgcagacgggactgcataagatgagcgatcaattgtcggtcccggaccacatcacacagaagggccagacctacaaggactcattcgaccatggcactgagcgctggacgctcgccggtattctgcagaactcatcgaacgtcggcatgattatggccggggagaactatccggatgagcaacgctacgagtacctgaccaaattcggcatcggacaaccgaccggactgaacctgcccggtgaatcgagcggtctgctcaccagcccttcggcatgggatctgcgtacgcgcaacaccatcctgtttggtcagggctacgccgtcaacgccctgcagctcaacaacgtggtggccaccatcgcgaacaagggcgtcaagcagcagcagtcgatcatcagatcaaccaccgatgccaatggcaagaccactgagaccaagaagggcgaagccacccgcgtggtggatgaaaaggtcgcatcggacatgatgaatgcgatggaatcagtggcggagagctacaacaagttcgtcaaggtcgatggttaccgcatggccgccaagtccggtaccgcagaggtgcagggttcggatggcgcgctctcgtccattctctccgattattccgtggtgattcccgcggacaacccgcgctatgcggtcaccgtggtgctgaaggatccgaatggtgtgttcggcggtctgacggccggccctgtttccgcacagatttgtgagttccttatgcagaaatacgaggtgcctgtctccagtccacgaaaaaatgctattccagtcacgtggtaaggatcaggggagaaaggcgatagcccatgagtgcagtgagcgaatccatcgcccagcgggtgaccttgggaatgctggtcgaacggtacggttttgaagtcgatccacccttcgccaccaatgtcaccattacctcactcagcgatgccgtggataccgtgattcccggctcgctgttcatctgcacgcatgagcaggaacccgatgtgctgcatgccgcgcaggcaggtgcctatgcggcgttgctgccacgcgcgtccaaagggcagatcgccaatgccgatataccgttgctctacggcgattgcgacgatcgcgtactcggcgatctggccagcggcctggccggcggaccatccaacgccatggcggtgttcgcggtgaccggtgcggatgagcaggccgttgacgcaggcgtgtcccagctctccgaattcctgcacatgctgggcaatccggtggcggtaatcaccgcatccgggtccacgtcgatgacacgtaccatgaacctgaactatcctctgggcatcctcgatatgcagcgcgcgctgtccgtgtgcgccgaagacggtgtggcggccgtgatcatcgccatggatgaccgcacattggccgagcatgcgttggaatcggtgaacgtggatgtgctgggcacggaagatgtcaacgcaagcgcaagcttggacgaattgaagacacgctacgcattcgttgcggaacatgacatgtccatgacctcgtcgacacccgaatcggatgaaatggctgcggattcaccggcaatgtacgaccgcgtccgactcgggcacatgtccttggccatcgccatggtactggccgccggcgtgaggaaaaacaacatacgcagtgccctgcatgtggccaacaatctcaattaagtccgtggatgcgggacgaagcgtaatcgtaaaggagtttgaaacaccatggttccgatgagtgtggaggagatcgccaaggccgtcgatggtcgattgatcggagacgccgattccgagtctcgagccaccaatacggtcagcgactcgcggcaggccggccccggatcggtgtttgtggccatccgaggcgagcgtgtcgatgggcatgactttgtggcgaaaaccgctgaacagggagccacggtggccatcgtcgaccatgaggtggagtccgatggcctgccgcagatcgtagtgaaagacacggtcgacgcccttggcgagctcgcccgacacaacatcgttcgccgccgcgagctggacggcgacttcgacatcatcggattgaccggttcggtgggcaagaccaccaccaaggatctgctctcctccctgcttgccaccgtaggcccgaccgtggctccggtgggatcgttcaacaatgagatcggcctgccgctcactgcgttgcgggtcgatgagcacacccggttcttcgtggctgagatgggtgccagccatatcggcgaaatcgcgcgactgacccgtatcgcaccgccgaacacggcaatcgtattgaaggtcggcgtcgctcaccttggagaattcggctcccgcgaacgcatcgcacaggcgaaaagcgaaatcgtgcagggactgcttcccggaggcaccgcggtactgaacgccgatgacgaacacgtggttcccatggccggcctggccagcggcgatgtgctgtggttcggcttgggatcgtcgcaggagcccgaggtgcgggccattgatgtcactgccgaccggtccgatcatgctgaattcacgttggtcgatgcggacggcaaccatacgccggtgcatctgggcattcctggacgtcacaacgtgatgaacgcgttggccgccgcaaccgtggcgatgcgttacggtatggcacccgaaacggtggcgcggattctggcctcgcagcacaccatcagccctcatcgcatggcattgtccacggtgaatcgcgaggggacttccttcacactgatcgatgattccttcaatgccaatcccgactccatgaaagccggcctgaacgggttgaaggcttggaactcaaatgacggcaaggatccgttccgcgtggcgctgctgggtgccatgctggaactcggcgccgatgagacggcattgcacacctctatcggcacgtatgcggccgaattgggcatcgacgcgatcatcgcggtcggttccgcccaagaccaacatctcgatgcactggcacaggctctggcggacggtgcccgtcagagccaatccgcgtcggtggattgcgtacacgacatcgatgcggccgaacagctggtcatcgacttggcgcgcaaccattccgacgctgtggtactgctcaagggatcgcacgcgtcaggcctgagcgctttggctgaacgctgggcaaagaactgacccgataaccaccccaagaaaccgacaagaaagagaagctgcacgtgattgctctgatcattggaatgctggtgtcgctcatcgtcaccttagtcggcaccccgctgctgattcggctggtccacaagctgcactatggccagtacatccgccaggatgggccgcagtcgcatctggtcaagcgcggcacccccacgttgggcggcgtggtcatcaacttcgcgattctgctcggttgggcatcctccgcactgtaccgatacctgcgttcgggcgacgtgccctcctggtccgcggtgctcgtactgttcgccatgctgtcgatgggtctgctgggctttatcgacgacttcgccaaggtgcgtaagaagcagaacgaaggcctatcggtgggcggcaagttcatcggccagttcatcttcgccaccatctacgcggtacttgcgctgctgattcccaccaaatcgggattccccagtgcgcaggcgggcatcagcttcatcgaacagccgttcttcaacttcgacttcgccggccgtgccgtaaccatcatcctgttcgtcatctgggtgaacttcctgatgaccgcatggactaacgcagtgaatctgacggatgggcttgacggtctggcggcaggttcgtcgatgatcgccttcaccggttttggcatcatcgcattctgggaaagctaccacatcaagggcggcagccatggcggctattcctatgctgtgtccgatcctctcgatctgaccgtcatcgccgtatgcgcggccgtcgcctgcttcggcttcctgtggtacaactcgaaccccgcatcgattttcatgggtgataccgggtccctggccttgggcggcctgttcgcagccctgtccatcgccacgcacaccgaattcctggcggtggttctgggtggactgtacgtcatggaagccatgagcgacgtcatccaggtcgggtacttcaagatgacccacaaacgtgtattcaagatggcaccgatccaccatcatttcgaactgaagggttggaccgaaaccaaggtggtggtgcggttctggatgatcgaactcatcttcgtgctgctcgccctgacgattttctacggcgactgggtcacccgctccggcctgctgttcagctagcggaaatctgggtgggattatgctcacccacggaattcctatatcaggaggaacaatgcaagtagcggataagacagtggtgatcgctggactgggtgtgtccggcacctcgttggcggaggtattgagggaatgcggcgcccacgtgattggcgtcgacgagaggaagcccgaggccggtctccgctcctttgatgacgtggactgggaccatgtggactacgtcatgtcgtccccggtgttcaacccccgcaccccgttcgtgctggaagcccaacgccgtggcatccccgtgatgagcgaggtggaattcgcatggcagctgcgtgtgaataacgagcgcaccggtactccggctccatggatcggcatcaccggcaccaacggcaaaacctccaccaccgagatgacctcggaaatgctcaccgcctgcggactcgacgcgccgaccgccggcaatatcgcctccggagacatgagcatgagcctgtctcgttgcgccaccaatcctcagcacgacgtactgtgcgtggaactgagctccttccaattgcacttcaccgattcgctggcacttgactgcgcggcgatcaccaatatcgccgacgatcacctcgactggcatggcgggcgcgagaattacgccgccgacaaatccaaggtgttccacaacgccaaacgcgccatcgtctacaatgcgcaggacgccaaagtcagcgaactggcggccgaggcccaaaccgccgaaggatgccgcaaggtgggattcacgctcgaggccccccaggccggtcagatcggcattgaagacggctggatcgtggacaggagcggcgtggccggcggcgcagtgggggagccggtcagactggccgccatcaccgatttcacgcatctggcagagccggacggctcactgtacccgcatctggtggccgatgcattgacggcattggcgttggtgctgggacttggcgctgatcgagataccgcgttgaaggcgcttacctcgttcaagccgggcggccatcgcatcgaaaccgtggctgaggccgcagtcgagggcggctccgttcgtttcgtggacgattccaaagccaccaacggtcatgcggcacgcgcctcgctgtccagcttcccggccaagtctgtgatctggattgccggaggtctggccaagggcagtcgattcgaggacctggtcaaggaccaggcacataccatcaaagcggccgtcatcatcggcaaagaccagcagccgatggtcgaagcgtttgccagccaagctccggacatcccggtgaccatcatcgatcccgaagacaacgataccgtcatggatcgtgccgtcgaagcctgcggcacgtatgccgccgccggcgacatcgtgcttatggctccggcctgcgcctccatggaccagttcaagtcctatgcggatcgaggcaatcgattcgccgccgcagccaagacgtggagcgaggtgcatggcctccactgatacccataagcgtaaggcatacagagcccctgacaggcccgcactcgagatcaccgactacacgggttggcgaagcttgctcaacccgctatggtgctaccacggattccgcatggccgtggtggggctgacatgcttcggcctgatcatggtgttctccagctccacggtcaccatggccgcactgggcaagtcgccgttccttcagcttctgaaccagggcgcgttttgcctgatcggcttggtgctgggcttcgtggcattgacgatgccggtgacgttctggaaacggaccggcgtgttctttgtggtgggtgcctgcctgttgcaggcgctgacctttactccgctgggtatcgacgtctacggcaacaaaggttggctgaacctcggcttcaccactatccagccggccgaattcatgaagttcgcgatgtgcatatggctgccctcgtcgttgcatgcctgcagcaagatgtaccacaagaagggaatcaaagcatatgccgcgccgttggtgttgtatgcgataggcgtggcgctggtgatgggcggcaaggacctcggcacggccatgattctggtctccatcggaggcgtggccttcctgatcgtcggattccccggcaaatggatgggaatcggcgtattgggcgcggtggttatggtcggtgcattggcggtttccagcccgaaccgcatgcgtcgtattctggccacatatggtgattgctcggccgctgacgcgcagagcgtatgctaccagtccattcacgccaagtacgccatcgcctccggaggctttctgggattgggcatcggcaattcgcgtgagaaatggaattacctgccggccgcccataacgatttcattttcgcgatcatcggcgaggagaccggattcgtcggttgcgccatcgtattgctgttcttcgcgattctcgcctggtgcatgatcgtcatcgcattgcaggtcaccgatcgttatgttgccatggtgctgatgtgcgtcaccatttggatcgtgggccaggccatggtcaacatcggcgtggtcgtgggtgtgttcccggtattgggcgtgcctatgccgttcgtctccgcaggtggctcatcaatgatcatgtgcttgacggcggccggactggttgtgggacttatgcgttctcaaccgcagataaaacagtcgcgtcagagcgcgtaagtagactcggtaatcatgaatcaaggcacaccacatatcgttcttgctggcggcggtaccgccggacatgtcaatccgctgctcgcggtcgccggagcgattcgcgacatcgaacccacggcacaggtcaccgtcatcggcactgcggtgggtttggagaaggatttggtgcctgaggccggctacgagctcgacaccatcgaaaaagtgccgttcccgcgtcgccctgacctgtacatgcttcgcttcccggcaaaatggaagcgagaaaccgccaaggtgcgctccattcttgaaacgcggcatgcggatgtcgtggccggattcggcgggtatgcttccgcccccgtctacgccaccgcacacaagatgggcattccgattgccatccatgagcagaatgcgcgtgccggcatggccaataaactgggcgctcgttgggccgatttcatcggtaccgtgtacgaaggcaccggtctcaaaccgcgtgccggagccgacgtcgagcgcgtcggtctgccgttgcgcccggccatcgcctccctgaccaaacgcatcggtgacgaccgtgccgccgtacgccgtgaatcggccgcgcagcttggcgtcgatccgaatcgtccgctggtgctggtcactggcggatcgctgggagcgcaaagcctgaaccgcgccatcgcctcctccgccgcagacctgttggcccacgcacaaatcatccacttgaccgggcgaggcaaaatcagcgaagtacgcgaactggtcacggcctcggccggcgtggacgtgcttaccggcatcggccccgaatcggccggacaaggtgactaccataccgccgaatatctggaacgaatcgatctggccttcgcctgtgccgacttggtgatttgccgcgccggagccggatcggtatccgagctggctgcactgggtctgccggccatttacgtgccgctgccaatcggcaacggcgagcagcgtttcaatgccgaaccggtggtgaacgccggcggcggccttctggtcgcagacaaggacctgaccccgcagtgggtgcatgagcatgtgcccgatctgctcgccgatcacgaacgacttgccgaattcggccgcaaggcatgggaatacggcatcagaaacgctgccgaaatcatggcccggcacgttctgcaattagccgaaccatccaaatagtattcagatatcatcccgtgcgcgatacagaccaatcccgtcccgcaacacgagatacggtcataatatagggtgctggaatccccaaaggagttttgaattgtctcaagatcagcccatcgtgcttgaccccacgtatgcctcgttcgatgctgcggcccgccccgcggatctcggcgccacccatttcatcggtatcggcggcgccggtatgagcgttctggccgaaatgctgcacgccgaaggagtcgcggtggacggctccgatcgcgcacacagcgccaaaaccgaccgacttgaaacgctgggcatcaccgttgaattcgggcagcgagccgaaaatgtcgcccaggccgagaccgtggtctactccagcgccatcaaaccggacaatccggaaatcgtcgcagcgcacgcggcaggcaagcgcattgtgcatcgcagtgacatcctcgctctgctcatgaacggcaaacgagccgtcaccgtggccggagcgcatggcaaaaccaccaccagctccatgctgtcccacattctggtgaacgccggtgctgatccaagctacgccatcggcggctttatccaaggcccggacggcaccacgctggacggtggacacgcgggcaaaggcgatattctggtggccgaagccgacgaatcggacggcagcttcgccaaataccatccgaccatcgccattatcaccaactgtgaagccgatcatctcgaccattacggcgacgaagcccactaccgtgccgcgttcgttgcccacgccggccgggccaccggtcacgtgatcatcagtatcgacgaccccgacggacttgccgtgctggaggccatgcccgccgacgtgaaatcccataccgttgcctacggcactaccgcgcgtgaatccctgcccgatttgggcggtgccgcgtatgtctggatcgcttcggaaagcgagaccgcaggcagcggcgtcgaacagctcaccctgcatctgccggccgcggtgacggcgggggagccggtgtctcagagcgttgccctgaaggttcctggcgtgcacaatgcgcgcaatgcggccgccgccatcagcgctgccgtgctgctgggcgtgagccccgcagacgcggccaaggcggccggcacattcctcggtgcggcacgccgctttcaggtgcgcggcacggtcaagcaggtcactgtagtggacgattacgcccaccatcccaccgaaatcgcggccctgctggatgcggcccgacgccggtaccccgattcggccattcgtgtgatcttccagccacacctgttctcccgcaccaagttcttcgcgcaccagttcgccgaatccttggccaaagccgatgacgtcattatcaccggcatcttcccggcccgtgaaaagcagaccgatttcccggacatcagcccctccaccatcgtggacgcggctgagggactcaaggacgcttccgcaggcacgtggattcagccggtcgaggatatgtgcctggccgccaagatgatggccatgcgcgcccaccacggcgacgtgatcttcaccgtgggcgcgggcgacatcaccgacatggatcaggtgctgctcaccgcacttgaggcccatcgggaaagctgcgagtgatgtccgggcgcacggtcagatccgggggcaatgacaacggctcacgtcgttcgtccggaagtccccgcaagccgcgcaccatcggttcacgcggaaacacgggtcactcgtcgaagtctcgcgctccccggtccgtgtcttccgggcatgagatcgacgagccggagatcatcgacgatgtgacggtagccaagggccaggccggtgccttcgtcgatgcacggcggttgcacagcgaggattacgttgccgaaacgctgcatcagaccaccggctccctaggagtcgcatcacgcccgaaagtggtgaatttcaccgaacgcgccaaagaacgcaagcgtgcgaacgtacgtgtcgttgcgttacgcgtgttgattgctgtcgtcagcgtggctgtagtgacggggctaacgtggctgctgctcttctcgtcggtgtttcgtctggaaaccagcgagatcggcgtatccggtgccaacgaatgggtgagcgcgcagaccatccatgccatcgccgataagcaggctggaaagtcgttgttcctggtctccacccatgaggtcacagagcaactcaagtccattcccggcgtcagcgaggccaaggtctccaaacagttccccaagtcgatgagcgtggaagtcaaggcgcaacggcctgcggccatgctgaaaagaggcgataccctgaccgcggtggattcccaggcgcgcgtgttgaactcggtgaagaacgccaacgtggatggcatcccggtgatcgaggtcaaggatatagacgccagtctcaagaaccgttcggtgaaggaggcgctggcgattctgggcgcattgccggaatcgatgcgtaagtccattaccaaggtcaccgctgagacgcaggattcggtgaccaccacgcttaacgacggtgaccgcgtaatcatttggggagactcctcgcaactgaagctgaagctggcggaagtcgaggaaatcgacaagaacatcaccgctggcacggctggctttgccggcaaacatcagattgatgtttccgcatcccagaagcccatcatcaagtgacggcgattccgttggcttcgttggttccgttggttccggggcgatgttcgctccgttggtcctgctgacaacgttggttccgttggtcctgctgacaacgttggttccgttggttccggggcggcgttcgctgccggcgacttgcgcgcgtagcgccatagggtgtatgctgaaaagtccggccgaaaagccggaagtttgataactcaagattgggggcgatcggtttcgacggtgacctgttcgctgcagggaagcgtgccgagaacgccgggtccgctcgtggatgaccccggcaaaagaataagtgctaaatctaaccgcactgagttcgctctcgctgcctgattttagtcaggattaaccagtgagcagccgctccgttcactcctcctcgtctttgggaggatgctgagcgtcgtttagaagacttgctgatgcagttgagcctcagggctgcatcgggactttaactgcggatatgctcgccatcagttgtctgcgacatcgatgggggcagaaaaatcgccaacttggccagcagactacgcacgtagaagactgtgggctcggtcatcggaccggggttcaattccccgcgcctccaccaatccgcctcggcggaaacaagccgcttggctttacgaaagtaaggctgagcggcttttcttattcccgtcgattccctcgtattctctcggtttcacgggataatgtgggcaaaatgtgggcaaaaatcgagcccgcgaagccctctgccacaacgcgagaacggccccgaccggcaagtaggccgactcgggttgagtcgtctgtgatgccggacggggccgaactgtgcgtggtggtcatgcggcgaggtcgaggcgctgtttgatggcgctgacgccgatgagcgcgccggcgaggatgccgagcgcgttgagcgtggtcactatcgcgtccacgtgagtccagccccatgcggggccgaccgtgctgacgaacaggacgagtgcgggcaggacgatgaggcccaaccatttgaggatgtcgtagacgcggctggggattgcgcggttggcttcgatccgacgacctgcggttttggagaccgccgctctaccagctgagctacgcgcataggcggtcatgccggttgattgccatggcacatgaccattgggtggatatgagtaaagcccctgaaccggttgattcagaggctttcacactaatcctgatacggagtgtgccacggggtggattcaccctactcccgcttgtgttttgttttttcaggcggcttggatggtgaggcgtccgccgagggcgtggattaccttggcgatggtttggaagctggggttgccgtccttgctgaggctcttgtagaggctttcgcgccccacgcccgcgtccttggcgatctgggtcatgccccgggccttggcgacgttgccgagcgcggcctgcatgagtgcggggtcgtcgtattcggctatggcgttgaggtaggcgatgatgtcctgttcgttttcgaggtattcgctggtgtcgtagtcggtgaattcggtgctcattgtcgttgttccttgtagtcgttgaggatgtcgtgggcttgtctgatgtcggtctgctgggtgcttttgtcgccgcctgcgagcagcagcatgagcacgttgccctgcatggcgaagtagacgcggtatccggccccggtgtggaaccgcatctcgctgaccgggcctcccatgggtttgatgtcgccgaatggcctgcctgcgagcttgcagacatcgagccgggcttggatggcggccttcgctttgtggtccctgagtttcttgaaccacttgcggtattcggcagattgcttgatttccatacctctattgtatcctacagactacatcatgtcaagccgaacggccgctggagcccatagccaacgcaagaatctcccgtatgttgaactcccggtagccgtcatcgacgggtctcgagctggggagtttgccccggttgagccagttgctgatccgcttgcggctgacctcgtacccgtagtttcccttgagccattggctcatgcctgccggggttttggtcaggtggattgattcggcctcggcttggctttgctcgcgcagctcctgcacgttgatgggattgccgcacctgcacaggcgcagcgcctcgcccttcgcggccatcacttcgcgtccgcattcggggcagacgccgattatcctgtgggtgcgcggcctgcggtcaaccttggcagagcgtccatggtgcctcgacctgctggctgccgcagtattggcatggttcggtggtgatgactgcacacgttgtactgtagggaaccatgaaagtcgtattgcaacgagtgtccgaagcgtccgtggacgtggtcaatgaattgggcacgctggatcccacgttcgagccgcagcagattggcccgggattcatgattctggtgggcgtcaccgatgaggacggcgacaagcagatcgcctggctggcccataagattctgaatctcagggtgttcgaggatgcgcagggcaagatgaaccgttcgatccaggatatcggcggggagattctctccatctcgcagttcacgctgttcgccgacgtgcacaagggcaatcgcccgagcttcatcaaggccggcaagcccgagcgtgccgatttcatgtggatcaagttcgacgaggcgttgcgctccgggggagtgccggtgaaggaaggtcgtttcggtgcgcatatgcgggtcggactggtcaatgacgggccggtgaccatcgtcatcgacaccgagcatgacatgcctgacggaacacgctgaattgcgatagtgatttgacatcatatcccgttccctccaatatgttactaaagcgctttagtcttctgcgggcgagggcgcatgtcgatatgtttcccatgaacgggcagcacaatgatgtggccgcacaagcggcagagataaggggagtgaacagcagatgttcctgaaacctgaacagcaactggagcggtgcaagcgcatagtgcgccag

SEQ ID NO: 3311 - DNA, 3033 bp, Unknown
  R151_18m  MAG No. k141_7024
gttgatacaggcgactgaatcctcgtcaaggataactaatctgacataacgtacattatcggctaactattcgggaatcttagaaacggcttaatttcaacggtcttcatttcgcacaggtaactgtggatgcctctgggtggcccgttgtggctacgcatttggctacgcatttcacacgacgggagaccaacgatggcaatgggtggcggcggctcgacatacagaagcgccgatggaatctggcacgccgcgatagacatagagcccgacagggccaccgggcgcaggcggcggctcacggcccaaggcaagaccaaggcggtggcgaacgcgaggctcaggatgaagctggacgcatatgtgcgcaagggcttcacgccgaactcgccgtcgccgcgcctcatggactggctggagacttggtaccacgagcgggccgaggccaacctgcgtccgaacagcaggcgaagctacgagaacgccatcgtgcggctgaacaggatagccggcgcgaggcgcatcaactcgctgggtcacaaggatatggccgccattcaggacggcctgaagtgctacagcccgaagacggccacgatcacttggtccgtcctgaagaacgcgcttgaggccgcgcgtgacgaaaacctcatacggaggaacccggccaagatggtccgcccggtgttgggccggcgcaggccgatgaaggtcctgtcccccgcgcaggcggcggagctgataaggaacgaacccgacccgatgtggcgtctcaactggctgctcgccttcgccaccggactgaggcagggcgaacggctcggactgacgatggacgaactgacgacgctgaacggcagacgcgccttggtgatcgaccaccagttgcagcgggtaccggactctaagaaggcggactgacctctgggcgaggacgtgaccgatctgggcaacggcttctggttgtgcccgcccaagacggacagcggcgagagaatcgtggtcttggacgatgtgatgtgcggggcgctggacgaatggctcgccatacgcaagcaaaaaggtgtggactcccccatgctgttcgtcaccttgtaatgcagccgctccccctgcacgtcgatctcgaacaggtcgcctttcttggcgagcccaaggttcgtgaacatcagcctgtccgccagaccccggtgggccgcgatgaccgcgtgcgtggattcgtctcccaccggcagcgacgtcctgtagaggtgccctgctgacttctccagcgtggcggagtccgtgccgtggcgcaccggcaggctatgtgcagcctcggatagcggaccgcccccattgtgcccttgccgtccacgtcgagcagcccacggtactccttgtccccccgctgtatgaggtccttgagaagttgtccccggcctcgccaagcaccgactgcggccttgccgaaaggccctcgttgtatgccttgtcttcctcgatcatcccctgccgtccggtgtgggcagggctgcggcctcggcgctcgcggtctgtccggcggagtcgatggcttgcaggacgaatggtgcgctgagcgtcagcccgccgagcagcaggaggacgacgccgagccatccggagatgtcacgtttcataatccgccttccaagcgagcgatggaaaaggccacggccggggaacccggaaccgtggccttggcttccgaaggggtctgtgccccgaaggccgtttacgcgtggcgcctacgctaccaaatcattaccgctcacaataccatcctgccaacattagtcagcgcgacgccgacgatgaacgaagatcaatgcaatcaccactccggcgattagggcggtcacaccaccagcaatcatgtaagccagccacgtcgagacaaggaacgtaccctttcttcccagcgtcttggttgacgtggtcgcaccattggcggtgttcgtcgcggagtattgcatgcagtcggagccgccatcggaacggcactgctccaccttcttccacgccgcctgctgacgctcatactcccgcccgatgagcccggcctcacatgggacattatccgccgcggtgccaacgccgtccgggttcgtcttgcaatcctgcgtgtaccagtccttcagatccgggtattgggcggccgctttcatctggtactccagaatcggattcacatccttgtactgggccgggtcaaccgtcagcaacgcattcaggtccacctcaccgaaccctcgcttgcgttcagggtcaatgaccggcttgcccttgccgctcttcgtgttgcgtatcaaagactggatgatctggttgcccgtcgcgtcgggccacttctgcatggccagcgccaagtacgatgacaacaccgctgccgcggttgacgtgccgccattgcccgcgatatcgtagacattcgaaagaggattgaccgagtctaatacgttcatgccataggacagcaccgccacattgccgtccataacatccgaggtgggagctaggttcccagactcgtccacgctgttcaccatcaccacaccggggaaggtctccatgctgcgcgggtcgccggtcagatcatccaagccgggattcatgtcattcgcacgtccttcgaccatgacgaccccatgacgcagggcatccacatacccagcataatccgtgctgacgagagcacctccctgagaacggttgaggatgcgagcgccccagtccaccgccgtcttgacatctgcaccactgtcgcttgtcgcatcacccgcgagtttctgatcgcaaggtgtcacagcaggccccgcattaaccgccccatccgtaatatgcaacacgtccgctttgggcgccgaccccatgattccgggccacttcgaggtgtagttgcttccatcacccacgatccatgccagcatgtcggtgccgtgcgaggagtagtagccgccttcaccggacttgatcgtcgcggtcaacggcttgccgtccaccttgcactcgaccgtcttgtcatccacgtta

SEQ ID NO: 3312 - DNA, 10181 bp, Unknown
  R151_18m  MAG No. k141_7093
gagacgcccggtcccattccgaacccggaagctaaggcctggcacggcgatggtactgcacccgacagggtgtgggagagtagcacgccgccgcaccacacgtacaggaagccccgatacccctcaaaggtaccggggcttcccgcatatcaggacacttgcgcgtgggggggtatctcgcgtccttgggccccggcaggagtatcccgtcggggcccagtgcgttttgggcggcaacccgctgaatacccggtaagatgtctgaggtatcaacaaacaggtcaggaggtgacgcgcatggtggcgccaagccgtgatgaccgtagcgtagatgcattggtgaaatccaaggcagtacttgatgtattggcggaactgggaccaagcaccgcaaaaaccataagcgaacgtactggtgaacccgtaagctcaacgtatcgtttgctggataatctcgtcgcagtcggttgggtggaacggggcatcaatcgtggcgagtatcggcttggcatcgattgcgtacgtatcggcggccaaatcgaaagcagactggacattcagcagatcgctcgccgtaccttccgcgcccatcacggccagttcggcatctggggtctgttcgttcggaggcgattgcgcacggtgtgcatcgagacacgcacccgtgagacattgcaaagctatgcacagctggtgggcaatagcttgcctctgagcatgagcgctccctctcatgtactgacggcctggcttcccccggctcgctacgagcagctgttggaacactatgcctataccaacgagctcggcggcacattctccacgatgcgtgccacagcaatgggacaggctcgtcatatacgcgaatgcggcttcacctatgacgtcggccagaccatggccggctccgtgactatcagcgtaccggtattcaatcacgccggagagattcaagcggcaatcgccctgagtggcctttcccgctccttggaacctgagctggcctgtctggtagatgggcaaccggcaacggcatcggttcaagacatggtgcgattggtgcggactgccggccgtgaggtgtcgcgaggccttggatacagtggtgatcatcttggcctgaacagttgaatatgatgagtcagggataagtcaggggaaggaacgtcgacgatggcggaagacaaacgtgaaccgacccgcgctttagacaaggcgagtcgtgtgatggacgcattggcggcggagaatggcctgtcgccggcagatatcgccgacgcctgtgatatcccgcgatcctccgtataccgcgtgctggatggactggtcgatgtggggtgggccgtaacggatacggatggtaactactcattatcactggactggctgcgattggctgatgccgctcgcacgtctcgtaccgaatggcagcctgcgattgcggtcatgcatgccatcaccgcgcaaaccggcatgacctcattcctcagtgtggtctccggcactgaattggtatgcgtggaatgtgcgcaaggtcatgccatcgattcgctgatcctgcgcccgggccgcgtgctgcctctgcatgctggcgcggccggccgcgtggccttggcgtatttcgaggatgccgatgtcgaacgctatcttgcaggagtgccgtttccggcatataacgagaacacgctggtcagtgtggaacagttgcgcgaggatattcgcttgactcgcgaacgtggatatgcactgtcggatgaggatgtgacgttgggtgtcggtgccgtcggtgtaccgattgtggacaacgagtccggtcgcgtgatcgccagcctgtccgccggtggattcgtggacgaagtgttagccactcaagaatccttggccgcgttactgcgcgatggcgtacgcgaaattcaggcagcctgattcggcccgctaggctgtcgggctggacggttatgtccggtcagctatggcctttgccggctacggttctgctggttatgcttctgcccgactacgctgcggtccgttacgcttcggccacacgacccaacgcgatggcggtgatcagcacgtacgcctcgcgcgggtcggtggcatcccagccggtggattcggcggcgcgcttcaaacggtagcggatcgtattgggatgtacgttgagctccttggccgtggtctcgagcgaaccgccgaacttcaggaatgtggagacggtgagcagcgtcggatcatccgggcctgctgctgtcaggcttccgtagaccacgcggaccagttcgtcacgggcgtccgcgtcgccgatcaacgcacgttcgggcagggcgtcgtcggtgcgtaacgggcgcggcaatggctgcacggtggcggccagggccggcgcggcctgaagacagtagagcgtggcctgaatcgaacgcatcgcgccatcggcaccggtgcgctgtggacccaaggcgattggccgatcggcggcgaacgacggggcgatggtattgcagatgatttccggcgtggccgcaccgaccggacgaatcaacgccactacggcggtgctgttgccgatcgggcgcttggcggtcagacacacaccgccgaaatcggccacgattttctcgatttccttggccgtacgtgcggcggaccgggcagggtatccggcgatggtgtaacaatcgaagtcatgctcgaaaccgaggatggtgaacagggactccactcgttcgtcggccagatgattgaacaggcactcgaacagcacggtgcgtacgcggttggtcgcggtgatgccgggtgcggccgaatcggatgaatcgggcgcacccggcataccggatgcaccggacgaatcggcaacgtcggcagcaagaagttcgagaaaatctgacatagtcactagtgtagcgtcgctgattggcgttgcctttcagccaaagactctcgccaatacgtcagcaccacgaatccgaatacaaacgcaaccggcaacatgtgccgctcgaaattattggccggcgcggtaatcatcacgcccatcagcagtagcagcggaatatgggtcatgagggtgagccaacgtcggcgaatcacctcggccgcgccgatcagcaatgtcatcaccacgtagaaattgccgtgcgtaggccagccgagcacgggaatactgccccatacgcgagtgaagccggcgatgtgctcacgccagtcatggttgtaatccttgatccatgtggagtttttctgcacgtaatcgctggccacgtaataatccatcgatacgtacggctgatcgttcacattgaagtatccgaagcatttggccagcaacgcatccagcgcgatgatcggattgtccttgacgatttcgaaccatgccttgttgaaattggtcatatcctcgggcgtcaccgtgcgccacttgtagctgaccttcttggcctgaataccggaggatttcaccgggtcggcatcctgctgggagtaagcgtcggccatctgatcgagattgaagacgggcgcgaggttctttttggcttcgtctgaaataccgtccggattgcgctgagccacgcgggcgatcatttgcagctgtacgccgcggctttcgattggatcgccgccgatgatcgcaccagaggagatggcgaaggagatgccgccgtgaatcagtacggtggggatgagcagcgccacgacgtaagtcgcccagcgtttgcggtcggcgatcagagccagcacgatttgcagagcgatgatgtaccacgcatatttcgcggaaatcagcatcaccgacgtggccaggatgaaggcgatgaagctgtggcacggcaagtggacgggcgtggcgatggcaggggtctgaggatgtttgcgggtgccggcggggtgccaggtctggacgagttcataccagacgctgaaccaccagacgaacgagaacgcgaacagcggcgatttggtgatggagatagtggaaaacacggccagcgggcagaccatgaagaacagcagaatcaggaatctggccaatcctccggcctgtgggggaacggcggaatccgttgccgtttttcctatccaaggccggttcaggaatcgattggcggcggcagcgcagcagaacacggcgaacagcgtctgcagggcagccaacgtcacgatgccggcatcgtttgagccggtcagatgcctcgcaaacgtgactatcgcgccatagaacacagtgagtaccacattgtgctggtcggtcagatacgtgggatcggacggccacatgtagtgcgcggtggggtagatgtccatcggcacgaaggagaagaagccgatatagggctgtttcaggccggtccactggttccaggcccagctgaattcgcggatctgtgagcggaggtccgcgccgaatgcggccagcagagtggtcggcacccagagccagccgacaaaaaacaccagcataagcttccagaaccggttcgtgccgcgtgtgatccagcggtccagaacagtgacggtggacgtgacgatagcgcgaacggtacgacgggtcttggctggttggctggcctgctgatcggcggcgggccgtgatgtttcgctattctgctgatggtggcgtaggcgctcgccgatggtcttcggcagtatgcgctggcctgctgcgaatcgcgccatcagcgtgatgattccgagatatatcaggaacgacacgacgaatattgcggtattggcccagttccaatgggcgagggtgccgttctcctcgtcccggtacagcgggccgaccgccgagcacagtgcaagccacaggcaggccagcacggccagtgtccagcgcgcggcagcgcccacgcgcgcaagatgcgggtgggactggcggctggatacggcggcaagcttcgcggtggctggtgacgtcatgacaatatatggtagccgcacaggtcaacggttgatattcgatgtctgccgggcatcgccattgttcgcaagccaatacgacggccgggtgcatgcgtgggctcggcgaatgcggaatttccgaagttgtgaacgctaacacgggctgtccggcccaaaatggttgattttgtgcgcttttccgtggaatatcgcgggcaaaaaacggcgcaaccgaggtaacgtagtgtccatgatgattgcattgaaagctgcaacgccgcagctacccagaactacagccgtcgcggatcatgtggtcgccgtggacgaaaccgattcgaccaacgcgctggccgcgcagatgatcggcgacgggtcgttgacgctgcccgaccaccaggatggcgaactggcggtggccgtggtggccgccgaccggcagaccgccggccgtggccgcaatggtcacaagtggatcagtcagcccggccgttgctcgacgatgtcctatgccgtgcgcattccgcgcgcgatcgccaccgacgaatccgtcaatggctggctgcagatgatcgccggactggtcacgctggacgccctgaacggcatgatcgaggaatacggtgccgcgccgaaccagccggactgcttgctggaactcaaatggccgaacgacgtgttctgccacgggctcaagctaggcgggctgctctcggaactggtgattccgccgtcgtccggtactgatgctgatgccgatgacgacgtcgtcatcgtgttcggcgtaggcctgaatctggcgctgggtgcctgttggctgcccacgccgcagtcgacttcgctgcagctgcatgtcacgggcttgccgtcgtttggcgagatgcgcgatgcggtggccgaacgtcaggtcgagggcttccgtgaacgactggcgaagttcatcgccgacccgaagggccaggccgagtcgttgcgcgaggaaatgaaggcggtgtgctgggcgcgcggccgtcaggtcgaggcgcatttcacggacggcaccacgctgaccggcgaagccatcggcctcaacgaagacgcctcactgatcctgagaacacaagacggcacggaccatacggtccgcaccgccgatgtgggagtgctgtaatagccggccagtagctagctagtagctcaggtcagcgaccgagcttggacaggccggcggcggccagagaggccaccacggccttgatggcgtcgccgacgacgaagcccatggaggccagggccacggcggcgagcggcgcaccggtcaacgcggactggatgatgaagccgaaggcgtacaccaccacgacgccgccgaccagcgcggccagcaggtagcggcccgcggtgcgcgcggcggccgcgaaggacgaagtgtcggacttgccgcgcagcagggcgatgaccaccacacccggcaggaagccgaagaggaagccggcgctcgggccgaccagggccagcgtggaggtgccgccggcgaacaccggcaggccgaccgcaccggccgccagataggtggcgacggcggcaccggcctgacgccacggcagcatgagaccggcgagcatcaccacgaacgtctgcagcgtgatcggcaccggcgtgcccggaatcggaatctcgccggcggccgcggacagccacatcagcacggcgaacagcaccggcttccaggatgcggcgacgatacgacgggcgagcggcgtggtggccgctgcggatgcggtggtgtgtgaagtctgcatatcaataacccctatgttgtgtgatatcgccgtgaacggcgggcggtatgcgatggatgaggggaggttccggcgggccgtgcggtatccccgacagcccgaaccgtccatatggtggacggtcccaaatgaatccggccctgtgcgggcgaatcgtgcggcgatggaccgatgccggtccggtcgccttccgttcgcccgcagatgagccttcccccgaacttacggttgccatcgtagaggtgttcgatttcgtgcggtttcgtaccaacttacaaaattgtcgatttcgatttgtcataagttgacgaacgcaaccgtaacgtcaacttcttgaaccggcgcgcaaggatgtgcaatcggcggatttgcaacgtttttgatagccggcgccaacggttacgttgccggaacctacgcgcgcgtttgttcgtagcctacaaaagggcgtgaaagcttttgtgcgaacgcggcttgccctctcctctatatggagagcacaatttgacactatggctcatactgtcaaaaaactgctgattgcgaaccgaggtgagatcgctctgcgcgtggtgcgcacggccaaggagatgggtatctccaccgtggccgtctactccgaacaggaccgcaatagccgctatgtgggcatggccgacgaggcatacctgctctccggcgacacctacaaggacacgtacctcaacgaggatctgctgatcgacatcctgcacaaaaccggtgcggacgccgtgcaccccggctacggattcctttccgaagtgccgagcttcgcgcagaaggtcgaggatgccggtgccatctgggtgggtccgcaccacaccgcgctggtggatttgggcgacaagatcaccgcccgccgagtggccttgcgcgccaaagtgccgccggtgcctggcctgtccgaaccggtgaccgacgtgcgaacgctgctcgacttcgcacacacccacggctacccgattatgatgaagcgcactgatggcggtggcggccacggcatcaccgtggtgcatgacgacgaggagctgcgccgcttctacatgaaccacgacgcgctgcaaggcggcgatctgaaggaatacttcatcgagaagttcgtggacaaggcacgccacgtcgagacccagtccgggcgcgactcgcacggcaacttcaccgtgtactccacccgtgactgctcgctgcagcgccgcaaccagaaactcgtggaagaggcgcccgcgcccttcctgtccgaggaaatcgtcagcacgctggaggaatactcccgccgcctgttcaccacggtcggctacgtgggcctgggcacctgcgaattcatggtgaccccgaacggcaaagtgtacttcctggaagtcaacccgcgtctgcaggtggagcacaccgtctccgaagaggtcagcggcctcgacctggtgcgcgaacagctcaatatcgccgccggtggcgagctcacccgcgcccccgaaccgcgcggccacagcttcgaactgcgcatcaccagcgaagacccggccaccaacctgacccccggctccggcaccttggagaagatccagtggccggccggccccggcgtgcgcatcgataccggtgtggaacagggcgacaccatctccccgaagttcgattcgatgatgggcaaggtcatcgtcactgcccagaaccgtctcgatgccgtggcccgtgtgcgccgcgtgctcgacgagctcgtgatcgaaggcgtgcccacgccgattccgctgttcaaggagatcttccgcaacgacgacttcaccgccgagcatggccatccgttcgccgtgtccaccaagtggctggagcgcacgtacctgaaccgcacaccggcttccgccgcctccggccagccggcctccttggccaccgccccgggtgccgctgccccggccgcgcccgacaagtccaagtcggagacgttcgtcatcgagatgaacaaccgccgcgtcaagctcaccgtgccactcgacatcgtggagaacatcaccggctcggcccgcgcccgcggtgccaagcgccccacccagccgttgcgcggcgcaggcttgcacaacgtggcctccggtgccgccacggccaacgacggtgccaaatccggcgtcatcgcctccccgatgcaggccgtggtcacgcgcatcaacgtgtccgaaggccagcaagtggccaagggcgaccttctggtggtgctcgaatccatgaagatggagaactacgtgtacgcgccggccgccggcgaagtgaagaagattttcgttggcccggccgatggcgtggaggccggcgacacgctggtcacgctggacgtgaacgccggcaaggccaaggccgccgacgccaagaaggagggcggcaatgactgacatcatggattcgccggccgtgaaggccgcggctgcggcctcggccgccaacgccgcccagccctcggcccaccagccgctgcgcaccgccgtggtcaaggccgccgaactggcccgcgccgccgaagagcgcgcccgcgacaagcagcacgccaaaggcaagaaaaccgcgcgcgaacgcctcgacctgctcttcgacaccggcacgttcgaggagatcggccgcttccagggcggcaacatcgccggcggcaacgccggtgcagctgtcatcaccggcttcggccaggtctacggccgcaaagtggccgtctacgcccaggacttctccgtcaagggcggcaccctcggcaccgccgaaggcgagaagatctgccgactgatggacatggctatcgacctcaaagtgccgatcgtggccatcgtggactccggcggcgcccgcatacaggagggcgtggccgctctgacccagtacggccgcatcttccgcaagacttgcgaggccagcggcttcgtgccccagctgagcctgattctcggcccctgcgccggcggtgccgtctactgcccggccctgacggacctcatcatcatgacccgtgagaactcgaacatgttcgtcaccgggccggacgtggtcaaggcctcgaccggcgagaccatctccatggccgaccttggtggcggcgaagtgcataaccgggtgtccggcgtggcccactacctcggcgaggacgaatccgacgccatcgactatgcgcgcaccgtgctcgcctacctgccgtccaacagcgaaagcaagccgccggtctacgcctacgccgtcacccgcgccgaacgcgagaccgccaagcgactcgccaccatcgtgcccgccaacgaacgtcagccctacgacatgctcgaagtgattcgttgcatcgtcgattacggcgaattcgtgcaggtgcaggaactgttcggcgcctccgcgctcgtcggcttcgcctgcatcgacggcaagccggtcggcatcgtggcgaaccagccgaacgtgctcgccggcatcctggacgtcgactcgtccgagaaggtcgcccgattcgtacgc

SEQ ID NO: 3313 - DNA, 14548 bp, Unknown
  R151_18m  MAG No. k141_7856
aagcgcaacctgacgaggcaacggttgaagaccggccgcgcctgccggatgcgcgaggtcctgcaggacatccacacggacagccgcaccccgtccgaggcatgggtgcgcctgcatcgcctgtgctcatggatgatgcactcgaggctcgagcccatgaaggacctcgcccgcatgatccgacgccacttcgccgagatcgtcgcctacttcgagcacccgtacaccaacgccgtgctcgagggcgccgacagcgtcatccagaacgtcaaacgacgggcgagaggcttccgcgacatggactacttcgccaccatgatctacctgacctgcggcagactcgacctcaaagccgtcaccaccacttgaccatcacccaccacaaacagcgaatagcctcaatttgttatctttaccgcgcttgcgtagacagagaacgctcagacctcgaagatcgccgcatattcgcgagagaacccgcctagtcaatgagatatggattgaaaacacgctcggtgacggggatatggagcatcagcatggtgccgtaaccaagaaccaccagcaggaacagtccaccgggcatgtagaaccagctggccaccagcagcgccacgaacacggcatccacgatgaccagggccacggtcatcgcgatgtgggagatgccgaagatgaaggcgttcttcaaggtgccggccacggtgttctcgaagcgtgcctgaagcgcgaacacccattcgaagccgataagccagaggatggtcagcgcgaatttgatgatgagcagcggcgtgatctgcaggacgatccatgaccagaccagtgcaatcagcaccaccaagaacggcagccacagcagtgtggctttgatgaagttggctttgaatgacttgaagtagttggcggttacgcctttgccctcgccctcgatggagcggcggcaagcatcatggccggcggtcagggccgcaccgatggtgatgagcggaatcgaagtgaccagcatcagaatgttgatccatacgccgtcaacaagattgctccacgcgcgcatgaatttcgagtccggtgccagccagttcatcaactactccttgtgtcgcctgtggctcccctctctgaggggagctgtcatcgcagatgactgaggggagacttgatggagctcaggatactcccctcagtcggcttccgccgacggctcccctcaaagaggggagccggattggtggagctcagcccttgacggctccgccttcggccctgcaattacggactcgcctacgacgaggctcatcattagcttcgccgctgtcgcggctcagcctggagcctgctggaagcccactgggcttccagccatgggctgacgacgcgagtcgtcagcccttgacggctcccgccatgacaccagagactatatacttctggcataccaagtagaagacgatgatggggatgattgccagcaccaggcaggccatcatggcgcccatatccacggaaccgtagccgcccttgaggtattgcacggcgaccgagatggtcttgtacttgccgaggtcgagcgtcaggtacggcagcaggtaatcgttccagatccacatggcttcgaggatggccaccgagacgatcgacggcttcataatcggcaccacgatctggaagaagatgcgcggcactgacgcgccgtcgatcatggcggactcctcaagctcctgcgggatgcccttgatcacgccggtgaagatgaacacggccagaccggccccgaaaccgaggtacacgatgcacaggccccacggggtattgagcttcagcatgtcggcgatcttggagagggtgaacatcaccatctggaacggcacgatcatgttgaacaggaacagggtgtagagtagcttcgcagcccagttgttcacgcgcacgatccaccatgcgcacatcgaggtgcacaccagaatcagcaccaccgagccgacggtgataagcagcgtccagccgaaggaggcgaagaactgcgtggtctcgatgccgcgcacatagttctcaagtcccacgaacgccttgccggcaggcagggagaacgcgttcttggagatgtacgccttctgcttgaaggagttgatcagcaccaggacgatcgggaaaatccagaacagggagacgacggcaaacagcacggtccataatgcgccatgcttcacaggcttgttctcgttcatcaggctgccacctccttgctcgtggtgagcttgttctgaatcagggcgatgaccgcgaccaggatgaagaacagcacggccttcgcctggccgacgccttcccagcccatacggccgtagaaggtgcgggtgatgttcagcgccagaccttcagacatgttgctcggcgcaccgttggtcaatgcgaggttctgatcgtagagcttgaaaccgttggtcacggtcaggaaggagcacacggtgatggacggcatcatcagcgggatgatgatgcggaacatggtctgccgtccgttggcgccgtccacggccgcggcctccagcacgtcggtgggcagggcctgcaggccggcgatgtagatgatcatcatgtagccgatctgctgccagcacaccaggatgaccaagccccagaacccgtaggacgccttataggtcagggcgcggccccagtgggccagtacgccgttcaggagcagcagccagatgtagcccaggatgatgccgccgataaggttcggcatgaagaataccgagcggaacagcgtggagcccttgatcgccttggtcagcatgtaggcgatggcgaaggcgatcacgttgatcacgatggtggtcacgatggtgaacgcggtggagaagccgagcgcgtgcaggaattccttgtccttcagcgctttgccgtagttcttaagccccacccattcaccgtcggtaacggtggtgaattcgcagaagcttaagtagatgcccatgatgaagggcaccaggaacccgatgatgaatgcggcgaatgtggggagcgcgaacagcgcccaccatctgcgtatcgccttgccagccatgctgatcatgacttttcctcctccttgagtccgctgcgttgcgacactgcatcgtgcgccggctgcggagttcaactcaatgcgagcctgccgatcgagaaccgcatgcacggcctgttctcgttcaagcctatgttcatagtaaacgccgaatcattatatgtcaaacgttgtcattttcagcgtttcaagctcgagcatactccagctccagcaatcttctttcaactaagataatggctatataaagccaatctgacgccgtcataaacactttgcaaacgtttgtaatacaatcgttgtcatcgccgcaaatcaatcaatcagcatgtacactggagtcagttgtgcatgtgtattgcgattttccattcaacgcaagggggctgcaatggctacgagcattcaggatgtcgcccgcgaggccggcgtctccatctccaccgtctcacgttccttcaccaggccggatctggtgtcggccaagacccgcgagcgcgtgctcgccatcgccgacaaactcaatttctcactctcccgctcggctgcggccctgaaatccggccgcgccctgcgcatcgcagtactgatgagcggccatatccgcctgtggttcaccgcctcggtcatcgaggggctcaacgaggtgctgcacacgcagggctacgatatttcggtattccagatttccagcatcgaggagcgcaaggaattcttcgagatgttgccggtacgccgtaacgccgatgccgtgattgtggcgtctttcgatatcgacaacaacgaaatcgcgcaactggcttcggtcggcgtgccgatcgtcggcatcaattcagtcgagcccgaagcccgcggctttaccgccgccgtcaatatcgacgacgtgcagggctccacgctggccgcccgccatcttatcaatctcggacatcgccgcatcacctatatcagcaccaatcgcgaggtgtcgctgagcttctccgtgcaaagccgattcgactcattcaccgcctgctgccgcagggaaggcatcgagccgcaggtcatcgtctgcaaggtcgatgacgatggacgttatgaaatcagcgacgtggtcgaccaactcatgagccaagacgagatgcccaccgccatcgcatgccaggaggatggcatcgctttgccgcttatgttccagctggagcgcaatggattctccgtgcccggcgacgtctcgctggtcggctacgacgatagtttctacaccggcgatatcggcctgaccaccatccgccaggatccggtggaaatggcccgcgtggcagcccgcatgacgctcgatctcattgacgaaaagccgattgagcaaccctacatcgtgttcccggcccagctgaaggtccgctcctccacctcccgcgttaagtaggctcacacaacaaagcccaccatagaaaaagtgtgaggcaaccgcacaataacgctcaatcgcacattgtggagaatggcgaaaaatcgccgattcatggccccacagcgtgcgattgagcgggtgcgtgcctcacacttttctgcggcggacgattttgtgcgagactcagcaatacaaagcggcgcccctggagaaggaaaggcaggggcgccgcggattgttacttatcggctatgggactctatgagactcagtgcgaggcctcgtattcggaagcccaaccgtccacgaaggcggtcttgacggcatcccacttgccggtgccctgcgcgtactcgagcagcgcctggccgaccttgttcttccattcctcggacggcatcatggtgaagttccaagaaacctgggtcttgccggactcctggtcttccacggcggcctcggtcagcgggttgtcgcttttgacgtcatcgaaggtcttgaacggggtggtgaagcccatgtcctgagagagggccttcttgccggtatcagaggtgatcacccacttgaggaagtcctcggtggccttcttgtcggcgtcggaggccttgtcattgatgcaccagtagttctcggaaccggtggtcagaccctgcttctcctcgcccttgacgccgatgtagatcggcatcatgcctacctgatcggcggtcatgccggccttctgcaggtcggtccaggcccaggtaccgttctggtagaaggcggcctcgccgagcgcgaactcggagttcgcatcatctccggtcttggcgctcagctgggtgggttcggtggtggagtcggtgatgtacaggtcgaagatcttcttgtagttcggcaggtaggtgcccttgatcttggccggctgctcggtgacgttgtcgtccttgaactcgtagtaaagcggcagattggccaggtgggtcttgaagcgccagtcggagctggagtcgaagccggcggaggtgaacgcgcccttgatgccgagctcgtccttgcgggcctgcatgtcgtcggccacggccttcagggtgtcgaagttgtcgatttcgtccatggacgtggccttggcgccatccagcgcgaagtacttgttgaggatgtccttgttgtagatcaggccgtaggtttccatcacgtacggcacgccgaccaccttgtcgccatccttcagggccacatcctggttggtgagctccttgtacacatccgtattggacatgtcggcggtgtacttcttccagttctggtagccgaccgggccgttgacctggaacaaggtcggggcttcggttttggcgatttcggacttcagggtctgctcgtaggtaccggaggccgcggtctgcaccttgacctcaacgcccttttccttggtgtattccttggccagagcggtccactgatcagccgcttccggcttgaaattcaggtagtagaccttgcccttggcgtcatcgccggaggtcgagcttccgcaggccgccaaagcgccgagggacatcgcagcgacagccgccatcgcgactgctgacttgactgtacgattcatcatcgaacctttctctttcatcgtcgacccggccgtccccggtcgggacaggtacgctagcacgcacctttacgactatcgacatgcactattgtgcaacggtttgcttctttttgcaaacgatagcaatatcggcgcgtcataaatcatcattttcaggccattgtcaacaaatatcccattaattcagtcatttttgcctcattatcgcaatgcaagcgttcgcaactatgagagcgctaacatatctttcatggcgatcgattgccacttatacccatcaaaaaacaacacgccgacgctatcgtttgcaaatcatttatcgacataccgcaattcccgccacaaataataaaggcccgcccgcagtagcgggcaggccagcgcaatcgcagcgcaaccggggctaggcgttccaccgttcgatgacgttatctcccttatagacgctgagcaccgagtagtgcgccgtatccaaacgcagcaaccgtgcgaaatgcgggtccacgcccagccattgcgaggtgaggatgcgcaggatgtgcgcatgagccaccaacagcacattatggccgtctttcagcagcggcgtaatctcgtcgatggcgctcttggcgcgtgccgccgcttcttccagcgtctcgccaggcccggcatggaccggcacctgttcgcccgaaggcaaggtctcgacccagtcgccctccagcgtgggcgtcagcgagcgcggcccgtcacgccacacatcccattcaaaaccgctggcctcactcacctgctggcgcgtacgcccctcggctcggccgtaatcccattcagcgatgccgtccaacacaccgtggtccgcaaaaccagccaattcagcggtttggcacgcccgcttcagcggactggaaaacacacagctctggctgaatccttcggggaaggcctcgcgcaggcgccttccggcatccgctgcctgctgctcgccgaccgcggtcaacgggatgtccgtgcgcccggtatgctgcccggattcgctccacacggtctggccgtggcgcagcaacaccaaaaatccattgccgccacgagagttctcgacggcaacggtgccgttcacgttctgttcgctcatgcctccactctagtctgcgctcgttcatgactccaccattaacgcccatcttttgcgctgagatgattgagatgctattagactgagagtcatgagcgacgaaacgaacaccgacttcccctccagcgccgaccgcgcggtcgacagcctgcaccgcatcgacgagaaggtcaacaggctgcgcgaggaccggctcaacgaccctgattctctgggcgacaagctcatcaagtcggcagtcccagcgctggcaggcttggttgccggcaaagcattccagatgatatgggacaagggcacaagcaaacgcaatctgcgcaagggactggcggcagacgcgccgcaaagtctggcaatgagtctggcattcgccgccgtttcggccgcactcggcgcagtggtttcgcagctgtcggatcggggctccaaggcgttcgtcgaccaccgccatcgcaagcccagccgctaatcccccggttggatgatggtttctgttggctgactgatgactcatcgctggaatttcgtcaaggaaccatcagtcaatcgacaggaaccatcagtccagcacagttccgccacacaatatcggcatttcactgtgaggtaatccaccgtggcgtccggcgtctgccgtgcgacaataaagccatggttaccaacgcaacaatcgaggctcttctgggccgccgctccatccgtaagttcaaggacgaggccatcgacgacgatacccgcgccacgctcgaaaccgtcgcccaacatgccgcgtccagccagttccttaacgactggtccgccatccgtatcaccgacccggccaccaaagccaagctcgccgaattcggccatcagccgtatatcgccaccgcgccgttgctgtacgtgttcgtcatcggcgagcaccgcaacgcacgcatcgccgaacgcaagggtatcgatcccgcttccgacgaattccatctcaagtacagctatcgcttcacccaagctcagaacgacgcagtgctggccctgcacgccatggagaccgccgcctattcgctgggactgggctgcgtgattctcggctctctgctcaacaacatccccggcccttatcgacgtgctgaatctgccggaatacacgtatccggtgctgggtctggccatcggcaagcccgatcagaacccgaccgtcaagccgcgcatgccgcgcacgatgcagttcttcgagaacacctacccggctgacgccgatggcgtactcgaccagctgcccgccttcgacgaggaagttcaccggtactacgatctgcgccaagccgaccgtccggtggacgctttcagcgatcaggtcgccacgatcagtcggcaggatgtcagccatcagacactgctcgacaaggccgccgctcagggcttccgtctggatcagtgagaccagaaccaacgagatagcctcggataggctcgtcactgagtcgtctcggtctcagcactgcgacgactcagttccaacacctcaacatttcatcaccggataccggcaaaattgcacaaccatcccgccggtgtcgcaccatcaacaaacgttcacatatcagtcccattatgcggacaaccaacggccagttttgcaagaaaacccgccaaaccagcagtatccgcaccagtggtgggaatagactgcatgtggccgcaatgactacgaaccggaaaagagggactggatgcggacggtttggcaagtctttctacgcgattgcagacgtatcttacgcaatcccgttgccgttgtggtgacgctcggcgtagcaatgctgccctcgctgtacgcatggttcaacattctcgccaactgggatccctattcagccaccggcaatctgcaagtggccgtagccaatgaagaccaaggcaccaccaacgatctggtcggccatctcgatgcgggccggcaggtcgtcaagaaactcaagcagaacgacgaactcggctggcgcttcgtagacaatgaggaacaggccgtccacggcgtggagaccggcggatactatgcagccatcgtgctgcccaaggatttcagcgccagcttggtcgaatcggtgaccggaacctccaaacagccgaaaatcaagtattacgtcaacgagaagaagaacgcgatcgcgccgaaaatcaccgacaccggcgccaccaccatcgatgagcagatcaactccgccttcgtcaccacggtagccaccaccgttgcctcggccatttccgaaaccggagacgatctcggccaagccactggcaaagtccagcacgatacgatcgatgatctcaatacggtgatgtccacgctgaacaccgttcaggattcactcaccgacttacaggacacgctggcccaatcagacacgattctcgccgacgccaaacagaccaccgcctcactcaagcagaccgtcgcggccgcgcagaatgcctcccgccagtccggcacactgttggcggaaacacaggccgggtcacaagccttctccaccacactggtcggcgcgctcgacagcagttcagcacaactctccggactggccatccacgtcaacaacgccgccggcagcatcaccggctccttcaacagcgcgcagaactccgtcgacaccatcaccaacacactttcggccccactgaacgccacccaaacgtcaatcagcgatctgaaagacgcgctgaccaaagccggcatcggcaaagacaccaccgacccggtcggccagaacatctggaaacaaatcgatgcgctcgactcattgatcagcaaacagcagacacagctcaacaccttccataccgacaccacacagttcatcagctccggcaaagacgccaccacgaacctttccggagccatgaccaacaccaccaccggcggcatcgcggcgctgaataccgcgcgcggctcgctgaccggcaccgtaatgccgtcgctcacctcatcattgaacagtttcgccgccctgaacggcacgctggatggcacgttgacttcgttgtccggcaccttggatcaggccgacgggctgttcgaccagcttgtcgataccctgaaccaaacgaaaaccaccatcagcagcacgcaggattcgctgcgccaggcggccagcgatgtcgccaccgtacgcaccgatatcgccacgctcgatagttccgccgcttaccagaaaatccgggatacgctgcatctggatgacaagggattcggcgagttcatgggcaatcccgtcaccctgaccacgaaagtcgtgtacgccaccgacaattacgggtccgcagtcaccccgttctacacgaatctggcactgtgggtaggcggtttcgtgctgattgccatctacaagcttgaggtcgaccgcaaaggcattcgccgtatcaccgctacgcaagcatatcttggccgctggctgctgctggtcaccatcggattcctgcaagccatcatcgccaccattggcgatctggtgctcggcatccaatgcgagcatccgctgctgttcatcttggccggaatcttctgttcgttcgtctacatcaacattatttacgcgctggccgtggcgttccgccatatcggcaaagccatcgccgtaattctggtcattgtgcagatacccggtgcctccggcctgtatccgattgaaatgatgccgaacttcttccgcgaactgcacccatggctgccctttacctacggcatcaacgcgatgcgcggcccgatcgccggcctgtacgcgaaccattactggctcgacatgctgcacctgttctggtatctgccggcggcgcttttcgtgggacttgtcgtacgccggtatgcgatgaacctgaacgcgctgttcgaccatcgtttgggagataccgacctgatgatcaccgagcacaacagcatggtgaacgaacaggtgagcttgaactccgtattccgcacggtgtccgacagcaaggaactgcgcgatatcatcgctcatcgcgcgcaccggttcttcgcgcggtacccaaagatgatcgttgccggtctgacattgctgaccgtactcccgttcgtattcctggtactgctgttcgtcacccaagagaaaatcgccatgctgacctcctggattctgtcgattattcttatcgacgcctatctcattgtggttgaatacgcacgcgaaacctacgccatgcagcttggcgtcagtgccatgagtgccgacgagttccgcaatgtgatgctcaacggatatgtgtggcggcgtttccacggccacggacgtcacgaagcggcgatgggcagcaatccggatatcggcgaaaccactgaacgactcacactgttcggcgatcaggccgccgagccgactgcgcacaccgcacagttcgagcagtccggtcagtccggtcagtctgggcaaggaggcgcacgatgaagcttatctggaaaatattcgtacgtgacgtgcgccaagccacccgcaatgtgatcgccgtaatcgtggctatgggattggtgattgtgccggcactgtacgcctggtacaacatcgccgccagctgggacccgtacggcaacaccaaggccttgaaggtcgccgtggcaaacgtggataagggctataagtccgatctgatgccgatcaccatcaacgtcggcgaaaccgtgaccaatacgctcagggccaatcatgaccttgactggcagtttgtggatcgtgctaaggccatcgatggcgtgaactcaggcgaatactatgccgcgctgattattccaaagagcttcagctccgatatgatgacgctgttttcaccgaagatcaagcacgccaagctcgaatactatctcaatgagaaaatcaatccgatcgctccgcatatcaccgaccagggtgctaccaccgtggccacgaccatcgaccagacatttgtgaagaccttggcgagcgtggcgctggatttggtttccaacgtggccgattacgcgcaaagcccgcaaatggagcagtacgtcaacaacgcctccagtcatattgccaccatgtcgtctcgtttgaccggcactgcgtcgcagatggattcctatgccaatctgctcggggccgccaacagcatcattgattccaccgataagctgctgggatcaacaggctcagctgcggccacaaccaaaaaggcgttgaaacagacccgcaacggcgtctccagcctcgacaaggcattgtccggagccaccgatggcgtcggtacggcattgcagcaggccggttcatcctacgacaccattgccaagcagatcgatgccgcttttgccgatgtgggctcacaatcctcgcagatatcaaacaagctgaccgatatgcaatccaaagtggaggctcaggccgacagctttggaaagtatgccgccgctttacgagatctcgccaaacaagcggcttcactgcccgtgggcggagataccgttgccgctcaactgaacgcggctgcagaccaagccacaaaggcgcagcagagcatgcagcaagccgccaccgcgttgggcgatgcggccacgcacatagcaaatggtactgccgatgccgatacagcgcgtcgagatctgaaatcacaaatcgccgccgccaaacaatcgattactcaggcttcagacacgtacaagagcacgctgaaaccgcaactgaacaatctgacctcgtccatggacgaagtggccacgcaggcaagttccgtaatcgacgggcttgcgtcgaccgtcagcagcgtgtcaggtctttctggcggcgtttcagacagcctgacggatatccagtcggccttgactgacgcagctagcgctttgacccgttcggcgaagaaactcgacaacttgtcttcccaactcgcctctatcaccagtggcggcaccaacgacctgtctgtgatttcctctgcgaagcccgatgccattgcttccatgctggcggcacccgtagcggtcgaccgcatcgcgctctatcccgttgccaactatggttccgcgatggctccgttctacacgattctgtctatctgggtcggtgcgatcattctggtcgccatgttgaaagtatcgatttccgaccatgagaaggcccgtatcttagggttgggcaatgatctgccgctcggttcgggagtgggtcttcgcgaggccatgattgccgggcggattgccggaccggccgccgcgttggatgtgctgaagaagccgcgtgccgagtcttccggcaatgcgcggcagttcggtttacgcttgcaccacgaatatttcggccgatacatgattttcggtttccttgctttgctgcaaggtacgctggtgtgcctgggcgatatgttctatctcggcgtgcagtgtgagcatccgattcagtttttgatggtcgggtggttgtctgcactggtgttctcgaatattgtgtatacgctggccctatcgttcggtgatatcggcaaagccattgccgtggtactgctggttatgcaggtagccggttccggcggcacattccccattgaaacactgccgacgttcttccaggtcgtttctaaatggctactgttcccctatgcggtggatgcgatgcattcggccatggcgggctcattcggcatggaatactgggtttccatgggcaaactggcactgttccttgttccctcattgctgttgggacttatgttgcgcaagccggtaattcgcttcaacgattgggttatccgcaaccttgaaagcaccaaggtgatgtgagtgttggacggagtgtgtccgagcgccctgaacgcttagcagcctacgacctggcgtgtttggaccgtaacctgcctcagatacggcgttggcgaggcctgtggagcttctgacgctaacgtctacgtggcttgtagccctttttacgactgtgtggcttgagttgctggttcagcggtacatgccggtaactggattgtggatcgcgatgtgtgaggtgccagcatccgcaatattcgcaacggtacacccatagctcggctccacgctcgatcaggctttgatcagcggcacgctgagcctgcgccttatcgtggtacatgattttattcgacgtggcgcaacgtttaggggtgaagtaatgcatagcagaagccagtgtagagcgaccccataaccaagccagtttctggctcccctctggaggggagctgtctgcgcggcggaccggggggccgggcgttgggctcccacggtcgcggacgcgccgcgccgttcggcctcgccgtcggggctggccgggaatggtcccgggcgtgggtctcatgggtatgcggggaggtcccggtgcccgtgcgggttcgggccgg

SEQ ID NO: 3314 - DNA, 4875 bp, Unknown
  R151_18m  MAG No. k141_8072
atgtggagcacaccatgtccgtcggcaccgacgccatggccgcttcctatgtggaatgccagatcggtgaggaagatgatccgcggattgtgtggggtgtcggcatcgacacgtccatcgtcaccagctcgctgaaggccattatttcggccatcaaccgttccgagcgctgattttcgcgggtttccgcttttcatagcagtaagggcctgtgacgtacttcgttggtgagtgcgtcacaggccctttgtgttttgatttcataggattcccgagtttccggattttccagttttccggattattcggaaactcggaaattcaggattgcgatccccaaatgcagacattgttgccgattgcggagaacgtcatgaccggcttgccgtcgatctcgcgggggagtgttgcgaaccgtgcaatgtaggtcacgtcgtccaatcggatttccgcgtcgcttgcgcaacagttgaatccgttcacggcgccggaaagcggtttccacgatccgcaggtgatcggcccgtccgtcgacctcggcagattcgcgtcgggagtatcgaagaaacttacgatttcaccccgggtgatccgcccgtcctcatggaacgtatatcgcgtcggacgattgatgccaacgtacgtgccatcatccttttgcttgccgttgaagaacgtatgctgatcatgcagtacaacgttgtaatcgcctgtgatatcggcaatgccggtcggcgcgacggcaacggaaccgcggtattcgtacggtgccgcaaccagccagccgtcggaagttggcagtaattcgcgtacgtgagattcgtaatcttcatcatcgccctcgctaaagcgttccgcgaaacgggtgtggtagacgaggaacatgcgaccgtccttcgaccgacgaatggcggaattatgcccctgcgagacttcgacatcggcaagttctgccggaccgccatcccactgtacggaagacgtcaatcgaatgccggtgccgcgctcctgattgtcgggaatctcaccgtacgaaatcgcgggattgccgttctggtccacgtacgggccaagcagcgattttgaacggaacagacgaatctgatatccgccggtgcgcccaagccagccgtacgacatgaacagataccaccatccgttttcacgaatgaagtacgatccttcgccggaattccagtagcctccggccactttcacgccgtaataaggatcggaggaatccttgaccagcgggtatcgcacggaataatcgcgcaagccggttttcggatcgagcttgaacatccagatgccgccgaaccatgaaccgaaactcatccacatttcgccgtgctcgcacaatgcgggcgccgcgtcgatggcgttgatgcgcgtgtctttgagcgacaggtagcgggtcaggtcatagccgacggtgccatcggttttgggctcaagttccagcactttcggcacgtcggtgttccacaggttgctctcgtcgaaaccggaatataccaccggccccacgtacgtccagtcgccgtccacatggtcggcggtcaacagcacgatcaccgagcggaactggtcgccgttcaccgacaggtacatgcaccacttgcccatggtctcgttccagatcacgtcgggcgcccacgtgttgccgagcaggtcgggattggaatcctgtttcgaccatgcctgccaaatatcgccgagcagcgcgtacgggtcgcggctcagattgttatcgaaccgctcccaatgcaccatatccgtgctgcgcgcgcaccgacgatgcgtgccgaacagatagtagacaccgttttcctcgacgattgcgggatcgtgcacggccacccgcccggcatcaagcgtatgctcgatgccgttgggcgagatggcctgcgatgcggggcctgcattgcttgcgttgactgcgccggttgcgtcggctgtggaatgcacggttgttgcgccgtttttgctcacttctgagacccccaaatgcacagattgttcgtgcccagggcgctgaaggtcatgacttccttgcggtccttgtctcgcggaagcttgtcgaacgcgccggagtaggtgacttcgccttcgtcgccggtgagcttaagcgtcatctggttggtgccttccacggcctcccaagtgcctgtctggtcgccggtcacggtgccgtcttccttcaaggtgatgttgatgggcttgttcacaccgcgatagtcggtgctcgtcttatcggtgaccttcttcgggcccttgaaatagctggacttgtcgtgcgtcaccatctcgtaatcgccggcgatgtcggcggtcttgtagcccttcttgtcggccttggtacccgtgtattcgtacggtgcggccaccagccatccgtcggcggtcggcagcagctcgtgcacgcgcacctcatgcttttcgccggaaccggagaaacgggtatggtacacgaggtaagcggtgccgtcgtcgtcaacgaacgcggaattgtggccctgggagacctcgatgttcgcattgtcgttgccgctccactggatcgagctcatcaggcgctcgccgatgtcgctttgccagttgttgccgatggccttggtggaaatcgcggtgttgccggcttcgtcaacgtacgggccggtgatgtccttggatcggaacatgcggatctggtagccaccggtctgctgcagcgcgccgtaggaggcgaatagataccagtagccgttgtcgtgcagcaggtaggagccttcgccggagttgccgaagccgccgccgagcttcacgccatagtaggcgtcggacttgttcgcttcggtggggtaggtggagttgtagtcgcgcaggccggtcgtcgggtcgagcttgaacatccacatgccgccgaaccaggagccgaaggtcatccacatgtcgccgttatcatcggttttcacgcacgggtcgatggcgttgatgccggtgtcggtctgcgaggtgtaacgggtgatgtcggcatcctcgccaagcacctgcggcacgtcggtcttcttcacgttcacgcgttcgaagccggaatagaccaccgggccaacgtacgtccaatcgccttcgatgtcgtcggcggtgagcagcacgattacggagcggtaattatcgccgttgatggacatgtacatgcaccacttgcccatcgtttcgttccagaccacgtcgggggcccacatattgcctttgacgtccggattcgtggactgcttcgcccagccttcccaaatgtctttgaagaccttctcgtagtcggtgctcagattgttggtgaaggtgctccagttgatcagatcgtcgcttttgagccaggcgcggtgcgagccgaaaatatagtatttgccgttggccttgacgatggaggggtcgtgggattcgccgcgcttgatgctggcggtgctggtttcgctggtttcggactttgatgacgccgatgattggtcggatgatgtgctggagcagcctgctagcgttccgacgagcacggctgctgcgatcaggcctgctgcgacctgtttcacagttgtacggagtttcatttttccccttccttgcggatgatgcgatttgtacaacgatgtaatttcttgtatagtgtacaacgttgtaaagaaaagtcgaatcataaggggtttctcgatgtcgagttcctacgaattgctgtgctacacgcgcgaagccaccggtcgcgaagaggcgaataacgaggatattgcctacagcatgcaccttgcgttgcgtgccgacggggccaccgagtgggagccgctcaacgagaattacggcgttttcttcgccgccggtgtgcctatccaggccgcatcctccgaatctcgccgcgcctgcgtcgccgcggcgcatttcgtcgccgatccgttcgacgaggcccgtccggccgccgatgccgtcgcgtacggcgctgtgatgccgggaatcgacatcacgctcaaatccttgaaggatccgtatctgttccgcctcgcggacggacgattcgctctcgcggccacccgtaccgcgcgtgggggagcgccggacgggtccgagcggtcggcgtttctgttggcgctcagcgacgatctgacggctttcgcgcagcttggattggtgatgctgcgtaccggcggcggcgtcaatcgtccgtctgtcgcattcgacgcggatgcctcccgttatgtgatttcctggatttcggatgatggcgatgcgcgttccgcaagcgttgtcgatattgtcgccgcggccgagtccggcgagccgatcgatgttgtggaagctgcggtatcggcgaaatcctgccattctggcaacctttcctgcgattgcaatattcccaatgccgttcctggcaacgtgattgccgtcactgaagaagaagcgtcgaaactgatcgaacgattcggtcgtatttacaacgttgaaacatcggtggcgacgcagcatatcgacatggcggcaagtagggaagcggcccgtgaagccgtgcaggcactcgccaaggtccgcgccgatctcgtctacagcgacggttccggcgccacccgtgtcgtggattggaacaaagacgaacttgaggcgattgcgcaggacgccgccgaaggcaagctccagccgggcgacacgcgcacggtgagcggccgcatccgccaaaccgtatacccggtgccatttgccgtggagcgtgcggacccgtcggtgttcgcttggaatttcaacggcaagccgatgttcatgttcatcgccaccgacgataccgacggcaactgcgtcgatccgaacgatggcgccacgcatatgccgttgcgcatcgccgactccatcgaagcg

SEQ ID NO: 3315 - DNA, 3467 bp, Unknown
  R151_18m  MAG No. k141_8268
ccgaagaagaagccgagcgcctgcatcacggtcatgatggagaacgcgatgccgatggcgccggactgcgcggtgccaagctggccaataaagaacgtgtccgtgagattgtaggcagtggtcaccagattggagatgacggccggcagacatagtttgaggatcagcggtttgaccggctgcccggtcatctgctgatatttcgcgtccgcgcttgcgcgtctcatgccatgaacctgaaccacggacggttatcctactcgcgccttgccctatgcgaatgcgcgtgaccgccatacgggttaacacgtcattctcgggagtgagccaaagaaaagataaagccacagcccgtgccacgcccacaccggctcatgccatattcctaaaaagcgccgtggcaaagatgtccgttgagccttaccctaaataccgcccagtaatgctgcttgggttggccgcgacctgttccggcgtcccggcggcgacgatgcgtccgccgctttcgccgccgcccggacccatgtcgataatccagtccgcattggcgatcacgtcaaggtcatgttcgatgaccacgactgttgcgccgctcgccacaagccggtcgaacacgcccagcagcacacgcacgtcgagcgggtggagaccgatggtcggctcatcgaacacgaataccgcgtccgattgggctttgcccatttcgctggcgagcttcaaccgctgagcttcgccgcccgaaagcgccggcgtgggttcgccgagtgtcagatacccaagacccaaatcatgcaaggtggtcagacgtgcgtggaccttcttgaggtcgtgggtcacggccaatgcctgatccacgctcattgccatgagttggggcagactcagtgaaaggtgagattctcccttaaccgcacgccgaatcacgccggcttcagacgcataccgggaaccgccgcagtccgggcattcgatggtcacgtccggcaggaactgcacgtcgagtgagatcgaaccggtgccgtcgcacgtggggcaacgcagccgcccagtgttgtacgagaaatcgccggccttccagccgcccgtcttggccgcatcgcatcgggcgaaggcgcggcgcagttcgtcgtgaatatcggcataggtggccacggtggagcgcacgtttgcgccaatcggcgtggcgtcgatgagattcgcacgatggatgccctcagccccaagttcacgcacatgttccggcaaccgctcccccaccgcctgcgctttgagcgcgggaatcagcgattcgagcaccatcgtggttttaccggagccggagacgcctgtcaccgccacgagccggccgcgcggaatatcaacgtccagcggcttgaccgtatgcaactggctggttgtcatgcggatgtggccaaggtcgaacacctgcggttccgccacgcgctcacggatgcgcgcgctcacattatcggccaagaacggcgcaatacgactacttggattcgccgccacttcgtctaccgtgccttgcgcgatcacatgcccgccttcggcgccggcaaccggtcccatttcaatgagatggtcggcggctttgagcacgcgcacgtcatggtccacgaccaccacggaattgccgtccgccactagatcgtgcatcacgccgagcagtccgtccacattcgaggggtgcagcccgatggatggctcgtcaagcacatacagcacgccagtggtgcggttgcgcacggcacgggcgagctgcacacgctggcgttcaccggtcgaaagcgtggcaccggcgcggtcaagcgccagatatccgaggcccaaatccaacagtcggcgggccacgtccaggaatgattcgcagatgttggcggccatcggccgcatgtcggcgggcagagattccggcacgccgcgcacccaatccaccgccgcatccaaggtcatcgcgctggcttcggccaggttcagcccgcgcacatgcggggcccgggctgcggcgctcagtcgggtacctccgcagtcggcgcatggtccctccttgagaaatcgagccacgcgcttcaggcctttctcgtccttggctttggcgagcgcgttctccaccgtgtagacggcgttgaagtaggtgaaatcgagttcggcgaaatcgtcgcctttcttcggcttgtaaagaatatgctttttgacggccggcccgttgaatacgatgtcacgctcttcgggcgtgagctcgctgaacggcacgttggtgcgcacgcccatcgcgccgcacacctgcttcataaggtcccacatgagcgagccccatggcatcaccgcaccgtcgtcgatacttttcgactcatccggcaccagggccgcacggttcacttcgcgcacaatgccggttccggagcaggtcgggcaggcgccggccgagttgaaagcgagcgattcggctccgggcgcgtggaattccttgccacagccagcacaggtgataggcagaccggccgccacgttcagcgtcggctcgttgcgcgccccgcaatgcgggcacacgtgcgaggcgacgcgggagaacaggagccgcagactgttgagcagttcggtcatcgtgccgaacgtcgaacggatgccaggcaccgtgggccgctggtgcagggccagcgcggccggcacgtgcagtacttcgtccacttgggcgcgactggcctgggtcaggcggcgtcgcgtgtacgtggacaacgcctccaagtagcgccgcgaaccttccgcatacagcacgccgagcgccagcgagctcttgcccgaaccggagacgccggccacgcccaccaattcgcccagcggaatgtcgatgtcgatgtccttcaggttatgcacgcgcgccccgcgcacttcgatcgcctgcggccgctgatcgttgctcatgctcggcactgctccgccgccaccctactgtctgacctattatcaagcgtcacgccgttacctctttctcggcctcgccctagaccgccgccgcacgagcttcatggtctccagtatcatcacgaccaacgacggcagccgagaggctttcgctattgagcaccgcctctcgcatgctgttcgccgcgacaacgaacgaaagaaggtgccacattgccgtggttcagcgccaagaacgcgctcgcagaggatcccgtcatggggctgctccgggaacaggtgacgacgacccgcaaaggagtgtccatcgcgctggacgccgtcgaggggcatctgagcgtcgatgaatccagaaagagcgtcaacgatatcgagcacgagggggacgaggtccgttccaaggtcgttcacgcgttggccaaggcctggaccacgccgttggaccgtgaggatttgttccgtttctcccgatccatcgacgacgtgctcgacaacacccgcgatttcatacgcgagatccatctttggaaaggacatgccgg

SEQ ID NO: 3316 - DNA, 2639 bp, Unknown
  R151_18m  MAG No. k141_8293
acggattcgaagccggccttgcataccgggcacttgccgcagctgtacgggaatggcacgaccacgaaatcacctggcttaacggattcgaccgccgcgccaacctcttcgaccacaccgatggactcgtgacccacctggctgtgcgcggcctgtccgctcagcccacggaagaaccacaaatcagagccacacacgcacgtgcgcaccacgcggatcacgatgtcatcatcctgttcaagcgtcgccttcggcacttcttccacggccatcttgccaggctccacgaaaatcgcagctttcatggtttcagacatacgttcataactccttgttttccggcatcgagcgcttaaggcccgttatcctcgtgttctattagacaataatcgccttgcattaaccaatagccataaaccatgtttcgccatacccatgaggtatggcaacaaccgagcaattcactgcgataggccaatatccgagatacgctcactgttcgattcgtcgccatgagtaatctggagaaccggcgatgggacccgcctgaacttgtttcgaaccgcacactgctgatagttcctacacacgatttgacattgcatggaatcgttgtgtcttcagtaggattcagcggtttcaggaaaggctattatgggctcgcaatccccatccgcagatgcccggccgggcacgcgcacggccactcctccggcgcacaaactccccgatatccatcttgatattgtgttggtcgtcttctgcggcggtgccatcggcaccgcgattcgctatgcgttcgcgcagattcccgcagccggcagcttccataccggcacgtttgtggccaacatgctggcctgcttctgctatgcgggtctgaccgcctatttggccggctcttcccggttcgacacgcgtgccaaggagctcaccagccgtgggctcggcatgggcgtatgcggcggtttgtctacgatgtcgacgttggcattggaaggcttcaccgcaattcgcgacggtcaggtggcggccggcattgcctatctactggtgacgttcgcgctgggtctggtttgtgcgtctgccggcgtgtgggcaggaacgcatctggccggctcctcgaacgcatccgccgaagcgtccgctgatacgaatgccgctacgaccagcaagggaggtaaggcgtgatgaccgtattcctaccaatcttggtctgcctgtgcggcggcgtaggcgcctcctgccgctatctgcttgacgcgaccatcaaaacgtattggcaacgcgcattcccgctgtccacattcaccatcaatctcatcgccggattcctgaccggtctggttgcggcgctggcactgggcgggacacttgatgaaccgtggcggctggtgctggccaccggtttcctcggcggattctccacgttctcgaccgcgatcaacgaaatggtgacgctcttccacaaacgccgctaccccacggcaacggcctatctggtgctgtcgctgggtgtgccggtcgttgctgcggcctgcggttttctcgtctgaccgccacgacgattcccgacgcggtcagcggtatcatcgcgaggtcgaacgtcacaggtacatccgggaggtatatgggcatggcgaacaatggagcggatgtgaagcacaatcagggcgcggacgtcacgaatgcctcggccacaacgaacactgcggaaaataccgtgggcacggcaaccccgaagcaaaatggactcgccgtgttgggcaagtatatgggtgtttccgccacgcagaccattgtggagtatgcgacgttcgccatcctgcacttgatcggcgtgccctcgcagatctccaacggtatcgccgtggtgtgttcggcgacctacaacttcgtgatgaaccgcaacgtgacgttcaaatcgtcaagcaacttcacccgttccgtgatgcttttcgtgctgctgtggatctggaacttcacgttcagcacactgctgatcggctggatgccgggcgcgacggacctgagcccgtatgtggtgaagttcattgcgatggcctgccagttcggctggggttatccgttgtgcaagtacgtgatttttaggtgacgcattccaattgctcactgtcgttcgccttcgcctatttgtatttggagcgcttatcagaagaacagcatcgcaacacctgcggcgaagcacatgagcagaatcgatgtcaggaagccggcgagcatcggcttcttgcccttggaagcgatggccttgaagttcacgttgatgccgagcgcggccatggccatgccgagcacgatgtacgcaaagtccacgagctgcggggtgatggaggcgatgagcggcacgaaggtgccgatgatcgaagcgccgatgaagccgagcatgaaccacgggaaggccacagtcttcttgccggtgttctccacctcggagtgcttcttctcccaccagatagcgatgatgatggccgcgaacacgagcatgagcacgcgggaaagcttcatgatggtggcgatgtccaccgcgccgaaagcgtcgccggcggcgaccgcgtgggcgatttcgtgcagggaagcaccggcggtgatgcccagctggtccttggtcatgccgg

SEQ ID NO: 3317 - DNA, 35976 bp, Unknown
  R151_18m  MAG No. k141_8342
atggaacaacctcgaccacgtgctcgacgcatacaacctgctcgccgccacgccgctgccatgcgacgacacgagcgataggggactgtggcgcgaaacgaacctcgcggaactgcaccgccgccagcacgtcgagggagccgcgaacagggaactcctgctcatcctgtgcgcccagatcgaagcactcatcaaccccggcacatgggccgacgagtgcgacatcaccatcgcccaagcctactaccacacgctcgcagacctcggataccccaccagcgacgaggaaaacaaggcactcaacgggtgtttcctgcccgaagacgacgaggcggagtgagccatgacatggacccagatagacgacgggctcaacttcagcccgcagaccatgcccggcacggtatcaaacgccgcgttgggcctatgggtcagactctgcgtgcacaccgcgtaccagctgcgatttcccgcattcgacggcgcattcgacctcacggtcgtgcgctcgctgaaaggcaacgcacggcaggtgacggaactggaggccgcgggaatgctcgaaccggcgctcgccgccggccggtggatggtggtcgaggccgacaccctgatgaaattcggcggcacttccggcagcgaactcaaggagaaaagagccaaggccgggcatgccggcggcgtcgcttcgggcgagtctcggcgaagcaaacgcgaagcaaatgcttcgaagcaaaacgaagcaagtgcttcaagcaaaccgcgaagcaagaccgaagcaaaccatgaagcaaaagacgaagcaaacggtgaagcaaaaccgaagcaaacgtctgaagcaaaacgaagcaattgcttcgaagcaaacgaagcaaccggtcctaacctaaccatacctagccttacctcccctgtagccccctccgcgccgaacgccgaaccaagtccggccgttcccggccatgccggcaccgaatccggccgagccacgccggcgtcaagcctcgccgaggccgaagcccgcgtccaagccgacccgttcgccttcgcctgggagcagtatccgagccataccggaaaccgcgagcaggcctcacgcctgtggcaggccatcaccggcgacgacccgaccgtgccgcacgtcgaggccagccaactgctcggggccgtcatccgctacgcccaagccgtgcgccaggacggcaaccggttcacgccatcgatgcgcaaatggctcgaaaaccggcaatacgtcaaatggctggcaagcgaacccatccgcaccgaatggggcggcatcacacgccaatggctcagccagcacgccatcagcctcgtgccggcaggggcatggacggacagcgtcgaacagacgttctgggcccacgtcaaaaccggcgaggacccggagaccgtcgcccaacggctcgtaaacgaaatcaacgaaagaagccaagcatcatgagcgacaagcccagcagccagaccctcaggctcgtggaaggccgcgagcgccatcggtgcatcgtgtgcgaccggtacctgcggctcggcgaatggcccggagtgagccatcatcatcgcaagcgccgctcgcagacgtacggcgatgccgaacggcacgcggcgtcgaacatcgtcaccgtgtgcggcgtggacaacagcaccggatgccacggatggatccaccaacaccccgaacaggcccgagcattgggctacctgctcaaaagctacgaccccgagccaagccaagtgcccgtgtacagctgccggcgcggctggatactgctcgacaccgacggccaatggcattcatgcccgccaccagagggaatgcccaaccacccgcaaaccaaccgataaatcagcagaaaggaacacttatgatcagcgcctacgcggtcaccgtgcccggcgaactcgacaacgtggacttcacccgagaggacggcaccagcgtgaccatgctcatcccgcccgacataccggtgagcaccaggacaatcatcatcccgcagggcttcacccgcgaggaaacccgaaccatccagggagccatcgttcaggcgctcgccggaaaggagaagacgctatgatccccgagaaacccgaagccctgctatgggtggacgtggagaccaccggcctcgatgcgaacatgtgttcgatactggagatcgggttgcgctgcacgagcatggacgccatgcacgaatacgggcggttcgaggccgtggtgcacatcggccgggagaccctgctgaccgtgcagccctccgccctggaactgcatctgaacaacggtctgctcgcccaatgcgaatcctgcgacccgctggccaactcacccagggtcatcgccgaacaggccctccggttcatccaaggcatggccaccacgtacgtcctgcacgcggcgggaacgaacatcggccgtttcgacctgcccatggtcgaacgcttctgcatgacgggattcggagaactgctgcactaccgcatgctggacgtcaccgcactgcgcctcgcagccaaagcctgcggccaagacccataccagcaccgcatgaagcccacgcgccgggtccacgactgccttgacagggacatcacggaataccgccactacctcaccctcatgacagggccggcgctcgccgacgaaagtagcaccatatgagctacacggcacgaatcttcacacaagaccaactcgaacaggcgctcgcgagcgcctgcgtgctggaaggcgtgagcatcctgcacttcggccaatgctccgatacggccagccggaacctcaaggcggtggccaagaccatgtacgagaccagcggcgagccgaccatcgtggaggacgacgatgagtgacctcacccaacaagccctcacggcgctcgccgacgccggactgggcaacgaatcagccgccgaagcgttcgtcgtcggctaccaggccggctgggacaaggcgctcaacctggccatccgcatcgaaaacgaactcaactcggacgagcccacagacgaggagatcgagacctgcgcccgagggttcttcacgggcacacccggccccaccaactgggacgccgtcagcgaagtctccaaacaggcatggctgcacgccgccaaaaaggcgctcgcagccgtcaacgccatgaaaacgaaggaacaacaatgaacgagaacacaaccctcaccgacatcatcaacacggcgcttgccaccggatgccagatcagcgtgaccatcacacccaaaggcttctacggcgacgaagaggagacgaaagcatgagaattacattagtcaaacggcttatcacattaatttgcgcccttttttgcattagcatgctcgccggctgcggaggccccacgcaggtctccgaggaaaccacgaaaatcgcatgcggcgaaacaaacagcggaaacagcatctgctcctaccgagtgcccctctcgggcgacagccacgtgctctgcgtggccctcggcaacggaggcgtcacctgcgactggggcaacaccggcaaggcggaacaatgaccagcgaacgccgcaagcaaatggtccgcgactggcacgccaaacatgccgccacacccgaagaaacagcccaactactaggcatcacccttcaggaagtccaagacatcctcaaccaaaacaaagaacaacaaaccaagacagacaaaccggcgctcgccggcggctatgaggacaggccgctgttctgaaataacgaaaccctccaccaacggcggagggcatgtctgcaaacaaccagtgtagccgacgtggaggggattcgtgaactgtcagaactgcaagacgatgaccgaagaggggtattcgctgtgcgagacgtgcgagatgcgcctcgccggcacattattgcgattggcgcgtgacgtcacgccattgcatgacagcctcgacgccacattgcatccgggcgggcattcgccggtcaggatccagaccgccactcccccgacgccgatacgcttggacgtgctcgacctgatcgacatgctcgacgcgacagcgcgcgaactatggcgctgcctcgacggcatcgacgccttggactggcacagggatccacgcatggaggacctcgaggccacgctcatcgcatgcgccggacatcccaaactcgccacattccccgacgcaggcctctacatgcgcatcgtcaacaaccttgcccgcaaggtcgacctcgcattggacccgcccgaacaacgccgcgagatcggcacctgcgaactatgcgagaccatgctaaccgcaggacaggcagaccaatgggtcacatgccccgtctgcggcaccgaacagcgagtgcagaccgtgaaactgagacgtttgaagaaactctgctgggatgattccaagcaaggcagagcggcggacatcgccaaggcgttcaccgacgccggaataactctcaaggcgtcgctggtacgcaagtgggcggagcgaggccaagtcgcacgcactccgcagggtattccctacagcgatgtgtaccggcaggtcatcgccggccagcttgacaaatgattgtttgtcacacacaattgcagtggcagaagtgtcgaaaaacccagctcatgtggctgggttttcgcgtatctgacctctaggtgttccggccaatccccagcggccggagcaccaaacccccgatatcgatgtagaatcgatgacataaccgtaaactacattggtgtcgttctagctggggagcaacgatatggtcaggagcactgtcgactactacactttcaacgttaagccaagaaaaaagagccccaatattcctcgcagtgccgtgaaccttgggaacggacgcagcatactcccctacctatatggatacatcgattatcagcgtggaagaattatcaaagaagaacgcaagcagcgcctctatgcggtccgtaacgttgaaattcacggtcgcctcatactgattgagctgatgtccggacagtacggcgaggaaagccagctgatgaacatgttggacgggtcggtcacggacatcccatccgaccaagcagcagtaaagaccgtccgtgttgtatttgcttgtcccatagcggatggtgcgactaatgcgatattcgctattgaacatgtggactcgattaatggatattactttattcaagattttgccaagtgcataagaaaaatattcagtgattcaaactctccgattcattccattttggaaaaagaggcatggttcgactcaagcagccttgtgtcaatggcaatacccatcggttcgacggatcagcaaatcacattggataacggcatagccgacgaagatgttgagcgaaccttcggccgcatgtccttgattatcaacccgccgaaaggtagcgccagcttcgacccgagattctggaaaaagatgttgaagcacacattggagaaggcaggcatgctgactatcccggccctcgataatgacaccgtcgagaaaaccaacgtatccgtaaccgcaatcggcgcagacaaccgtcgtaagaccttcaccataggcaatgagaaaagcccgaaagtacgtgaactgattaccgactacggacagccaagactcgataatggtgcgctacgacgccatctcgccgattcaatcctcgataaatatgcagaaagccaaattaaactccaatccggatgggataagggacagcttggagaagagctgataccgaaaggagaaatcgactgggccaatcttgttgagcccaagccggaggaaaacaatcatgccgaggactaaagaccataacaatggcatattatggcagtacatcctcagcctgtgccccaagatacacaacacaagaagcatcgcatggaaatacgtattccgagaaatactcattccatcggttgctgcatatcttgactttcgcttctcccgacttgcattgaacgcagacatcatcgtctcggctttgggggtccttggaggccttctgtttgcgcatgcgatcttcgttttcgaattgcgaatgacgtacaacgcaaacctacgggaaagaatcagaaacaaagagatacaggcagaaaacacaaaactgaccagactcatcaacgatatgttctatagtgtcgtctactcatccgcattggctctggggattacacttgccgtggccatgggatcttcccttggcgtatacgacacactgccgcagatagggaaaaaactgatatcggcggcgattgtatggctaatgacacacttagcattctgcatttatcgagttctcaaaaccacatccggcgcatacggagaactacgaaaatcaagaatcgcataatgtcaacaacgagatagcaatgtggttcatctgacagtcgaaggagatatcgtgatgacctatggggccacggggcatgaggggcatgggacacggcagacagcgaactaactggaactccagcaacagaggttcacgactgccggatgactggcccgagcgcagggccaaggtgcgcggacgggctcatggtctgtgccaagcgaaacagcatgttcccgaatgcgatggaatcggcactgactgcgaccacatcatcgccggcgacgaccacagccttgacaacttgcaatggctgtcgcatccttgtcataaagcgaaaacggagcgtgagaacgcagagaggaacgccaagcgcaagcgaatgcgaaaacatccggaggaacgtttccccggcctgctcgactgacccaagcggggtgggaggggactcccccggcttgccggtaaaaccgccggatagcacctccggtcatgcatgcgcccagaacgcccgtttttcgcgatatctcatttttatcggaaccttccctgctgtaccgttcttggcggctttattcgccgtatggagccaagtggcgttttcgcgcggctcggacaggctggtcggcgctcgtttttttatgtgatgtcacgatattgaagaatcgttgatattgcactgttttgttgttttattagcgttgtcacgatataattaaagcgtgacacgatgtgaattttgcgacaaggaactccccgaagcccagagacggggacgcaagcgccggttctgcgacgaccggtgccgccaagccgcgcacagggccggagggcaaatgcccgtacctcccgcgatggcgatggccgaccgctggatgcactggcgcagaatcacccgcggcgacggcacatcgaaactgccggtcaccgtcgacggctcccccgcatccagcaccgacatgtccacatgggccgcgcttccccaggcggaatcctccgatgtcggcgaaggtctcggattcgcgctcggcgacggattcgcatgcatcgacctcgatcactgctatgacgagcgcaaccatctgaccccgtgggcgaagatgctgatagcccccgtggccgattccacatggatcgaaatcagcccgtccggaaacggactgcacatctgggggcgctgcggcgagcgaaccggactgaaggtccgcaacgacctcggcatgaacatcgaggcctacagccaaggccgttacatgacctacacggggcacaggttccgcaaaagtcccgcgaaactcgccgatctcacattcctgttcgacgtgatcgcacatctcgcctgacccgcagaaaggaggcgcacgttgccaagaccaagaaaaacgtccgggcaccgcatgccctccggactcatgaaggacggcaaggggcagaccctgtggcgcgacctgaccggcaaatgggagttcacggaatccgaataccggatgctggagaacgcctgctacaccgccgaccgcatcgtcaaggaacgccgcgccatcggcgacgacctgaccgtctccggcagccagggacagatcgtcgcgcacccgctgctcgcgcaactcaggctcgacgaggagcacctcgccaaaacgctctcccgcatcgtcatgccggaacccgacgagaaggaaaacgccgccaccgatgagggcgacaggtctgccaggatgcgcgacgcggcccaatcacggtggggaaaggcatacggtggatgatggcgaggctgctgaccaatcgatccgcagcctacatcccctcccatcaagccgaataccgggaaatcatcgactggtaccgcaacgcgctggccaacgaacccgcacgcgactggaacaccaacccggtcaccatcgggcccacatggaagcacgacggcgacggctgggttttgcccgatctcactttgggttggaacttcctggcttggagcggccgctggctgcgcaacgccaaacagcgcgccccatggaagtggacgctcgaacaggcgcgtttctggctgtggttctacagtctggacgaacatggcgtgcccgtccacgataacgcggtgctgcagcggctcaagggttggggcaaagacccgatggcggccggcggtgccgtcgccagctgcttcgccgacctgaccttcgaccggttcgaccataacggcgatccggtcggccgcgaggaaccgaacgcctgggtgcaggtgtgcgcagtctcgcaggaacagacgaagaacacgatgaaactgctgcccggcctcatccccgccgaaacccggcgcaggtacggcatacagctcggcaaactcaacatgtacgcgctcggggacagccgccagatagaggccgtcacctcaagcccgctcgcattggagggcggacgtcccacgttcctgatccgcaacgagacgcagaactggaattccagcaacggcggccacgacatggacggcgtgctgtccggcaacgcggcgaagtccgaggaatcggtgaacgtgaagatgctcgacatctgcaacgcttaccgagacggcgaggacagcgtcgcccaaagggtgcgcgaggcatgggagggcacgcagggcgacccgaacagcaacgatcagggtctgcggccgaaatacatggattacggtctgctctatgacagcatcgaagccgcgccggacacccccatgacggtggacatgattccgaaggtcatcgaggacgtgcgcggagattccacgtggctgaccacatcgaagatcgtcaagaccatcatcgacccgaagaatccggtctccgaaagccgacgcaaatggtacaaccagtgcgaggccccggaagacgcctacgtcaccagccaggaatgggatgccaacgagcatcccgagctcaagctggaggccggcgaggagatcacgatgttcctcgactgctcactgaccgacgatgccaccgccttggtggcctgcagggtcagcgacggtttcacgaagccgctcggcctatggaaaaggccgcccggcaaacgcggcgaaacatggaaggtgccacgcgaaagcgtggatgacaccgtgcgagaagccatgcgcatctaccgggtggtcgccttttggggagaccccagccacgtgctggacgacgagaccggcctgcactattgggatcccctgttcgatgcctggcatcgcgaatacgggcgacgattgaagctctgggcgcggcccgagggccgtgacaggcacagcatcatgttcgacatggttcgcctcgacgtgcagaaaaggttcgtcacctatgtggaccaggcgtacacggcgatctgcgacaaggatttcccccatgacggtgacgcgagattgcgttcccacatgctcaacgcgcgccgccagcccacgaaggcgggcatgagtatcgccaaggaggggcgcgagtcccaacggaagatagatctcgcgttctgcgccattgccgcgcgcggcatgcgacgcgaatatttgaacaaccggaagaaaggcggtggacaggtatggtgaccaccggttacgcggatgagaaatcggccgcgaaagcattgcgggagctgctgctgcccgcctacggggaggagatcacccgtttgaaccgcatcgaccgctggtggcggtggaatccgaaaccgatccgcctgcgcagagccacccccgagcatcgcatgcttagggatatgggtcatacgccatggctgaggcttgtggtgaccacaatctcccagaccctctacttggagggtgtggatattcccggcaagcaggacacggattcggcccgcctgttctggcatccatgggtggccagccgcatgggccgccgccaggtcgccttgcataaggcggccatcgcctacggttgcgcgtatgcgaccgtgcgcgccgtggaatccccggaaggcggcgtaagggccggaatcgactgctggtcgccgcgcgaaagcatcgccctatatgacgatccggcacgcgacacatatccgcaggtgttcatgcgtcgccggcgactgtccgacaccgtggactcatacgagctatgggatgcatggaacgtatggcagtggagacgcgagcaaggtgtctacgagttcgtggactgcacgccgcatctggcgaccgattcctacgggcaaccggtctgtccggtcatccgatacacgaacgacctcgacctgcagggaagggcacccggcgaggtcgaaccgttcatcccccttgccaaccgattgaacaaggataattacgaccggcttctggcccaacactacaattcgtggaaagtacgcaccgtcaccggtctggacatgaccgaattgtcggacgagcagcgggctgaccggaaagccaagctcagccaggaggatattctcgccggcggcgagggtgtccagttcggcacgctcccggaaaccgcgctgtccagcctcatcgaggcgaaacaagccgatgtggaggaactcgccgcggtcagccagaccccgaccaccgcgttcggcaaaatggtcaacgtgggcgatgccggcatagccgaaagccgcgccggtttctacgcgaaacgcgatgaacggcagaaaagcttcggcgtcagccacatggacgtgcttcgcttggccgctggcatcgaaggccgcatggacgatgcgcgcaatttcgacctgaccccattgtgggaggatacggacgtgcgcaccatcaaccaggcggtcgatgccttgggcaaggccgctcagatgctcggcgcgcccaaggagcaattgtgggacatgattccgggcgtatccaagtcgcgcgccgactcatggcgcgaatgggtggagaaccatccggacgcggacacgctcgccgcgcaggcgtatcaggcgcagctcgaaccggcggtcgatgatggcgcgaaccaatgacggtgccatgctcaccgacaagcaccggcgtgcgcaggtcaggctcgccatcaccgccgacagccaggcccgccgcatctgggactccacgcttgacccgaacgatctgaaacgcacgcagccgatatggaagaacgccatcctccaactgctgcagacttggtggcggatcagcgcccggaccgcgaacgagtacctgccccgattccgggaggccgagaccggcgacggcggcttcgagaccgccatgccgcgtttcgatcgcaaacaggctgcaagaagcatcgactggaccggcgccacgaacgtgctctggcacatcgcgcgcggagagacccaggaggcagcctacgtggcggcgcgaagcctgttcctcggaatattccacgaggccgtgctcaccggcggacgcaccacgatagaaaactgggccaagaaggatacgagagccgtgggctggcggcgagtctccgacgggaatccatgcgcgttctgcgcgatgctggccaccaggggacccgtctacacgagtgccgaaaaagccggattgcgcgcgtccgacggacacaaataccacccgcattgcgggtgcaccgtcgaaatcgtgtacggggactggaagcccaccgaaaaggaacagcagtggatcgacgaatactacaaggccgccgaaagcctgccctccaaaactccgcgcaccgccgagaccgtgcttccgctcctgcgccgcaacggaaccttccgtgacagttcgaccataagaagcactccggagttccttgcggccagacgcgcccaacgcaaagcggccaatagcccggccgtcaacaacgtacggacattgtcgacaggcaaaaccgccgtgcggcattccgacggatattgggtcgaaaccggtgcgaatccgtccgccgccgaaagaacggtcgccaaacagatgacggacctcggacatgatgtcacattccgcaagcccgtcgacgagcagcatgtcaagacgcctgacttcttcatcgacggagacacctgggaactgaaaaccctccacggaagcggcaagaacaccgtgctcaacgctcttcgcaaagcgaagagccagagtccgcgcatcattctcgacatcaccgactgcccgaaaccgatggaacagattgtggatgattgcatgagcaaactccaaaggccgaacaacaggatcagagagatcatcctgttcaaggacggggccatcgaacggcgtctcaaagggtatactaagagttagaaggccggtgccttccaccctttaaaccttttggtctggtggaaggttcccggcctttcacctttccacacataacatccaagccaccgtgaagttcatggtggcttttcttatgcccgcaagccgggcggaaaggaaaccatcatggcagacgacaccgaagaccaggtcaaggagccagataccggcgctgccggaaacgagccgaaccagactacaggcgattcgggccaaaagccgccatgggagcgcgccggtgaggagttcagcccggagaaggcgtggaaactcatcgaaaacctgcgcgacgacaacacgaagctcaaggagtccaacgactccaacagcgcgaaactgcgcgagatcgaggacgcgaaactcaccgaacaggagaagctgcagcgtgacctcaaggaggcgcaggaacagctcgccacggtcaatcaggccaaggcatgggccgaggcccgcgccaaatacccacaattgaccgaacaggattttgacctcatcggaggaggcacccccgaggagatcgcagcaaaggccgcaaagcttgcggcacgcatccccgcacaggaggcgggcgacgccaagaacatcaaccccgtgatccgcgccaacccgtcaggcggctccgacccgctccatacggagtcgaaggactggctgcgcgacgtgatcacagacaagtaaggaacctatcatggcagacaacttcaacaacaccatcggccgcaccgacctgggcgcgagcctcatccccgacgaggtctcccaggagatcatccagaccgttccggaatcctccgttctcctgacccgagccaagcgcatgcgcatgagctccaagaagaagacgcagcccgtgctcgcatccctgcccgaagcctactgggtacaggaaggcgcactcaagcagaccacgaagaccggctgggaggacgtgaacatcaccgccgaggagatggccgtcatcgtgcccatccccgattccgtggtcgatgacgcgaagatcaacctgtgggacaccatcaagccgctcatcgcggaagcgttcggcaagaagatcgacgaagccggcatcttcggcgtggacaagcccgccacctggggcctcgacatcctcgccggcgccgccgccgccggcacgaacattgcgcagggtaccggcgtcgacctcgcgcaggatgtcgccaagctcggcgagaacctgagcaagaaaggctacgcggtcaacggcttcgccagccagcccggactcaactggcagctcgtcggccttcgcgacgcgaacggccagccggtctacactcccagcctgacgcagggtgccccctccaacctgtacggctacccgctcaacgaggtcaagaacggcgcatgggatgctaccaaggcggtattgctcgccgccgattggagcaagttcgtggtcggcatccgacaggacatgacctaccagctgttcgaccagggcgtcatcagcaacgcggacggcaaggttctctacaacctcatgcagcaggacgccaaggctctgcgcgtggtcatgcgcgtcggcttccaggtcgccaacccgattacccgagtcgcggcaaagggcacccagtatccggcgggcttcatcaccccgaaggcgagcaagtgatggccaagcagatacgattcatctcccagcccgccatcatcgacggacaggacgtggccgaggtcgccgcattcgacgcgacgggtcacccgctcaccgtcggatcggcccctgcagccggttcggtcacgaacggaatgcttgcaggcggcatcaccaaggacaagctggccgaaggcgtcattccccccgcctattcacttcccgccgccagcgcaaacgcgctgggcggcgtgaagaaggccgcgaccgtggccgcagtcgcttccgccgatgccaaccccgctgcgggtgaagcgcccaccaaggcggagttcgacgccgtggtgaccgaactgaatgaaacgaagaagcagctgaacgccgcactcgtttcgctcaaggcggctggaatcatcgcctagaagggatcgttatggcggacaaggtcagaatgccggctttcgccgaggtcgccgatctcgccgaatggctcggggaaaacattcccgaaaaatcggccgactggaagcgcgcggaacgctgcctgagggccgcgtccaatcgaatccgccggtacacgaaacgcagttgggtcgacgaatccaacaacctcgtggattcgctgccggaggacatcgaggatgtgacacttgcctgcgccgggcggttctattcgaatccggaaggcgagacctcatggtcgcggcagattgacgatggcatggacggtggcagcaggaaggtcgacgaggcaggcctgtatctgaccgccagcgaaatgcagacattggacgatctgattgccgaccagtcgccgctcatcggcggcttgggtgtcatctccactacaagggatgagcatgccagtctcgacatgcttcctggctggttcgacgatgacaatgacaatccaggcttcctgaacgcgaggctgagccagtgagcgtaccgcgattcaaaaccgccagccttgaacggctgcgctcatatgccaatagcctcatgttcgaccagtgtcgtgtcctccacatgggcaaaccggtcaccgaccccgaaacgggactggtggaaccggccgtgaaaaccgtgtatgagggcaagtgcaaggtgcagacctccggcggcttggccgccgagaacacggagggcggcatcgtcgaagccctcggcgccgtcactcccgtgtggagcatgtacgtgcacttcccctacggcaccacgggattgttgccgggcgacgtgtgcgagataaccgaagccaatgacccgaacctcaagggcaggaagctccggttgttgaacatgcagtcggagaagtcgcatgcgaccgcatgccggtggaacgtgaaggaggtgggcaacagcaatgagtgacgtgacaatcgacgcttcggagctgaccgccttcggacgcagaatcgccgccgctcacgcgatggccggggtcagtatcgccaaggccgtgaagaagggggctcaggtcgtcaaggagaaaacccaaagcgacctgaattccagcagcaacggcggattgcacgttgttcgtgtgagatacgagttgggaaccaccggctcgcagatatacgcggacataggccccgaagattccggcaaaacccgcaaacacgggcacacgggccccaccgtcgccgcgatcgccttctacggcaccgcgcgaggcggcggaacgcacaagccccccgagcattacgccgaagaagaattgcccacgctcgccgaatacgtggccgatgccgccgacgacatgctgataggagccatcggattatgagcgtcatggacctgaccaatgcgggtctcgacctgctgccctccatgccgtccggcgtgaaggtctaccggcaggaggagccgttggagtcggagatgccgccgtggatcatcgcgcgcgtctccaccgaccgccatgtggcggcggaaacgatgcggttcgccgcccactccgccctgttggaggttcgcgccgtcagcaccaccgccgacagcgtgaacatctggtgtgacgacatgctgatccccgcgttggcgaaccgctcccccacccggccgccgggctacacggtcggccagctcaccctgtacgaggattccggcgcgtatgcggccggtctgaccgccgacgacaccgcgcgccgctaccaggtgcgcgtcctccggttccgcttcacgtggagccgaccatagtcaaccaatcatttaccaaaagtcttcaacgccatcccatacggggtggcgttttgcttcaaggagcacattatgaccctgaaactaggtacagagattcccggcactagcgccgatggcaacatcaccacactatgggtgccgacgatcaaggacatcaaggcccccaccatggccgagctggaagcaggcaccgacatctcgaactacgtcatgctcggcggctggagcttcgacccgtcgcaggacgccgtatccgaccagcgcgagaacgtcgtgcaggacttcggggcccccggccgcaagagcgtaggagacatcagcatcgaggtcatcgacaacacgaacacggagcaccaggaacagaacgaggccgtcaccctcatgcacgagggtgcctcaggctatatcgtgcgccgtcgcggcatggccaccgacacacccctcgccgtagggcagaagctcaccgtcgtgagcgtcatctgcggtgagaagcaggtcatcaacccggacgcgagcaccatgatccgctcgaagattccgctgttcgcgaaggcccccggctgggagtccgagaccgcagagatctcgaacccaaaaggctgacgcctccgaccgtgaccgccacagcccgtgagggaggccggacggtcacggtgaaagaggccatcgccggcggctgacaaaacttccgcgcggggactcttacctttctggccccgcacggacattctctcgcccccatcagaaaggcaatccgaaacttgcagaaagggataatcatggctttggaagtgaagcgcaagcgcgtggacgtcgacctcatattggatcaggagaaggccgaacaggtcgccgcattgggagccgacctggaacgcgccatggcgcagcatgtgaccgagggcggcaacgccgccgccaaacgcatcgccgaacagatcgacaagctgcgcgacgaggtgaaggacgacaccatccgcatcaccttggaggcgctgccgctctcccagtggcgccagatgctcgagtcgaacaccgtcacagagaacggcatcccgaaacagcgcatcgaggacatctgcgccgacgccgtcagactcatggtcaggaagaccgtgccggaaacccccgtggatgatctggcgaacgtcatgaccgaactgtccgacggccagatcagccccatctggtacgcgatccgtgacctgaatgcgaagctcatcgacccaaaagacgcactcgaatcagcctcgcggataatccgcagacagtccgcgagctgagaatctgccaaaagctcggcatcagctacaaacgctggctcggctgggaaccatcgtatcgggtggaacgagacgaacatcggcgcatcaccggctacacgccggaaaccgaatgggatgcgaccgaacgcgaatggatgctcgcgctcgacgaatacgaacactcattatgcccccaatgcggcatgcccctctcggtctgccacgacgagcagacacccttccatttcactgccgacgtcggcatatgccagatatcgctcatgcaatccctcaagctcgacgagtggaagaaagaccatgcggacgagaacgagctgaaacagtccgcattgactgtgggaatcaaaccaagataaatctcaggaggccgctatggcaggcggattgaaccgcaacatcacagtccgcctgctcgcggacacgtccaacttcaccgccggaatggccaaggtcagcggcgaaagccagaaggcggccaccaccatggaagccgccggaggcaaatcgaagctcatcaccaccggcatagcggcggccggagtcgccgccaccgcactgggcgtcgccgctgtcaggatggcagcggacttcgatgccagcatgtcgacggtgcaggccaacaccggagccagcgcagatgagatgaatcagctccgtcaggccgccatcgacgccggcgccgacaccatatactcggccaccgaatccgccgacgccatcaacgaactcggcaaagccggcctatcgacctccgatattctctccggcggtttgagcggcgcattgaacctcgcagcgtccgacggcatggaagtcggccaagccgccgaatacatgagctcggccatggcccaattcaatttgaccggcgccgacgccacgcatatcgccgacctgctcgccgcaggagccggcgaagccctcggcaacgtaagcgatttcggcgaggcgttgaacaacgtgggctccactgccagcaagttcggcctgagtatcgacaccaccgtcggcacattggccgcattcgcgcaccaaggcatcatcggagccgaagccggcacccaactgcgctccgtgctgctcgcactgaccaaccagaccgaaaaacagcggaaggccaccgaggaatatgggatatccctgtacgacgcgcaaggcaacttcgtcggcatgagcagtctcgccggacagctcaaggagaagctcggcgggctcacccaggaacagcgcaacagcgccatggcgaccatgttcggcagttacgccatccaaggagcgaacgtgctctacgcggagggcgcgagcggcatcgacgaatggaccaagaaggtcagccaatccggctacgccgcggacctcgccgccaagaagaacgacaacctgaaaggcgatctggagaatctgagcggctctttcgaatccctcatgatctctttgggcgagggaggtcagggaccattgcgctccctcgtgcaatcgctcgacaccttggtggatgcgttcagccaactgcccgcaccagtacaacagggcatagtactgatgaccgcgctcgcaggaggcttcaccgccctgcactccgccatggggccattgaacgccagcagctcgcagacggcacggaacttcggcctgatgctcgacccgttccagcgaggcatcaccgccataccactgctcaaggaaggcatcatccaacttggcacctccatgcttggcacatcaaccaacgccggcacgcttgccaacggactgacacgaggccagaccgcgatgaacggcatgaaaagcatcggcagcggactgttcgccgccttgggcggaccatggggcatcgccttgacggtcgcgggggcattgcttgtggggttcgcccaatccgcacaggacgcgaaagccaacatcagcgaattctccagcgcaatcgaccagtccggcagctccgtcgaaaccctcatcaagaaaatcgccagcggcgaggacaagacatgggacttcggcgacaagttcgccaccggactaggctcgctcggcgaggcgctcgacaaggccggcatcgactacagtaccttcgccgaagcggtagacggctccaaaaaggcgcaggcactgttcgacaaacagctggacgaggcgaaaagccacatgtccgccatgcagatcgacagcatcaacgacagttacggcaaactatcctcacaggtcggcaaagccaaggagcaggtcagcaaaacaaacacggaggtcgccaaggcgaaggacagtgcggacacggccgccgagggcactgacaactatgccgacagcgcggacggcgccgcgacaagcactgaagacctcaccgaagccatcgacggccttgtgaaaggctggctcagcctgccgggaacatacctgaccaccgaccaggccatcaccaaactcaatcaggggatactcgacctcaacgaaagcatcacggaaaacgggcgtgtgttcgacgaaggcggcaacgtcctccagggacacgaaaaacaggcatacgactcgcaatccgccctgcaatccctcgcctccactgcacaggacaccgcgcagaagatcattgaggaaggccaagccaacgaccgcgccgcagcagcgacccaacaagccggagacaaactcgaacaggcccgccaggccttcatcgaaaacgcccatgccgcgggcatgagcgaacaagccgcaggcgctctcgccgaccgttacggcctgacccgcagtcaggcagatgtactgcgtcaaggcatcgagaatctgagcaataccgccgccaagggcatcgacgtgaaaatcaagatcaccgatgatgccagcaaggcgctcgataacgtgaagctgaaggccgagaaaatcgatgacaagaccgtgcgcatcagcggcgacaacaccgacctgatgcagaagatcgcggaagccaccggtgccaccatcgacccgaaaaccggcaaactcgatctggacaagacccagttcgactatgcgatggccatcgccgcaggtgccaccatcgacccgaaaaccgggttgctgcagggggacaacagcggcatgctggccaaggtggccgaagcgaacggctggaccatcgacccgaaaaccggctacatctacgccaacgacgatcaggccatcggagtgatccaaggcctgaacaacatgcaaatcgcggacaagtggttcacgattcacggtaaatatgaggattccaacggtggcacgtattcgtccagtggttatcgtcctgccggggcgatgggcaacatccccaccggtaagaccggcggcctgttcaacggctacggggtttcgatgcgcggctacgccactggcggccgtgtcgtcgagggcctcctgccaggcaaggccaccactatgggcggcgacaacatcacgttggcgaacgcgcgcgtcaagagcggcgaattcgtgtccaacgtgaaaagcgtcgactactacggcgccgacctgtacgcggcgatgaaccgcaggcaggttccgcgtgagaggttctacaagccgaacccgatggtgctgagccagccggtcacgaacaaccagaccgtcaaccagaccatcgcaccggtgttccagcagaagatcgttcgtccggcggacgacctgtatgtggccgggtcgatactgcaccgcgacgcggtgaaaaccgtcggaaggctgagccgaatatgagcgatctgtggactatgtacccgcacttcggggaactctatgcgggcggcacgctgatatgccgtttcaaccccgacgactcccgttcccgtggcctttacgtcacctcgaacggggtcgagggttgggacacgatgccggacgcgaaggtggagctgacggaacgaggccaaggtgacggcgcgcacgacgtgcccgaatccgacctcatctattcggctcgcaccgtcaccgtgcactacgaggccatcggactgtcgcgcggcgaactgctctccatcatgcgcaagatcaaccggcttgcccaccgaaacgcccgactccgattcagcgacggaggggaggacacctacgtggacggctatctggcacagatgggccgcagctccgcatggcaccccacgctggaaaacgacctgacactgcatttcgtatgcccgcgacccgaacgcctcagctggactccgcaccgctgccagttgaagcccacatcagacggtcgcggaggcctgttctacggcggtgccagggcggggcttgtatacccgttgacctacggcaggcaggcgacggactcccgcaatgtcggcacgctgctcaacaacggcagttcgcgcgcctaccccgtgttcaccgtctacgggggtttcgacagcggtgtcatcctgcaattctccggcggttcctcgatacggtggacgggttctgttggcggaacgcctctggtgttggactgccggctgggcaccgcgacgatgggaggccgtgatgtgagccgttatctcatgtcgcgcggcttcccgaccgtgcagtcgggtgggagcctgtcggtgtcgttgcagtcggccggcaccggctacgtggactgcctcgtccgtgacacgtggatgtgacttccccatcttttcccccattcgttttcctttcccctattcgtatttttttggaggtctgatcatggctaccaccgcattgggcatcgcaccggattcgagcggcgcgggcgtcacgccattgacgcacaggcagataatccgcgcccactgggccaacaccggcatcgtgagcgggttgaacgtttcgggtcgaggcgacctgacctacagcgtcggggccggcatggccgtatgctcccgcggcgacgcggacggatacacggaagcgtactgggccggaggccagacccccgccgtgagcgccaccggaagccagccgcgcatcgactgcatctggatcagggccaacgaccccacccagggtgatgccgacaaccatgtggtcatcggcgtcacgcagggcaacgcctcccccactccgtccgtgccgggcgtgccggcaggcgctacccgcataggcatccgtctcatgcccgctcacgccacttccacgtcgggcagcaccatgtaccggtcggccacctacgcggttccctccggcgcttcgctcggcaggctcgccatcgcccgttcgaccgccgactatccgattcccgaggacaaggattcggcgggcaagatggtctaccaccagttgctgcgcatcgacttcgcggtgccgacgaaacgtctggtcaccgtcgaatggaaggcgtcggccacggtgccctccggcagcggcgacgacgcgaacaagcccatgggcagctatttcatgcagattcgcctggacgcgaaggtcatcaacgacacgcccaccacgaacccgaccgtggtcggcccctgcgacgagattatggcgacccgctacagcgccccgtacacggtttcctatgacgccgaggtcaatgccggagcccatcaggtcgccgtctgggtggccggcaacgccgatgggctgacctatccggtcaccatccacggcatccaccagctgcgcgtcagcgattccggggtggcggactagtgagctggcgagcctacatcgcggacaccatcaccggccagctcatcgcccccatcgacatcccctcgttcgcgtggagcatatcggtgtccgattccacgctttccaccaccaaggacaaaggcgccggcgaatacgacgccagcggcctgacgctgccgtggacgagcgtgcccggcagcactcctgcggaacgggtggccatgctcgcgcaggacaagcgttccatcgtcctgttctggaaaaccagcctcgacccgcaggacctcggcacgcccatcctcatgggctcgatcagcccccgcaccgactcgtggcaggacaccagcttcacgctcaacagcgtgatggagctgctggactcgcgcatccttgtacgagagaacacgtatggcagggcggcgaacagcacgaccagcgacgagttcactctgcacggctcgtggcggggcatcgccgcgcaggtcggctacatgtgcaccgacatgaaaccgggaggccgactgcccatcgactggaacaaccgcggcgaatcgggaaaccattccatggatttcaagggcttcgacgcgggcaaccagtcgtgccgccagatactcgaatccatcgcgaacaccgagaacggcatcgacatgcagttccgcccgtatctcgcgggcaacaccgtgcgattctctttccaggccgcgtccgacggcgacgtgcatctgggccagtccaccgtgcaccggctctactgccgccgatacggcggcgacctggagaacgtgaccatcgaccacatcggccccgtgatgcgcgtctatgccgccggtgccggcagcgacaaggctcaactgggctatctggccgaggatctgagcctgtgcctgcaatccgacccatggccgttgagggagatgaccctctccaacacggacacggacaaggccgagcagctggccgcctcagcacgcgggaacctgaacgcgaaccggctgccactcatgcagatcaagggcgaagtcaacgtgaacgaccatgattcgaccggactgcccgtcaaccctttgggctcgttctggcccggcgaacgcatggagatcgcgctcgacggcttccccggcatgaacgacggcatctaccagacccgcctcatgcaaatgagcggagacgaaaccgcgcaagtcaagctcacgttcgacgtgatgactgaccctatcagataaggaaccgcacatggcagtgcataccgaaatcgtgccgtccggggaccccgcgctcggcatcggactggaagcgttgaggctcgcccgaatgcgcatgacctccaacgctggcagcagctactggccgatgggcgacggcactggaatactggccggccagcaggccggtgaccaagggctcgtgctggtggaccagcacggcaacaggatgccgctcatcgacaccacggaaatctcgcagaaggccgacgacgccatatccaaggccaacgcggccgtcgacggcatggaacaggtgcgagaggacgcggaaaacggcgtgaaggaggccaaggacgcggccgccaatgcggattcgaaggcgcaatccgcgatcgacggcatgcagtcggtgcgcaacgaggccgtcaaaggcgtgaaggaggccaaggacgcggcaagcaccgcgcaatccactgccgcctccgccgcgtcgaaggccgacaaactcgccacggaattggatggcacgaaggcgatcgtagaacggcatacgaccaagttgggcgaggtggagaccaaggtatccaacagtgtcgagcacgcggaccaggcgctctccgcgtcaacgcaggccgtgcagaccgcgaactcggtcaagaccaccgccgaccgggcatacgatgacgcgcagtcggcgctcacccagtcctccacggccgtgcagaccgccggcgaggtcaaaaccaccctcgaaaccaactatttgtcgaagaaggattccgacgcagcatacgcgagcaagtcggagctgaagcagacctcggacgggatcaccagcacggtcgagaagacctatgcgaccaagagcgcgttggaggcgttgcggaacatcgcggacaacgcggtggagacgtggaccggatcgcagaagcctaccgcgtcgaacgcgcccgcctcgacgtgggccaccgaccagctgcggaagcagcatgcgggcgacgtctactacgacacgtcaaccggctactcctaccgttggggcagcacggacggggaaacgtatgcgtggagcctgatcaaggattccgacatcacgaaggcgatagccgatgcggcaaaggcccaaagcaccgcgaacggcgcgcagaagggcgtggacaggctcgacgcggacatccccgtcacctacagcacgaaatcggaactgaggcagaccagcgagagcttgaccgcgaaggtcaccgaagcgcagcgcgtcggccagagcgccttggacaaagccactactgtcgaacagaccgctaatggtcttaagacaacagttcaggaacaggcacagaccatcaaggggcagaccacaaccatcggccaactcacgcagaaggccgactcattgacctcgtcgctcacgcagacgaaccagaacgtggagaccgcgcagtccacggcggatacggccatcagccgcgccagcaaactcgaacagactctcgacgggttcaaaaccagtgtttcccagacgtatgagaccaaggcggattcgctgaaaaagcagtccgcgttggagcagaacctgaacgggttcaagaccagcgtgagcaacacgtatttgtcgaagacggacgcgtcgaagacgtacagcacgaagagcgaactcacgcagaccaatgagagcctgaccgcgaaaatcaactccacggccaccacggcgaacaacgccttgagcaaggccgcgagcgtggaggccaccgcgaacggtttgaagaccaccgtctcggagcaggccaccacgctcaaggggcacacgagcacgatcggccaattgacggccaaggccgactcattgacctcgtcgctcacgcagacgaaccggaacgtggagaccgcgttggcgaacggcgcggagctgatacgcaacccggaatgcgatcgcacgctcggcaatcccgacggctggacgaacggcctgaccctatccgcatcgggagcaccggagggtgccccggcaccgacgtacggcaagctctccgcgcgtgacacgaccaacgggtccaaagtgctcagacgcgggcgaacctaccggttcagcgcgtggatggcgcacgattccactgcgaagaaacctgcagccctcggctgcttctaccatgaatctaacggtaacggccactgggatacggcgttcagagtgccgacctcccagtccggatggaaacaatggtccggggacctcacgattcccaaagccgcgcgggaggacgcgatcgtatggcttcaggtgggcggcgcgaatggcagcgcggatgtgaccggctggtattgcaccctgctgagcatacgcgacgtcaccgaggccaagaacgcgcagacgacggcggatacggccatcagccgcgccagtacgctggaacagtccctgaacgggttcaagaccacggtcagccagaactacgagaccaagtccgacagtctggcgaagaagaccgcgttggaacaatccctgaacgggttcaagaccagcgtgagcaacacgtacctgtcgaagacggacgcttcgaagacgtacgcgaccaagagcagcgtggagcagaccgcgacgagcattaaaagctcggtgtcggagacgtacgcgacgaagaccacggtgcagaacctgagcacgacggtcacgcagaccaaggaaagcctgaccgtcagcatcaaacaggcgcagaccacggcgaacacggcgaacgggaacgccaccaacgcccaatcccgcgtcggctcattggaggcgtgcatcaggatgacctcctccggcgtgagagtcggacagataaaaaacgggtcgttcgtcggatacagcgcgctcgtgtccacaagcggcagtttccaggtgattgacaatattggcaacaaagtctccgaactgaacgccggcagcgtgctcagctatgacaacggccgaaccgtatggtccatcaaacaagaaggtcagaccgtcacgcttgactcgtatgcatcaccgctgaagctggcgtcgtcggatctctatttcctccactaccccaagtactccagcaataaccacctcgcctgtccggtgtcgggtcagttcaagggcgccacgaacgtgaacggcgttgccgtcatcacgcacaatctcggatacatccccaccctgagcatcacccccggcccatgggacggcatcggtgaaccacaaggaaaactgttccgcccggtcatatgggactgcacaacgacgactgcccaaatccgattcgtcagaaccgacaccaaccagtggatcgaccggcagcccgtcgccttccactggtacgcaatctgattttcgagaggaaacatcatgccagacaagaccacggaaccagccatgcaggtcatcgacctacgcccaccggatgacggcatcctcgcccaaatgctccgactcggactccggttcgaccattccgacgacgggtcaagccagtcatggatagacccggaacggcaattgagagccgatttcgccggcgttgatgccgaaaccgttgttttcacggatttacagacccggctctgcacggaggtgcccgccgcgaatctgcctcgaatctcggacatcatcacatggcaatccgcccaagggtcggaggactgatggattgggacgcgatcataggcggactcatgtcaagtccgctgctcctgctcgccatggccgtcatcggcaagctatggccggacacgcttcccacgttctccacatggctctactcccacgtggatcccggaaaactgccgttcgacagcgagatgaacgcgcattgggctcagtcgcgcgaactcggtgaacgtctcgaccggttcgaggcgaaccagcacgaggtgcagaaggacaccatcaagaacactctgctgaccctcatgtcggattcgacgcgagaccacagcgaggcgatccgctacgaactcgacaagctcaaggccatcaacgcggactgctgggtcgtcgacgccgccgaacaatacctcctcgaccgcgtgaaacggtcgtgaccatcaaaccaaaacccaacagaaggagatcaatcatggcaaacaccgccaaagccgaccacaaggccacctcgaacatggcgaagctgacgcaggagcgagtcaaggccatcgtgcttttgatcgtgcagctgttctcggtcgtccagaccggcctgagtctggccggcatcagccagctgccattcacctctgaccaggtatccaccgccatcacgggcgtgatcgccgtcatcaccagcatctacgcgtggtggcgcaacaacaacattaccgccgccgcggtcgccggccagcggatcacggatcgcgtcaaggccggcgcgcaatccagcctgaccagcatcgacccggagctcatgcccaccgcgatccagctcgacgcgtcgggcatcgacccggacgtgctcaccctcatggccgcaaacgccgccaacgataccgacgccagtgacgtggaggagtccaagtgagccgcttcgaccaatgggccgcctccaacacgggagcatggcgcgacctcgacggagcctacggggcgcaatgctgggaccttttctgcgcattgtgcgtcgacctcatgggtgccagcgtcagcgactgccataccgcgcgctccggcaaatgggcgggctgggccggcagcctatacacgggattccccaccaccgattggatcggccggcacttcacgcgcatccccgcctcgcagcccggtttgaagggcgacgtcatcctctggggcggcgacgccaaccacccctgcactcacgtggcgatcctcctggccgacgtgagaccgggagccagcccgtacgtgctcgcccagaacgcgggagcgaccatgaacgcgcgccgcatgtgggagacgccagccagcctcggctacctgcggccgaaagaccgcagcttcatcacaggaacaaccaacaaggagaacaatgatatgaacggtcttgcatgcatcgtccaacttaacgacgaaaacggcttgcactatttcgacgggagcaggctccacccgctcaaggacccggacgacgtggtcgcgttgaacatggtcgccaaggcgaccatcggccacgacctgccggccctcaaggtcggcaacaaccgggcaccgttcggcacgcgactacgcgaagcagtcgaaggctaaaacgcccactgaaacgaaaaccgcccctcccccagcagcaacgctggacggaggggcggttttcgcgtatccgcgcgatcaattggatgcgtttatgacccaagcatgatctccgctggagatgatcttcacggcattcgattggtgaaaaagaatcatgaacacatgatggatggaaagaaccatatcctgtatgacgtcatcatcctcaagcgtcttgactataagtcccatgcttctggcggtgtcgatggaaaaatgcctgtcatgcatgcccgaatccgcatgggaggtaagacggctaacgacctcatctaccttttccggattctccgcaaacatgttttcctttagactcttcgagagaatctcagccgataccctcaaggctttctcgctctcgccgatgtaggcgggaggatatttcccgatgatagtgccccagagggcggccatgcccgggtcttttcttaccgattccacggccttttgaaactcctccacgattccgcttgccggggtgccgccgaactgggggtcggtcgggccaatcgatgactgacgtcccatgtatatttcccggcaggcgcaagccatcatggttccgcccgacatagcaagctgtgggacaaaggcaaccatgtctcgaccaaagcaaccatgcagataggatatgacggattcggtggccgccaccgcaccacccggcgtgtgaagaaccagatcaagtccctttgaccggtccatgtccttgacggcgttcatgaaaccgttcatgtccagatcgttgataccggtgtcatcacggttcggcttctgaagccagctggaataatagcagatcacgtttctgccacgttttgcggagaacgcggcgatgcgttcccgaatcatgtgatccagcacggactcctcgccgttctgttcccggctgttcacctcgtccaaggtctctccccacgatggcatgagtcacgcaccgatcttgttggacgcggtggtcggccctgcatcatgattccatgagcaggcttcccacagactacgagcggacatatgcgatggccgattccattgcgcgtcgggaacaattctcctatagtcattcagcaactgtttttcgtgcttgtccagtttcttttccatacgggtttcctgatccataaccacagtgtatccggcaagtatgtaaatcgccataatcgcatcaactgccatgataaagagccgcctggcctcctcagactccgagagtccgatgggactttcgggttagggagcgggtttcaggggctcaatttttgcccacattttgcccacatttttcgtaaaaacaggttaaaaaccgttaaaaccggttaaaacgaaaaaagccgctcagccctactcccgcaaagcaaagcggctatttttcaacccgctctcagctcagcgcgtccttcaacttgctaaagaatcccttcttctgaccggtttgcggacgggaagcctgggagacgtgcgtggcatcggaatcatgcgaggcggcgaactgttcaatcagtccccgctcggactcgctgagcttggtgggaatcagtacgttcacatgggcaaccagattgccgcgctcatccttattgcgaatattggtaacgcccagacccttcaacgtcaccgtgtcctcaggctggcagcccgccggaatggatacggtctgctcgccgtcaaacgtatcaatggacagatcgtgtccgagcacggcccagctcatcggaacctgaatccagcaatgcaggtcatcgccgtcgcgggtgaactgcttatctgccttgatacgaatatcaatgtacaaatcgccggcagcgccgccgccctcaccgacttcaccctggttggccaagcgcagtcgagcattgtcgttgataccggccggcacagtgacacccacattacgcgtggtgcgaacgcggccgtgacccatgcagctcgggcatggattctggatgatggtgccgtgaccctcgcagcgctcgcagggagcggaggtcatcatctggccgagcatagtgcgcacgaccttttgcatgaagccctgtccatggcagtccgggcaagtgaccggctgggcgccgccttgtgcgccggagccaccgcactcctgacacagggagaacgtattgatcttgacgtgcgccgtgccgccgaatacggcggttttcaagtcgatggaagcggaagccagcgcatcgcgtccaggctgtgtgcgcggcaccgggccctgtgagccgccaccgaatgcggaaccaaagaacgtggagaatacgtctcccatatcgccgaatcccgcgccggagaagccgccagcaccggcgttcggatcgttggggtcaacgccggaatcatacatacggcgcttatccggattggacagcacatcgtaggcgttgttcacttccttgaacttgtcctcgaactccggtcccgcgatatcagggtgatacttacggctgagcttgcggtacgccttcttgatctcgtcgtcgctcgcgttgcggtcgatgcccagcgtctcgtaataatctgtcacttgtttgttcctttgtattcgttggtctgcgggtcattgtgccatagcctgcggtcagtcgccggagccgctttccgagacaaaaaaagtgagataccttgccactgccctgaccgcggccatggtagccgcataatccatatgggttgggccgatggatcccacaaaagcaatgggttcgttggtgccgtcctgatcgggcgatgtctcgttgcgttccgaatcgttcgctacgggcgaagtactgcgtccgtaaccgctactgaccactgaggcatgcaagagttcaggtgtgtggctttcggagccaatggatacgcctacgccagtggcgcttggctcttcgctgaggttgctcatcagtttcatgagcaccacctgctcttccagcgcgtcgaagagcggtgccagatcggtcagagaacgggaatgcgccagatgcgatgtgccggacatatacaattcgttggcgcgctcgtccaatgccatcgatgcgaaggcgtcggccagggcgtcggccgcctcccgcactgtctcgaatccggtgccgcaaccaagggcgcgcacggtttcggatgcggatgataaggactgaccgttgcattgttcattgactgcactggacaggcggttgatgtcgtcggccgtgggcatggccgagacggtcagtccgtgctgtgccacgcgaccggtatcggtgattaccacggcaagtagcgtgctcatggccactggtaccagctccacgtggcgtaacgtcgccttggataatgaaggcgatgcgactatggcaacttgaccggtgatttccgagagcagtcgtgcggaacgttgcagtgcgtccttgaggctgaccgagccggataggaaactattgataccgcggcgttgagcttcgctgagcggcacaaccgtagccagtcgatctacaaaataacgatatcccttttcggtgggtacgcgaccggcggacgtatgcggctgaatcaggtagccttcatcttccaatgcggccatatcattgcgaatggtggcagagctgacgcctaaatcgcgttccttggacaatgccgcggagcctacgggctcttgtgaacgaatgtaatcttccaccacagcgcgcagtaccagcatgcgacgtgattgcgtcatgcgcgcctccttatatgtacatctgcagtatgcaatctgctctcattgtattagcactcattggtttcgagtgctaatgcgttcgtttgcggcgaagtgatgtgaattgtgaacgctaacagaacacaaactaccaaaacacgccaaaattgcaccataacgtcgcaaaccatcgctagcatggtaagcgcaatgtgagggcgtcaagcgcccggcacaagccggatacgcggcccgaccaattggaaggaaagtaatccatgaccgaattcaaggagaccgagctcgacgagcgcgccatcaagatggcgaaggccctttcggctgacgcggtggagaacgccggttccggccaccccggttcccccgtttccctggcgcccatcgcctacacgctgtaccagcatttcatcaagcacgatccgaacgatcccaactgggagggccgtgatcgcttcatcctttccggtggccacgcctccctcacccagtacgtccagctgtacttctccggttatggcctgaccctggacgacctcaagcacttccgtggtggcgctgacacccgtaccccgggtcaccccgagtacggcctgacccccggtatcgaaatgaccaccggcccgctgggccagggcttcgcttccgccatcggctttgcctacggcgagcgtttccagcgcggtctgctcgatccggaaaccccgaaggaagactccccgttctaccacaagatctgggctatctgcggtgaaggcgatatcgaagagggcatctccggcgaagccgctgcccttgccgccaaccagaagctcggcaacatcaccgtgatcttcgacgccaaccgcatccagatcgaaggcgacaccaacctggtgctggccgaggatgtgctcaagcgtttccaggcctacggctggtacaccgacgagttcagcttcatccagcccgacggctcctacaaggaggacgtcgagggtctggccgacgttatcgccaaggccgaggccgctgctccggatcagccgaagctcatcaaggtcgacaccctgattgcttggccgaccccgggcaagaccaacgatccgtcctctcacggctccaagctgggcgccgaggccgttgccggcctcaaggaagtcctcggctatgatccggcagagaacttccacgttgacgaagaggctctggctcacgcccgcaaggttgctgagcgcggtctcgaggcccacaaggaatgggacgagaagttcgacgcatggcgcaaggccaacccggacaaggctgccctgtacgaccgcatcaaggccggcgagctgccggaaggcttcgacaaggccatcgatgaccttgaggccaccttcgaggtcggaaagggtgtcgccacccgtggcgcctccggctctgtgctcaatgccatcgctgctgtcatgccggaactctggggcggttccgccgacctcggtggctccaacaagaccgacctcaagggcgctgccaccttcgctccggctgagtgcgccaccaagcagtggccggtctgcaacgagttcggtcgtcagctgcacttcggcgtgcgcgagttcaccatgggctgcattaccaacggcatcctgctgggctcccacacccgtccgttcggcggcaccttcttcatgttctccgactacgagcgttccgccgttcgtctggccgccctcatggagattccgaacctgtacgtgtggacgcacgactccgtcgccgtcggcgaggatggcccgacccaccagccggttgagcaccttgcttccttccgcgctatcccgcagcttgaggtcgttcgcccggccgatgccttcgagaccgccgaagcctaccgctacttcttcgagaagaagaacacgctgccggctgccatggtgctgtcccgtcagggcgtcccggttctcgccgagaccgctgccaaggccaaggacggtgtccgcaagggcgcttacgtcctggtcgacaccgaaggcactccggatgtcatcctgatggccaccggttctgaagtccagctggccgtcaaggccgccaagaccctcgccgaggaaggcgtcaaggcccgcgtggtctccgtgccgtccctcgaatggttcgaggagcaggacgccgagtacaaggaggccgtgcttcctgccggtgtcaaggctcgcgtctccgtcgaggccggcgttgccatgccgtggtacaagtacctcggttcctacggcaagcctgtctccatcgagcagttcggtctgcagggcgacggtgctcagaacctcattgacctcggcatcaccgccgagcacgtggtggaagccgccaaggcctccatcgccgaagtcgaagccgccaagtgatttcactgccctccctcactagagggagggcttaacaagatttgttccataacggaatataaggagaaaaataaatgactgaagcaactcagcgtacgtccgacaacggcgtttccatctggctggacgacctgtcccgctcccgcatcgagtccggctccctgcaggatctcatcgccaacaagaa

SEQ ID NO: 3318 - DNA, 47615 bp, Unknown
  R151_18m  MAG No. k141_9754
gatgtggaagaatccgctggttccgttgccggatggcttcgaggacgatctggcgtggaggtcctatcgtgtgttcgggcagacgagtcccgccgatatcatcgctttggccgtccgcacccgtgatgaggatttggttgcccagggtgagggatttatatctgattcagtttccatgattgatgatgaggacgtgttcggctggctgttccgcatgatttggggcaaggagttgcagcttcgccagcagatagccgatgcggatgtggagaatctggacgccacttttgatttcctgacttcggcatgtcggttggcggcccatattcttcttggctggggcgaaggggacgcttccagcgcgtatatcgcgaggttgttcctcatcgaacagtacgatgaggcgctcaattgcattcttccgtactccaatgtgtcgttgaacgcgaacgaaaccgaattggtggtgtcggatttgcgcgatcgcgccatagccgcggcgatgcggcgtggcgagaccgccgcgatggagacgaagctgcataaggcggaagacggtcctcattattcgtcaggcgaggattctaccgcgtctgacgacggggaggggcttgacgtcgcggatgatggccgtccgttcccgcaatccgatgtactgtacctgttcgatgcggaccacgtcatcgaggcgtatcgctatttcctcgaccatgctgatggcgatgcggatggtgatggcgagcttgatgatggcaatccctggcgcaggccggatttcgtgcaggacaagctgctgaccttggcgggagcgggaatcgtggagcctttggtttccaccgcgttggagcagggtgatggagaccggctcgaggctgcgttgaatctgctcgccatataccggggaatcgtttgtgatgacggcatactggcgttgcccatcatcgccgcgcgcacgttgcgggattcggacgggctgcggcccgatgcggatctcgaccaacgtatgcggtacctggagtcctcgcgtgacctgtgctcgagcatggcggccatgctgctcgcgcgcatccctgatccttcctggagccgcaagttggcggtggatttgttgaacgccgatatggagtcgtatgtgcggcacgttcgcgagctagccgagtcgtgagcattcgcttcggaaggtcttgccgtatcgggttggatgccaatagaatcggtttgattggtgttgccgagaaaactgtatgaaggattgcacgaacaacaaggaggttgctgggtggccgaaaacctgacgattgtggaagaatcagtaagcacgctgatgcaggggtttcaacagtattcgtgatcggctaaatctggatgagcagattaccgagccgagttctgacaatgtcggctgttccgagctggtcgatgcggttttcgcattcaaccatcaggtcagcgatacgaagaacaagtacaagaagaagacggagaatcttcgtgacttcttggaaaacgtgaaaaccgggtccgatgaggccgatgaggcgattgccaaggccatttccgatgccgtgcaccaatcttgactgcctgctatgagcattatcgaccggcgatggggagaatccgttgactgaattcttacatatttcattgatacctccacagggatggagagaaatcctgttggatcctgctgaccgggaacggcagattcggcaggctcttgaaccgatgaaacacgtcatcgccgactggcgagaagtttatccggcattacgcaaatatctggcgaactcttacgagcaatcatggaaagctggtgtacgatacgccataaccacggaacttgatgatgccagccccgtattggtaatggctacattcatggtctcagtgcttccatccgctgtgccgtatggtacagcggatgaggaattggatgccatcgtggagtcgctgctcacggagcgggaaggcctgcccgaaggtgatgaactgcacatgagcaaaacgtcattcaataaactcggtcctgcggtacaggcatcttctgtagaaaccgttcatggccaacaaggtaagcccgtaggtaggttggcgatgttgcgtacgttcatcccctgtgcgggaaaggtaattcttgctaccggcattacgcctcaggtggaattgtctgacacgttgttcgagctgtttaccagaattacggcgacattgcgagtctcggtggaaaccgaatcggacgaatcggatcaataggggagttggggaattatgaagaatctcgattatttggactgggccgtagtgggccagccggacaatccggtgtcgggtgataccgagggaatcgcgcgtatggcatggaagtacaagtgtttgtcgcgggatttctccgaaatggcgtccgcattgaagaatctggacacaaaggccggcatgcagggcgagtgggttgtcaagttcgaggagaagctgcaggatcttcctagggatttcggccgatttgctgacagctttggtgaggtgtcctgtcagctgcgtggctggatgcagtctttggacgggttccagtcggatgccaaaacccagttggaacgtgccatcgccgcacgcgacgagaaggagcggtatgagcggctgtcttgtggggcgcgctcggcattgacgcaggcgggggcggtgtttgacgagttgcccgatgccgccacggatgtgcagcgcaggaatgcgcgtgaggcgaaggaagccgcacagcagatgctggacgggtacagcgaccatgtcgagaccgcgggcgatgagtgggcagatgcgaaacgtcgtgtacgtgatatccgcttggcctatgagagtgaagcgcataaacgtgcgggtgagattgccaaggcacaggagcatgcacctgccgtgaacggtttcgagaagttccattattcggatggatggcagtgcatcgtatcgttcgcgaaggccgcttccgccgtgctcgccatagtgagcctgtttgtttctggatggggaatcgcgctggcagtcgtggcgctgggagccttactgttagcagacaagtatgtagattatctttatagggatgcatcttttaacgaagtgattgcagaaggtgctttcctgattctttcgattattggatcggtacgttgtctttccgccggattgcaaggattcaaaacggctagtgtggcgaagtcgaccggtttggcagatgatttgagatccttcaaactggcgtcggggaatatcgcaactaatctcggggagtgtcacagcgtggcgagtttcggtatactcacccagtattccaaggttctccctacttacacgaaggtgtcggaagggatgacgtttcttggtgatgtgaagagggtttcggatagtgtgcgtgttatcgcttctcaggtgggacgatggggaggcagcggtcggacactgagaacggtattgtattacgccggtcgtgagcatttgttgcagaagggggccaatctggctggccatgcgcatgatttcgtacttgatcaggtcaagtacgggcggcagacatcgggtccatgggatgtggcgaaaatgttcattccggggcttgcccagttgaatgatgcggcggatgcggtgaacaatgccggtgaaggatttgtttatgcgggttccgcgattcgttcctttatggtggagaggtgattgatatggtgagaagtggtggtcggccaccgtgggagcgtggagccgctggtgtgggcggtgatgccgaggctggcggttctgatgtcggcggtgagaatcgtgttctggcgaatggcgcgttgggcgagttcatcgacatgtgcattcctgtgggtggcaggcgtgtgttcactcgtttgggggttgccttgtggactatcgtgtggtttgtgctgttccttgcgcaggtaggtttgcaagcccggtatgcgttcttcgaacgtgattccgctagaggtggtgtgtggttcctgcagatggccggtatctcgttgtcgagcgattggtggcctgtggcggtctttttcgacgtgggtgttgttccgggactattgctgtggctggctgctcatgttatgcgcaagccgtggattgctgttgccggggacgttctgattgttcagtgtgtcgccggtgccgtgggcgcggagattggaaagaccgttatgtatgcgatgtatggtccccatgtcgaaagtttgattgactccacgactggacgtccggacagactgtattacgacagttctcctgctgtggtggtgcctggtttggttgtggctggggttgccgtggtggttgccgtggtgcttgtggtgttgcgtggggtgggtgtttccccgcgtgtgcgtgtgggtggcaatgtggttgccggtttgggattaatgggcatgttgtgggtcggcccggccgatgcgaatcagttgttctgggtgaattccgtgatggcggtcggcatggtgttgttctggattcccggtgagcttcgtgcgatccggcgttgtgtcttggaggggcgtgatgcctcgtggcagcctgtggctgctggtttcctggtgcttgatttcgtcatgttgatgctgcttgcctacgcggccgccacgggtgtgtgatgtgggtgcggcgtgtttgctgttcggatgttggtatggagggtgttgctgtggttgttgacggtgagggttttgtcgggtgtgtccgtggtttgagggatgcgttggctggtttgcctgttgtggttggcttgttgccgtcgagtcgtgcggctcatggggttgtggcgcgtggctatgacgtgttcgggcagggggcgttatcttggtgtgctgcggtatgtcgatgacgacatgcgtgtggtgccggacggtgccggtccagtgtatgcgatgggcggcgtgtattggcggatcggcgtgcttgccgctttgtctgtggcggatatgttggcacaggcatggtgggtgaacatgagcctgagcatcgggtttgatccgtggtggctgggcgtgctgggcatcgatggtagctcgttcgatttcctgggattcatggccggcgtgtgtgccgtattgccggtggttggcatactgttggtcttgcccgcgttcatctggccacgtgaacgcacgttgtttcacatcatgatgctgtgcttctgggaaggcacttcgcgcatgctgggtgccggtttgggccgaacgatcctctatatgcgtggcgtacgtgacggcgtgatcgatcatttcgcgggaagcggcgtgcctggcccgttgaaggaatcggacacggtagttgggatgtggcccgcagtggtagggggcattgtgtttgccgtgattgctttcgtgttcgccgtgattcctcgcagacaaaggcagggtgcggcaaagcccatgattggcattggaatcgcggcaagcatcggcttgttcggcatagtgctggtggaatgcggttgggtgcccatttcttttgtgctgttgttggtcgccctgtttatggcttgggcggtgctgccaagcgaagtggcgattgcccgtcaatgcgccagcaagcgggtcgaaccgttctggatgtggtattccgccgaactcatctgggtcgagactctgttcatattccttgccatcatggttgccatctcaggaatctgacatggccggtgaagcttaccggggctcatgcgcaacgaaccatttccaagcgggcacttgtttgatgacataattgctgttgcggtattcgcgctcgattccatcgccgacgatgatggttccttcatggagcttttgttcggccatgagttcccagagcgcgcgggtttctctctcgatggtccgattatcatccatgcgtgccgtgacctgatatagctcatattgttcatgttcgagtgcatcgcccatcacaaaatcaacttcatagccatgttccttggtatggcatgacgatatgccgtcgcgacgataacctgcggttcggcggcgtagttcgagataaacggcgttttccaatcgttggccatcatctctggcgcttgccatgcttgaggctgcggccagcccgggatctatggcgtatatttttgatgtggaagtggtgctctctttgagcgacatagagaagtctttcattcgaaacaccagataggcgtcttcaaaatattccaataaatctcccagtagcacacggctggtggctagtccggctgaacgcaattcgttttctatcttgcgaatagacaatggcttgccgttgctgccaagcaagcgtcgtgccaatgcggaggcaactcttggacgcgcgatgtcataacgttccactacatcgcgggatacgacacgctgcacatatgactggagcagggtcacacgttgaggcgttggcagtccctcgattgctgggaatccgccctcttccaggtaggagatcaatgcggccgacagcattaatcgttctttggtggaatatccagctgcttcgttccggctgagcaattctgattcggcgataccgcgcgcgcggacaaactcacggaatgagaaaggcaaaagctcgaagtccaatgctcggcctcgaaattcggtggaaatttcttttgagagcattttcgaggaagagccggtgacatagatcgttgcttttgtggtgtctacgatgcgacgtagccaagcgccccagttctgcatttcctgtaattcgtcaaaaaacaggtacaagccggtgtctaggctttcgggatgcatggagcaaaaggtttcgattacttcatcgcccacacttggagtgatgtcgccgagcctgtcatcttcaaaattgatatagcagatttggttccagctgacaccggatgtatgtagggcctctatctcttggaataggcggtagcttttcccgctgcggcgcatgcctacgatgaccttcaccagattgcctactctcggggtcagtggcttacctagatccaagtcgcgcggcacaatcgggtggaaatcttcgattctaaaatcgcgcagcttttcggcgatgatcggatttgccataatgtgcctttcaagaaaacggtaatgctaccttaccaatattgaggaaaactggtaaccttatcttaccaatttttagttttttggtaaagttacttagccggagttgtgttactgtgttgacgagttttgcgtctccgcaaagcattggccttggtacaggactagacttaagtgctatgagagcgaagactgttaaggatcggcgtacgggggctcagacgctgaccatacataccacgcgaggcgagtcgttggatcttgggcaggcacaatggcttgctgaaggccattggtatatgctgccgttccggtttgaaagtaatggcgcggaaatcctcttctattacgacgtgactcattgcgagaccatgcatggcgtgttgaggtcggtagtgcctggcggccaatatgtgggcatactcgtggcggtattgtccgttatggagcaatgcgaggagcatcgcgtgccgctgtcgtacgtgcagtgggaccccaaaagcgtgtatatctccgcacaggggtatccgctgttcgtggtggtgccggcgctgggactggaacccgatcgcaacaccgccaccactttgctgcagacattggccgatgcacgccggacccggcttgaggatgccgttgtgcaaggctatcagcgtgcgctcgccgagttcctggggcgcaattcactggttaatgcagatgctctgcatgattttatggcgtatttgctgcccggcactgttcagccgcgtcaagcgcagtcagcgcagtcgactcatgaagataatggttcggagacgcaattcggcgcgaccgtagtgtctgacggcaccatggtcggtgccacgcgatttggcgccacagtattgagctccaagcctaaacttcagacgacgccgcaacaggccgcaatgccgacgacttccgcggcaccgtcaacgcatgcaacgccggcggctcctgcaatgccggcagcacacgcggcaccggcacagccgactcctgtaacgtcggcctcgcccgtgacacagccggctcctgcaatgccgattgccgtaaatcttccccgcaagcaggaaacgcagcccgctcgtgagaatctcgttcgcgaacaatatatccgtgaagattccgcccgcggtgtggcatccaatgtggcggctgccgctgccgcgggtgataccgctactgctgccgtggccgagactaacacgggtaacgctgctgccgccgctcacgttgctcacaccgtcaacaacgttgatgctgctcgcgttcccgccactagcaacgtcgttcgccctatcctccctgtcagcgccgtcagcacagcactgcgcgccgatgagaacgacagcgaaggcgagacgatgctgcgcctctacacggacaagtccagaggctttaccgtcacacgattgcgcgacggtaaagcaataacagtgcacgccacacgagccaccatcgggcgatcgaaaaccgcggacattcacatgggcggcaataccaacgtcagccgtatccatgcggtgattgacatgctggatgacggacgtttttgcatcaccgacaatcattcggccaacggcactgcggtaggtggccgcgaactggcaagcggcggatgcgaatatgcggcatctggcggcgatttcacgctggccgacgacacattcgtgatctctcctacaatagaaggcagagaagaaccgaagcgatgacgctgatagcgggggagaagaaccatgaaacgatgtgcacaatgcggcaatgcggttcctgacaatatgatgttctgcacgcggtgcggagccccggtgccagaggatgccacggtagtggcatcgcgcgggattccgcagccgggtgtgccgcagccgcagccgagcgtacctcggccgaatgcgcctcaaacgaatattccgcaaccgggcatttccagtccgaacggtccaatgcccggcggccaggtgccgggcagcccggtacccggagcgtatgccggtgccgccggtgccgttcctccggcaggaatcccgacctcgaacaatggcatgccaactggtgcaggcgtgcccaacaacggcaatggtgccggcaacaacggcaaaaagccccgtaaaatcgtgccaatcatcatagcgattattgtggtagtggcgctgatagccggcggcatcacgggctttatattctggcgtaacgcgcatcagaaggccgaggccaagccaacaactacctccagcaccaccaaatcgaaacctaagacaaagactaagacaacaaccaaagaccagcagaagaccaagtccgagcccgccaagccggcagccaccgaagtgacgatgaccgatttctcatgcgacggcaactccgccagtgactggaagtggactggcggcgcgatggtctcgaacgtcatccactgctgggatggggattcctcggtcgattcggattcgtcgtccaaatcctcaagtgattccctggacggcagcggcgagtatgccttcggcgtctggacgccggcgctggatgaatcgaaggaaatccacgtatccatgctcgaatcgggggagaaggagtattccgagccccaggtcgccgccacgtacggcgataatccggcggtattcgtgttctatgcggtgaaaaccaaggcagtgggcaccacgccggaaagcgtgcatctgttcgctcacgaggtcgatctcgataccggcgaactgtctgaccgcatcgacctgcgaaccgaggaagacaaccttatcgactatgagcagggttacgaatactcgttgctcgccgagtcccgcaacatggtggccatcaagaaaacgtggcatagcgatgaaaaatacaccgctaacaaggacgagcgctcagcgaccatcaaccacacgcaggtgatgggcgtaactcatgacagtgataccgccaaggtattgcagaccttccaagacaaaatcgtgcttaccactgattctggcgggtaccagtatgcgaaacaggtcaatgcctccgcgagcggcgtgagcttgtacgacgcatatatggtgcgagacaattcgtaccacctgtattcggtcgaagacaacaaggaaatcatgagtttcccgttgaattactgcgatacggactactcaagttgtgatttgagccgaatgcggtatctcggcaagaacatgtatgtgaccgatgattcgtatagcggcaagtttgtcatcgatagcacgaccggcaaacggcaatcgttggaagacgtgctgggactgagcaaggatgaggacgtcaaggccattgaccaattctccgacggcaccctctacgtgcagacggatggtaacggcaacgaaagcaaacgcgtgttcctgctgtcgtccgatctgaagcccacggaagtgttggatgggccgcagtggggtcgtctgttgttgaccgacggcagtttcaagggcatcaactatctgaccaagaccatatacgtgaagaccacggatgagcagatcatcgttgatgcgcaaggcaagtccgtgggcaagtacacgcaattgccattgggtgatgattccacggtgtgcgaccatgccgctatggaatggatggcgtggagcccggaatccagcggagacgtgattgtgaccatcggtcaggccccgggcgaccccgcaccggatctgagcaacagttcgtcgcaaagcgagagtgattcggattcgtcggacttggagtcggactcgtcaagttcgtcgagctcatccagcgataacaagtcagactcgaagaagtaactactgcgttcagcggtcagtgaccgcccagcccggtataggcatagccgagcaaccgtcactgaccgcccgccaacggcaacaataaaccgcaggtaccgtacgggtacaagttgttctcacagcttgcttggtacgttacctgcggtttattgatatctgggggggggtatcgctggcctgtacagtccagaggtcactgctgttcggagaactggaagaactggtctccgatacgcaccgtggcaggcgcgctgagcttgagcggtgtgcccttggtgacttgtgtctcctggccattggtgatgatgtaggtgccgttcaacgagccgtagtcctcgatccacagcgcgccatcggtgtcgatgctgatggcggcatggttgcgggacgtggtgcgggtcgggtcttcgatacgctccgccttggcaccctgcggcacatccatggaaggcttgcggcccagcaacgtgctcttgtcgatcacaatggtctggccggtgacatcgttatgcagcaggtacgtcttcttcggtgccttggaagtgaacgaggaggagagcacggtgctgtcccaatcctcgatgtcgttttcggcggcgtgcggtgtggtgtctaccggagcggcagtgggctcagcggcggcagtggcggcgggctctgcggtaaaagcggcattggttgccgcttccgcggtgctgggctgcccgtagtcgttctgcggttcggctgtgccaactgcggaatccggggtgccttccaccggatcgtcagaataccaacccagttcaggtgctggagggtagggaagtttggccatgatgatgccgtcctttcactgacgggaagccaaagcggcgttgatcgccgggtcgccgagctggcccagccattcgatcagtgccggataggtgttgggattacgggcgatgcaggcgcgtagttcaggcgcgtattgggcaatctgggcgatttgcatctggtcggtggtggtcagggcctgttcggcggtgaagccataaggattggtggccacaggctcctcgaatgccgcctgagccgcgggctgctgggctgcgtactggtcggcagcgggctgggcagcggcgtactggtcggcagcgggctgggcagcggcgtactggtcggcggcgtaagcgtctgcaggctgctgctcggcagcctgcagggccgcctgtgacggggcttcctgatcctggaccgggccgccgaatgcctcggcggtgaacccgtattgcgccagggtctcgcgggcgcgctcatcgccgaactcggcgatccaacgcttcaagccggggtagcaacgcggatttacggcgacgtttgcgccgaattccggattctcgtaggcgatttttgccaacagaatcgggtccgcgttcggatcctgtacggcagcgaccgcagcatcataatcaaccatgggattacctccttatgttcgctcggttatgccgaacgtatggtccgtagtgtttgtagtgttgcgtcttcaatggcgccaatgtcctcgccctcgtccagtttaaaagcgctgaacgcgtgatgttcgggttcggtcagtggcatatcggccacaatcacagtgatattgtcggttccgcccgcatcgagcgcggccgccaccaaggcgtccacggcttcctgcggactggaatgcgctgcggcgatggccgcaatctgttcgtctgacacttcaccgtgcaatccatccgaacagatgatgaaacggccggtcagatcggcaacatatacgtcgggcactatgccgtccggatcgcccaggcattgggtgatgatgttgcgtggaatggtcgcctccgcctcttccggcagcatctgaccggaatcgatagcctcctggcgttgggaatgatcccgcgtgatgcgggtcagcgaggaggcgtcccacacggggatgatatccgtggcgggggcatcggcatccggcagcgggctgagatggtaggttcgggaatcgccgacattgaccacataggtctggtccgagaaatccggggagtcggcatcgtcaaacggagctgcgctgtgggcattgatggcatctgcgtaaggctggggcaaaaccaggccggagcaggtcgtaccggccacgccgccgagacggtcacccaaatcgagaatgtcgtgctgagcctgtgccagggtgtcgtcgatgtcatggcgggtgcgcgagggcatggaagccagctgcgcgaaatgctgggcagccaactggcttgcttgctcgccgcctttgccgccgcccatgccgtcgcagaccatgaacacgccctgttgggcgaatccggtgtcttggttgttcttgcgcctaagacccacgtcactggtcatcgcgatacggatggagcctgtggtcatgacgtcttccccttcttacgcgcgcgcttgacatgcgtcgtgtgcgacttggctgcgtgtctatttgacagtatagccacgcttttcagggaaagtcgtgtacgtatcctcctgaaacgcggcaaagaagcgagcattgccttgcgcaattggtcgactcctgtccaatatgtggtggcttggcccgattcaatgtcttgccccgagaacgtggcgtagtcggcttcccggccaagctggatcaaagcctggtcatctgtgccgagttgacgggcgatggcaccggcctgatctcgacgagtgcccttggctgtgatgccgctttgctcggcaagcatgcgtatggcattccaacctgctgccacacgggctttcggactgccatgccgccgcgctcgcgccagcagcatggccttgaacatcagaatcagaccgcagacgatgagtagggtccacaatgggctgccgtacagggccaccttgcgggtcactcgccagaaccgcacccagaacaggttggtcggcgaatcatcggcgtcggcgcctgccaatgagctttggcccctggcttgcgtctgatcgcgcagcggatcggtcaacggcaccggtggttgccggaccagcgtctgcggattcggcggcgtcaggttctggttttcatcaggcaccttggtctccttgggcgtcggatagaacgccacccatcccaggccctgcaatttgatttccacccaagcggtgacatcgttgccggtgaattcgattttggtgccattgcccgaggtcttctccgtgcgggcatcggtgatttcgccatccttgtttttcggcaggaagcccaggaccacacgggagggcagtcccagctcacgagccatcagtgccatggcggaggcatattgctcggagtcgcccaccatggccgtgcctgccagcagcttgttgatacggtagttgccatggccggcatcggagggataatcgccttcgagtccatgagagaaccatccggagtctttcaatgtgtcggccaacgccgtggctgcggcaccgcccgaggactgtccgccggcaatggacgtggccagtttgctggccgaatcgggaacatcctgggcttccggttgggtgatgcgggccgcggccgcactgctgatctgcttatcggtgggcttgcgggcgataatgccggattcggtataggtgaggcttttacgcgtgccggcgggaataatggcggaatcggtatccgtgttgtagtagaacgtgtcattgccgttgtcggcatcgttggcgaagctcacgccagtggccgctcccgccagcggcagccaggtgtcggtcaatccctgatcgacggtgaaggtcgcagtgaaggattcgccctgctcatccgccttgatcgtggtgcccacgcgatgataattcgaggagtccgtggcttcggaagaatcggacaggttccatactgtgccgtcgaatcggtccatcaccgcaagtttgactggtgttccggccggcagattatggacggtcagcaacacgtcttttttgtggtccttgatataggatcgcatgccgctgagcgggctggtgtaatcgtaggggcttaacggcggatcgtagcggtcacgcagcacgaaacggtcctgcggcaccagcaacgtgcctccgaaagcaaggccggcagcgagcacgacgatgatcagcgcggatatccagcgcccccattccagcagttcaagacgccaagacagccagataatcagcagcaaggcaaaggcaatgccgcagatggcacgttgccagccgctgtccgtacccagcagagcacatacggccacggccgccgcaaggggcggcactcccaccagagacaaccatgcgttggcattaatggcaaacacgccggtgaggaacgtaagccacaggccgatggtccataccgccagcagcacgccgtcttgcgtgcccagaggcggatcgacggaaataatgtacttgaacgagccaaacgtcatttcccaacctgaactcaaggtcttcaaggtgggaatcacgtaatgggacgtggtggaactcagcgttaccaccggaccgatgatgaattgggcaaacgccagaaacacgatttgccaccacagtcgcaacgccggcaacatgcccgccagagcgatgatcgcgcccagcaaggtggccggtacggcggcgatcgcccaagtggccacgccgccgtacacgtcgatgagattggcttgcgccagcaacatcatcgccgctatgagtacgaggctggtgattcgtttgccccacggctggcgactgaggcccatgccgcgaagcacattgcctctggtcatccagataaccgaatgtgtggagtcggcccaggagccggtggtggtggaggttccggtgtacgtgccggaggaagtgccggtgtatgtgccgctcgatccggcgtacgcagcggtattggtattggtgatactggactggtcgaaggtcatgcgagcacccccatgatcagtgggagatcatcgagttcgccgatggtggccaatgtgaagttggcgaatcttctgatgccgcgattggcgccggcgctggcctgcaataccacgcagctggccgatcggggcaaggccaaggtcatgcgcttgatttgctcgatgtctttcagcgatccaacagtgaaaaaatagaacgaagcatcaggactgtgcttcagcgtgccctcggcgagattcggattgtcctcacgatcaggctctatggcactggcgttgtcgaggaactccatggcgttgcgcggctggccgtgcgcgttgcccgcgtgacagaacagcgggcgattctgcagcaggcatttgacgccgatggaggagtggatggacaccgccatctcgaattcctcgccgttgacgtactcatccgggttcacgctgatggtcaccgaggtgtcggtgcggcgcgtggcttcatattggcgaatcatcaacgtgccggttttcgcggagctcagccagtggacgttacgcacgtcgtcgcccggctcgtattcgcgcaatccgtagaagtcgagatcatcatccacgatctggccggatggttggccttccagatcgcggggcacgccggcattcaaggtatcgagacgcacggtacgagggtggatgaatacgatgatgcggtcggccagctccttttcgtgacgcaccaggccgaacgggtctcccttgcggatgcgcaatggtccgatgggcagtattgcgcgcgataccgtacggaactccacatcggtttgcttggattgcccgggagccagcatggggatgttgaatcgttcatgcgcatcgccgattggcagatatccgcgtgccgtggttgtcggcgttctgccggtgttgtcgatgccgacgataacggatatggtgtctcccacggtcacgcgatgatcggatacggcgatggacgcgtggaagcgtgtgttgccgagggaaagcgcgattgccgcgagcatcatcaccatcgccacgatgccgaatacgagcagctcataccagcccagaggcaggaacgcaataagacatgcgatgcctgcgcccgttaccgcccagcccaagggcgagacgtaggatgcgaagaaccgtctgatgcgtcttaccgcgcgcttgaacatgcgttcagcgcgccggcgacggcgtaatgcggcggatgtagatgccatggtcggatacctttccaggccctatcaggaaccgatggtgggggagggaacgtcttcgagcacctgtgcgatcaggctttccggagtcgcgccatcgaaggtggcttccggagtcagcgtgatacggtgtgcgagcacggccactgcaaggtccttgacgtcatccggcaccacgtaggcacggccatcggccgcggcccagatacgggcgcatcgggtcagcgccaaagcgccacgcatggaggagccgactgtgatcttctcgttgtggcgggtcgcctcgacgagcctgacgatgtattcacgaatcgcatcatccacatagatttcggtggccacctgacgcagccgcatgacatcgtcaccgctcagcaccggggaaatggtctgcgcacggtcggtgatatcgacctgcttgaggatatcgacggacacatcatggcccgggtagccaatcgacgtcttgataaggaagcggtccatctgcgcctcaggcagcttataggtaccgagctgctcgatggggttctgggttgcgatcacgatgaacggctgcggtacatcatgggtgacgccgtcaacggtgactttctgctcttccataacctccagaagtgcggactgcgtcttcggcgatgcacggttgatttcatcggccagcacgatggaggcgaaaatcgggccctcgcggaactcgaattctccgcgcttctgatcgtagaaagtcacacccaccacatccgaaggcagcagatcaggcgtgaactgaatacgcttgaaaccggtggaaatggagttggccaagcctcgggccaactgggtcttaccggtgccggggttgtcttcaagcagaatatggccaccgaccatcagtgcggtgacgcattgcttgatgggaatggtcttgccgataaccaccttggagacattctcgaccagcgcattgaaggactgctggaaatcccggacctgagccgtgggctggggcagtagtccggaattgatgctggcgggcagtgccgatgcggctgcttgcgcggctttgctcgactgacgctgcggctgggattgcggctgggattgcgcggcggcctgctgattggctaccggcccgcgaccagccacggtttcggcgttggatgctgcggtcttgccggcggttgtggtcgtccattgacgggaggtctgggtggcgggggcagcattcgcagtagcggcctgcttgccggatttacgtccgaagtgcggaagcgcgactttgggcgtgctggtctttgccggcatgccgacctgctgcgggatggctggcgtcgcgtccttgcgcggcttgagcacggtgctgtcatcgcccgcaggaatggaggcggcatcagtagtaggagacggcttttctgacgacgcttgtgacggccgctgcggcaggttaggcaacgcaacgggttgctgtgccgtctcggtgttcggggtggtgccagtgtgcggttccgatgccagatgtgtggcatcggacaagtgcgtggcgtcggatagctgcgtgctgtcagacagctgcgtcgcgtcgtcgatgttctcgctcatggatgttctcctactgcttgtgaatggtggttgacgatattggggtattaccgaaaccaagaatccaagggttcttggccaaagtggtgacatcggtaccggatttgagcgactcggtcccctccgaggaatcagaggggcgtgtgcccgcgacgctgctgccgtccgccgtattgtcgagaccggagtatcccggcccgccggtgactttgacgctccacgtgtagttgccatcggcggccacggccaagtcggtgacgtccaatggctggccggggttccacgtgaacggttggccattgatgatgatttgtacggtggcctgcttgccatagacctcaaccgaaccgccggtgacgttaatgacgtgagcgttgtctgaccagcgcagctcctgcggtttgttgattacagccttcttctcataggtgtaaggagcgccattgtacgggcctccggtggcggcatcgctggtagcgccgttgaacacctgttgcaccgatgcggtattgcatttggcccaaggactcattcggaagtcgagtgagttccggttagtagctgtaccggaatcgatgccatcggcagtcacgttgtaggactgcgcatgcccctgcttggtccaatgcacggtgcatgtactgccggatccggtggtgtagacgtcagtgggcggctggacattgtactgcgggacaaacctgctcttgcctgtgccggcggaagcatcgcgctgcggcaccacggtggccgttacggtgatttcccgggtgttcaaatcgttctcattgatatcgaacgtagcgccaccgtcactgcaatcgatggtgtccttgacgtctcctcccaaggaaattcgccggcagccggcattgcggttgttgccgagagtgactttcgccgttcctgtggtgtcgtcgttcgacagcgcaatggtcggcgcatccgggtctccccagatgtcctttggctgtgatgaggcggactcggcactccaattgattttgttatgggctttgacggtcgccgtaatggcggtgccatcggaaatgtcgttgttgttgaacgtaaacgacagctcggtggccgtattgccggtttccttggtctgcggagcacctgcaccggtgacggtcaccgaatagttgtcgacggcgctgaaatcaccgctcggcgctttccacgtcactttggcggttttattgccacctgtgaccgtgacatcggtgggagcggacggcaccttgtccggtgtggcttcgacggtggtggacggtttggaccaaccgacgtcatttcgcgcggcgacggtgaaggaataggttttgccgttcttcagacccgtgacctggcatgaggtgacggcaccgcaatccttctctccagtggcggcgccggtccaactgaccttgtagttggtgatcgggctgccattggcggcaccgggcgtccatgtgaggctgaccgcgctgtcctgcggttccccggctacgggggagagcagtggcggctcgggcttgtcgatcacggacacggtaatcgatgcggtgacttcacgatccttggacttgctgccgtcttgcacggtgacgagcacggtgttcgtggaagcacccggatcggatgcgacggcgatggtgacgtttccggaggcatcgcatccggcgatagtgagtttggcggcgtcatccgccttgcagctgatgacggtcagcgaggaatcggggaacggattgtacgcgccggtaagcacgttcacggcatcgctggcaccggccttgatcttcagcgtcttgtcgccgacgcgtgccagcggacgggtggaagacactacgcgcacggtcacaccggcattcacggtgcccgcgccgtatgcgatttgcacgggaatggacgcggtggtgccaggagcggcatccttggtggcggaaacctgcaagctgccggaacgggacaggttagcggtgattcgcccggacgatgagcttccgccggaatacgtgtattgcttctcgtcgtcatacacgccggacggtgcatgggtgagcgccgtcagatcaacggtcttggggtccgcgcccgcctcgacatcaatagtggaggacgagaacgtgggcggcggcacatcgcggcctatcaccgtgatctggagagtgatcactgcggaattgatgatcttggtcttatccgatccctgcttgccgtccacagcggtaaaggtaatggaggcggggcctgcgtagtcttttgccgcagtgaacttcagggtcttgtcgttcacgtagaaatcggagttggaagccttggtggcgctgacggaatcagcgctttcgatatacggttccttgccggcaccgacgcgaacatagtcattgatgttgatttcaatggtctcacgcgaattgaccttcaattccggtgccttgggacgcaacgtgggcggaaagacaccataggccggtacctggatgaacgcggtggaggtgatgttgtatttcgtattggtcaccgtgtaaggcacggctcgcgcctgtgacgtcaggtcgacggtgatggtggtcgaatgctcaccgcccttgacgtgagcgtgagcgctggcggagggatgcacgccgaccttgagctcattggctgtgccggaaggattggcgatccactgggaaacatccacatccacggacttcttatcgatggtggcggcggacggcacacgatagtcgtaggcggtaggcggctcgatggcggcattcggatccacgtttaccgtgagggtggccgtatcggacaagccggccttgtctttgaccgtgtaggcgatataggcggtggtggcgctgccgggcgtggtgaaggagatcatgttgtctttcgcgctcaccccgtcgagaccttggacctcgacatgcttgtcgacggtcagattggtgttgtcgccggagatgtcgttctgcgcgaccggcacggttgcggccgtattgggcctcaacgtgatttcgtcatccctggcgtatacgccggagtcggacgatccttggaatacgcccacgcggatctgcgcctgtgcgcgctgaccggtccaatcctccacggcataggagaaggtgtcggtgccggacgaatccggatacgcttcatagaccaagtagtcggaaccgacttcggatatgcggcccagcgtgggtgccttgttgcccagacccaacagctgatcgtcgtcgccatccgtgtctatgccggtcagtgtgatggggatgcggaccttctgtccggcggcaacctgcgcttcggcgtcatgcggggttggcgcggccttgctcgctgcgtcgctcttatgcacggtaatggtgatattggcggaagccacattacccagattgtcttcaaccgtataggtgatggggaagttgccggtctcgctggatgcttggtagcggaccgtgtctccagagacgaaggccagacccttgaacgtctccttgtcgtattgcaggttgttcttgagcttgaccgtggtgccatccgagtaggccacatggtcaagcacatccacggacacgatgccgccggtgcgcacctgggcattgatattgctggccttgggcactgaattcgaggtggtcagagccggtggctgcaacacgatggtgcccttggcggttccggaggcgttggccacggtgtaggtaagggcgacgggtttcgtgggcacctgacgcgcagtgatatacacgcgcttatggctgacgagaccaaccttgatgccggagtcggccggtgcgctcaccgtggtgacggacagcacgccgcccatcggatcgacgtcattggtgagcggctccacaatggcggtattatccgcgccaagcagggcgacatcgttggcggcaaccggtttggcggcctcgccggtggcgggctgtacctcgacgcgagccaatccggtggccggaatcgagccttgagtaatggtgtagggcacataataggtgccgggattggtggccttgaacgtcaacgacatatccgccgcattggtggtcgtcgaagcgccgttgggcgtatccacctgagtcagctgtgccggctgcaaggaagtgccatgcacgtaagaggacagcttgacgacggtatccgtgttgggaacggtggttttcgctaccgggtcgatgaccgcggccaaggtgttcgcgggcttgaccgagaaatacaccatgccggtgccggtcgccgtgccgtcggagacggtgacctcgacgcccacgcgtcccgacgccagcgcaccggtgttgaacgtaagctggccgtcggctcgggtggacacctgcaccgggtcggtgttctgggccacagcggagaccagagtgagcgggtctccatccggatcgttgaagctgctcagcgcattggcggtataactggctccctgctccacatcgatctcgggaggagtgtcgaactgtacgggagcgtggttgcctccatcattcagggttacggtcaccgtggcggaagaggtctggccgcggccatcggaaatatcgtaagtaaaggtaacggtgcctgcggatgtggcggaggcatcgagttgcagataccggccgtcgtaaatcggcgaaatggtgacgtctttgttgtttggtgcgccaaccttggtgattttaagcacggaacaatcggtctgctcgtcattgcgcagcacgtcgagaatctgttccgaaccggctcgtgcgccgatttcatcatcctcggctttgatttggccggattgtgcggaacaggtcttggagaagtcgtggtggttgttggccgagtcgttgttctgctgttctttctcggtctgctcggcctgtattttgttccactgtattttgatgactttggtggaatcctcagggttccacacattgccgttaaccgtgtcgttgagcaccacaaggcgatggttggtgcggaacaccaattcggaagtagtattgacggattcgagggtttgcggcttgacgctggtatccgcgggggagcaggcgcgaatgtagttgctggccttctggctccaagccgagtacacgcagcccttggacgataccggtcgtgccggattcgccttgcccccgttggctatgaaattcgccttggcattggacttcaacgggataagcgtaaggcctctcggtgatgccgcggccgcccaatcggactgtacgtcatcggtgggaggctcctgaagggtgagggtgccggtcgtgtcgacatcgacgcggccgcccttgaatatgacggttttgccggttgcgattaccggcgtgctcccgatgacggtaaagctttcaacggtctgctgcttgccgtcggtcagcgattcgagggttttggccttggcgctgctgggattgtcaagacgcagcaccataccgtcggatggacggtatccgtagaccttgccatcgtgggttactacgatgcgcccgccctcgcccagcttcattttcggatcggaagtggtgggggccacggaatcaaggttttccgacaagccggtccacacattgccggtcttctcgttgatcagggctacggtatccccgccgaccacagtggtggtgttggctttgatgtcagtcttgacaccggtgctgaccgtggatgccttgatggtggaggctttggtcgtttcggtcaggatggtgtcgccattatgctgcgcgatgtcgaatcgtggggcggaggaggagacgccggcgtcggcctccttgttctttacgttgaatcgtgcggccttctggttcttcagcgaagtgacccacacggtgccatcgtccagttgcacatggcggcgcgtgacggtgctcatgatcaccgcgccggcaacaagtcccagaagcagcaggagcgtgattacgggaaccgtccacgtatgccctccggagggcataaggcggcgcaaagccgcgctgatgcgtcggcgacgatcgtatgactgggacgatgtggccatctgaactccctgaaccctggtttctctggttgctagtgtaatgacaacgctttacggttccaatacctgccgttcctgttgtccatttggtgaattcgccactgccgggcgcatgcctgatgcgatacgcaatgccaaggtggtatgcccggcagtggcgagcggatcactcttgcggcttggccgcacaggcgatggcggggctgacggacatctggcggttcttgcgcacaatggacacctgaatgcaggtctgcgagccttcctgcgcgttgacggtcaccgtgggatctgacgttgtgacggtttgcgcgctctggtcggtattgctgccctgcactatggcccacgcataggtatcaccgctttgcgggtctggattcgtccaggtgaacgtcacggatgacctatccgccgcataggtgccgttcagattctccggggaaggaatctgggcgttcgcggtatcggtgatcacgtcatcctgattattgcggttgttgtcatcatccttggtgccgggcgtcgccacctgtttggtatctgatccggtggcgctgtccatgcggggaacgaccacgaaggcgaatatcagtgccgctgcggtgatcgccgcaagtataccgacggtaatacccaccggtttgacccatcgccgtgacgaacgggtggtctgatctcgctggtccgtggcccggcgccgacgctcgatgtctttggggtaggccggcatcccttccacggtaacgggagtggcatgcccgaaatatgcgaattgcacacgctgcatggcgcgtgcgaactccaacgcggagtagtaccgctggtcggggtccttgttcagggcccggcgcagcaccgcttccacatcggccggtacgtcggggcggttgaggcgaggcaatggctgattgacgatcagcgaaatcagttccgattgcgaacgtggatgatattcgtgctggaatggcgagcagccgacgaacatggcgtacagggtggccgccagtgaatagatgtcggcggcttccgaaccattggtcagatgctgaagcacttcaggcggtgcccacggcggcgagaatccggtttcggtacggtcatacacatcggtggagataccgaaatcacccagaacaggcaaaccctgcgaggtgatgagaatgttgctgggcttgatgtcgtgatggatgatattgctgcgatgcgcggtgaacagcgcgcttgacagcttgatgccgaggtcgagtacctgctcgcaggtcatggaccgggccttcatgatgctgttgtaggtgccgcccggcgcatattcgatgacaatgtagccatggccatcggaggtgacgccggcaccatataccggcagaatgtacgggtgggatgacagcttggccatgaagttggcctcgcggttgaacagggcagcggcccgtgggtcaagggttttggcgctgacctttaccgccaccgggcgtgcgggcatacgctggttatataggtacaccgtggcggtggcaccgcttcccaacatctggacgaaatcatatccgggcagcttcggcggcctcatcggaatattggccatctgttccctccctccttggaaaatgcgctctccctgcattcgttctacaggataccgtcaagggtacgattcttcgtcgggttcggtaaaatttttccctctgtgacggtcgggtttaggctggagccatgatgacgagacttgaacctggaacagtgctggacggcatcgaccgtgatggagcggcgaggctgattgtcggcacgcctggaagcggcaaaaccgaattcgccttatcggtgttgatggcggggctgcgccgctatggtggcacgcaggcggtgatggccgtatccggccgtgtggccgccgacgcattgggcaatcgggtgattcgtgagctcgggttttccgtgcaggccaggccggtcaccacgctgggtgccgtggcattccgggccatatcagcttcgcgcgagggaactggattgccgtcgcctcgattgttgaacggtgcggaacaggatgctttgctgcgtcaagtcatggccgtgcatctgcgccatgccgtagcgggagatgattgcggcacctgtgatttgctacgcgtctactttgcccaggatgactgggcgaaactcatacgcgatgccggtgccggcgagatgcccggctcggccgcttccgcacaatcaagcctctcgcaacaagggtcggattcgctgtctccgacgtcggcaggcggctcgaccagcgcggataggttcacttgcggtatttcagatgcgtttatcggccagttgcgcgatatgctggcccgattggacgagctcggtgtaggcgttcacgaagagccacgtctcttggacgccgtgacggaggacgcgcgattgtcggtgcaatggcgtttggctttcgcgttgcgccgtgaatatattgcagcccaaagcgcggcatatccggggcaataccgtttggatgcctcgtatttgctggtggcaggagctcgtgtggtgcatgaggcattcgccgccgatcacgcggatgattccgaccggcctatgcgtatggaggcgttgggcttgccccggctgctggttgtggatgatgttcaagacaccacgctggccggcatgcgcttcttggaggagttggggaatgccggcgtcaagttggtgctggtcggcaacccggatgaatcggtgcagaccttccgtggatcgtatccggaatatctgatgcgccgtgccgtggaagggtggctgaaagccaaggaagaacagctggttggcggcagtaccggcgctgatcagtcgcacatgacgatggctgatgtgatcgcgtctcgtatttcgctgtcgattccctcgccggaagacgagccgctgcctccggccgagcgtcccggcaagctgaccgccatgctgggcggagtcgatgcagcgaattatcagtcggacggcacggtgaccgccggcctgtaccgatcctcacgtgaggagctggatgatgtggtctggcgcatcaagcgggcgcatctcgaccggcatattcggtggaacgacatggcggtcatcacccacgacaatgccgccgtgcggctgttcggcgaacgactgcgccgagatggcgtgccggtgcggtattcgtcggtcacccgtcctttgaaggacgagactttcgtgcagggattgttcgcgcttgtggagcttgcccgattgcgtgccgagggaatggcggaatgccagatgacgttggcttcctgcgcggcatatataaggactagagtggccacgttgatgaacggcccgttggtgagtgccgggggcagacccggtcaagggcgtcctgcaaggctcgctccgattgaattggccatgagcgcgctggagtcgctggcgcatctcgccacggatgatgccatgctgacctctctgacgacggcatgggagacattgcgtgaaacataccatgaaacacggcgtgaaacaggtcgtgaaacatcctcatcagtggttccgtcgccagtgtctgtcgaaatactcggtgaaccgtccgacgatgacttggcctttggcgttgacgcgctgtacgtgatgcttgccgttgatgatgccgccgcgccggcgcaggctgcgctcgcatccatccatgcggtgcttggcaacgaccctcaggcccgcgcttttgcgaacctgtggcatctggtgggcagcgttgcttccggcttggagcggctgccggcaagccagcgcgtacagccgcgttatgcactgtctgttgcctggaacgccaccggtctggcaccggtctggcagcgtgcggcattattcaacacggcagaggggcgcacggccaatgaccggctggacgcggcaatgcgcctgttccagttcgccgatgattccaccgccagccgagacatcacgtcattcatggcacaggttcggggcatggaagtgcaggccgattccttggcccacatagggccggtggaagacgctgtgacattgaccacgccggcaggcgcggccggacgccactggggatatgcgtggataccggtggtccagcaagacgtgtggccgaacctcgccgggcgcaacaccatgttcggtggtgaagaccttgccgagctcgtgctgaggggagcgcttgaagaaagcgacaaaaccgggcatgatccgcagttcgcggctgtgctgtcgggcgagaagaagggtttcctggtcgcgctgacccgtgcacggcgaatcatgatcagcgcggtatggaacgacagcatgagcccctcggactttcttttcgggtatctgccggaatactatccgcgcaaccggcaacaggcgcctttcaccacagtgggggcgcatacaggatccgccgaatatgatctggccggattggacgccgacccacgtgggttggtcagcgccgcccgcgcggttctggccactgctcaaccgcaacaggctgccgcaaaggacgccgcggttgcgttgacactcctgtcggagcatggtgtgcgcgccgcaaatccgcagagctgggcgttcgtggaatcgccggcccaatcggatagcgcgtcatctggcggtgcgtcatctggcggtgcctcatccgacagtgcctcatccgatagcgcgtcatctggcggtgtacagtctgacggtatccaaacggggaaaggcaagacggatgcgcaggccgcacccatggtcaccctgtctccatcggcggtcgacagcctatgggcatgtccggtgtgctggatgctggagaaccggttcgccggtcctcgccccagctccgtggccaccagcttcggaaccctcatccatgcggttgcacagcaaggcagcgaggaagggctggaccatctttcccacaatgcccagacgttggccacactgggcttggactccacggccggcacggaacgccgcatcgaggctgtcacggcacggcttaatgccatctatcagagcaaacgccccgatccgaatgccatagccgacacccggaaccgctatgaggccacccgtaaggacgagtccgcggcagatgccctgcgcaacatcgccgattactttgtgcgcagcgacgccgatccggaaacgtatcttggcaagaactccagcaacttcagcattggcgcattggccggtgccgaatgcgaacgggagtttgccgcacgattcgatgtgcgtgacatactcgacgcatacaatgccgtgcccggcatgcacccgatcgatcggaacatgctggtacgtctgatgggagcactggtcggagggtggccggaaggcatggacgagcatctgaccgtgagactgtccgggcgcatcgaccgtatggaaacccgcgtactcgcagacggcggcgaatgcattcgcctcattgactacaaaacaggcagaacgcccacggtcaaacagattttcaatgatctgcagctcgtgtgctatcagcttggcctcgtgttccccgaagacgggccgcgcggtgccaaggcacttgccgcaatgccgcatatcagccaaagcgcgctgttccatgtcgggcagaatgcggcaccagccagaagctacgccccggaaggtgccttccagccgccgctgttcactgatggttcgttgaatgccgaaccgttcacgccacgatactggtataaagaccccagccgtttcttcgacatacccgccatagatccggctactcctcccgaaggtgtgagtgccgaagcgtgggcgcaattcgccgcgctcgccggtacgcagacgttatggtcgctgaccatgatcgcccgcgtattctatgccgcggcggccagcaggtcggccatcatcgaggcccatccgcaagacacccatatcggattctgccgtatgaagaacgtctgccctgcctgtgcgggccagatcgacacgattttcgaaacgaggcaagcatgagcacgttcactcccagtgcggaacaggccgccatcatcgatgcgccagtcgatgctgacgtactggtggttgccggtgccggttccggcaaaacctttacgatgacccaacgcatcatcgcgcttatcaatcgaggtgtggcacctgaacgcatccttggcctgaccttcacacgcaaggccgcaggcgaactgctggaacgcgtctccgccgcagtggccggtgatatggcgggctctacgaccgccacggtgtctgatcgggcattcctcaagccggccattttcacgtatgacgccttcttccagaccatcgtgcgccaatatggactgcttgtcggattcgatcagaacacgcaaccattgagcgcagccggagcgcttcaactggccaccgaagtcatcgacagtcacatggatctgacgttcagtgaggattttggcgccttctccagtttggcgaaccgtgttctggcgttgtcggatgccattggcagtgccatgatcggtgccggctgcaccagcttcgatgatgcgatcaatcaagtacggcaatgggattcggcattcatcaatcgattgcagcaagccgtcgcagacgaacccatgcccgaggacgagccgaaaatccccaagatcaaacgactgaagaaagataccgacgccagctggcaagccaagctcgatgaccgtgccgaacatttgcacgcccgctgcgcctatcattgcggtgcgctgctggagaccacacgcaaacgcgatattctgctccagctggtggaggcctatgcccaagccaagcgggaacgcaatatggccgaattctccgacttcaccattgccgcgtatcagcttatcgagcgcttcccctccatcggagagcgcacgcgccgcaggtacagccatgtgctgctcgacgaatatcaggacacctccaccacgcaggccgctctgctggcagcactgttccatgtggatgcgtcacggaggtcagccgtcaacgcggtgggtgatccgttccagtcgatttacgcatggcgtggtgccagccctggtgcattccgtatgttccagcaggatttccacctgcctgccggatacaagccattcccgttgtccgtcaccaggcgcaacagccgtatagtgctcgaagccgccaataatctcacgctgccgttgcgctccaatccgtcgcgtccctccagctcattgatgcgtgaggtcgatgtctcatcgctcgaccccatgcctgatgcccccgaaggaacattgggagtactgggcttcgccacggccgggcaggagatcgacgccgtagtgcgtttctgcaagacggccatcgcacggcaccgttccgcagccgaacaacaggaacagatgccgggcgaacagaaagcgccggtcgccgtgctgtttcggtccaaatcacatatgcccgaatatcaggcggcattggaacaggccggattgaccacattcgtggtcggctattccgcgctgctggaacgtccggaaatccgcgatctgatggcgttgctgcacgtggccgccgaccacaccgatacgggatcgctgatgcgcttgctggccacgccacgattcaccatgtccgcagcggatttgaccatgttggcccgttttgctgaagaacagaacatggaacaacgcttccaagcattggtgcaggccggccttgcccaaccggatacaccagcgaatgaatgggcggctgtggtgcgtgagtaccgcgatcaggtggccaatgcggtattcctgccagacgtattgctacgcggcgacctggtaaaactgcttgaacggttgagcgcacacgggcgcaacgccataacccgggccgcggtgatgctccgtcaggtgcatgatgccgtcgggcggccactgggcgacgtgattcgcgccggcatagaagcgttggatcttgacatcgacaccgtattggccggtgtgctgcataatccgcagcaccgcgccaatcccgctttggcgcatatgcctatggatgcgattgtggatttggtggatacgtacacgcaagagattgccgctgagcaaactccctcgttgcatgggttcatcacatgggtggatcatctggcttcggtggaggatgaagccgccagtctccccgacgctccggtggatgtggaactgatgaccgtacaccagtccaaagggttggaatgggatgccgttgcggtagtggggcttaccgccggcggattccccagcaatcagggcgaccatctcaagatcgtgctggacgaacaccatacgggaggcaccgagcaaggtcactggaccgcacccgaatatcatgagaccgccgactcctggctcaccaaccccaccgccgtgcccgtgcctatgcgcgccgatgccggcattttgccgcgattcccccatgatgccgatgtggaagccgaccccatcgcatcgttggcggctttggatgatgtggagcttatcgatgatgaagtgttcggctccatgcgcgaattcggcgatggcgtggaagaagtggatgcatccggctggtatttgacgcaggcggaggaatatgggcgtcggctgcatgccgacgaacgtcgattgatgtatgtggcgcttacccgtgcgcgggaagatgccctgatgacctattgcgcctatacgggcgaatccgggcgggacccgtcagtggtgcccaaaggctctcgcgccgctcagccatccaatttctggcttgaagtgcatgacgcgctccaagcccgtgaacatgcgatatcggctcaggactgtgtggaacggctgcaagccgccaatgccgggaagcccatgctgatctcggcgcaaggcgaagcgattgcccctcccgaagggttctttatcggagagcatgccgcggcatacagtgacgccgtggtgggggaggcgtggcaaacgccgattacgcagacgaatgccgccgccgaattgccgtggccggctaccctcagcgacgcggtgcatgaacagctgtcacgcggcatcgatgtcatcgccgcagattcctcgtcacttgagcagcaccaagacgccggcccactcctgcaacgggcacaattgctggtggacgacgccgatttgatggccgatgccgccagcggacagtcgcttgatgaggcagtcaaagccaaggcgcaacgcgttctggctgcaggacgccagaacgtgacaagcctgcaagcccgcgtaggtggcatgaacgaacgggaggagcgcctctactggcgtagcattatccgcccgattccgcgcatatcgtctccggcggccgaggccggcacgcagttccatgcgtgggctgagcaattcatcaatgccggtaagccggatgaagcggtactggcatatgaagccgaaccaagcatgccgcatacaggtcaggatgcgggattcgtttcccgggaagccatgttggccgatttggccgaacgggagcggcaatgccgcaagccatccacacggcagcccgctgtcccacagcccacggctcaacaatccgtatccgccgtatccgccacttccataagcagcgacaatgccaccgagtccaagctggtggcgtggcagcgcagactggccgaatcatcgtgggccaagcgcatcccggcgtggacggagcgtgccatcgtcgtggacgtgccgggcgtgggcctggtcaatggcaaactcgatgcggtattcatcggtggacttgacccgtccagcaccaccgcacgctttaccgtggtcgactggaaaaccggtcgtcggcccaccaagccagacgacatcacccgcaaactcgcccagctcgacatgtaccgactgctgctggcagcggtcgaaggtgtggaattggacagtatcgacgccactctctactatgtcagtgagcccgacgagggcttgcgcgagcttcacgcccgcgcgaaatccaaacaggaaatccttaccgagttgagctccggcattcccgaacaatctgacaacgactgagcccaaaggctcatgacctgtacagcatcggacggccttcaccggtggagagaccttatgcatcgcaaggcatctccgacgatgaagacgactggccacgtaccggtccgcggttgaaacgcaccgcgtgacgttgctagggaaccgctaccctcggatggcacgtgtgggcgggcgcacgtgccggacaacgcaccagtaaggagttattgtgtccacgactcgcgcggtttcgaagtcgtccgctgtccactcgccctatcagcgcctgttcatgctgcccggagccaaggcgttctgcctgtccggcgcggtggcacgattgccgatctccatgatgagtctcggcatcgttctggcgctcaaccatctctacgacaattggaccatcgccggcaccatgagcgccgcctatgtgctggccatgagctgcgtcaccccgttctacgcccgcgccttcgaccgtttcggccaagcccgcgtgggccggcttgcgctcgccgtgcagatcgtggccatgctcgccttcgccttcgcggcgttggtgcgcgtgccgattccgctgctgttcgtcctggccatcatcatgggtctgacgcagttctcattcggcgcattggtccgaacacgctggtcctatgcgttgcgcggtgtggaagatggtgaacagctgctcaacacggcctacgccatggaagccgccattgacgagatcgtctttattctggggccgattctggcggcttggctggccacctccgtgcacccggtatcccaactgttcgtgcccaccgtggcatgcggtatcggcggcaccatattcttctcgctgaaatccacccagccgccggtcatcgtggaacaggtcaccgtgtccgcgcatgatgacggcagccccgctgcaagcgaagatgccgaccagctgaccctgcgccagctcaaacgtagcggcgccaagcccaagagcgtattgctctatgccggcgtactgccgttgctcgctgtgttcatcgtgttcaatatgagcttcacgtccttcgacgtgtccattaccgccaccatgaaatccatgggacttgagcccttcctcggtctgcaattggcgatgttcgcggtcggctcgtgcatcggcgcgctggtgttcggctcttgccgactcaaaggctcccattgggcgcatatggtgatgttcctatcgctgctgaccgtcggctacgtgttcttccggctgtcaatggacaatctcatcctgctgggcgtcttcgaaatcctcgccggcctgaccgtctcgccgacgttcgccaccggcaacctcatcgtcaaggatctggtgccggcggaatccctgaccgaaggactgagctgggtaaccaccgcaggcacggtcggcacatcgatcggctcgtccgtggccggcattgtgcttgacgcctccaaccctcatgtgggcatgatgctgccattcatcttcacgctggcgtccgtgccattggcgttggccggatgggccttggccaagcggcgtgggtgaaacggaatcgggctacgcctgatggatggttggcggcttcgccgggggtctctccctcagtccgcttcgcggccagctcgaacgcaattaaatgatggctttcagccaactgaattattgctcactgtcgttcgccctcacctaaaaacgcctccggcgttttcttcacggttcggctcatcagagggagctcgacttcacggttcggcttgtcagagggagctcgattctgtggacgggatattggcgtgagggcttggcggtgataggctgattgccgattggaaaacgttccgggtacattgccgggcaggtacgggtagacagggaagaagacatgatcaaggtttcggtggtcggagcaaagggccgcatgggctcgcacgtggtcgaagcggtgaacaacgccgaggatacgcagctggcgctcgcattggatgccggtgacgacctgacccaggtcaccaccgacaacaccgatgtggtcgtcgaattcaccgtgccgtccgtcagcctgaacaacgtgctgaccctgatcggccaaggcgtggacgtggtggtcggcaccaccggttggaccgacgagaaactcgcccaggtcaaatccgccatcgccaacggcccgaagcccgaaacccagaaggtcttcatcgcacctaatttcgcgatctccgccgtactggccgactactttgcaaccaaggccgcgaaatacttcgaatccgccgaagtcatcgaactgcaccaccccaccaaggtggacgccccctccggcaccgccattcacaccgcccacggcatcgccgaagcgcgcaaggccgcaggactcgcccccgtgccggacgccaccgaaaccgatggcggctcacgcggccaggtggtcgacggcatccacgtgcacgccgtgcgtctgcgcggcctcaacgcccacgaggaagtgctcttcggcaacgccggcgagcagctgaccattcgggccgacagcttcgaccgcaccagcttcatgcccggcgtcctgcttgccgtgcgcaagctcgccggcgacgctccggccggcctgaccatcggcctcgaccacttcctcgacctgtaatcgacccgcagtcgaccagtagtcgcccccgcatttcaggcagggaagcgcgccgggacgcgcatcacggcattgccaccggctccggccataatgccacgcattcagcaacaatcaaggtacgtagtataagagtccacaatgggaagtacggtgaacactatgagcgagcatgacatgcaccttcttgagccagcacctttcggccgcattctgccggctatggtcaccccgatgaaatccgacggcagcgtcgatttcgccgccgcgcagaagctcgccaaatacctcgtcgccgatggcgcggatggtctggtggtcaatggcaccaccggtgaatcgcccgtcacccatatggatgagaaggtcgagctggtcagggccgtcaaggaggtcgtcgacgttccggtgatttccggcgccggctccaacgacaccgcacacaccgtgcgtatggtcgaacagactcaggaagcgggcgccgacgcggtgctcgtcgtcatgccttactattcccgcccctcgcaggacggtatcgtcggccactacaaggccgtcgacgaatccgccgaaaagccgatcatcgtctacgatgttcccggccgtaccggcttgaaggtcaaggtcgaaacctacgaccgactggccgaacttgaacacgtcaaggctgtcaaggacgccaccggcgatcttgcagccgcagtggagaagcagcagcgcaccggcctcgcctggtattccggcgatgacggcctgttcctgccgttcctctccatcggcgccgtcggcatcatttcggtgattgcccacgtcgcctccaaccccatgcagcagcttgtccaggcattcgatcgcggcgatatcaccaccgcccgtcgcctcgccaaccagctcgccccccttgtccacgcgttgaatggcgacggctatcaggccgtcatggccaaggctgcgctcaaggtcaagggcgttatcccctccaccaccatgcgtctgccgaacatcggtcccgacgccactcagcttgacaaggctgaagagggcatgcgcgctgccggactgctgtaagcccgaaacgctgcatacgggttgccagcccgccgcccctgcatgacagagcagaggcaccacaacagaaatcccaaaaaggttatggcacaagaacaaaagaaaacaagcaagaacacgaattctcgccgtcgcggttccgcgcgcggccgcaacgccaacggatccaacagccgtacgccgtcccgtaagatcaacgccacccggcaggccaccgcaccccagcaggatgccgtgctgatcgccccgccgaagtaccgcaagggctccatgcgcatcacgccgctcggcggcttgggcgaaatcggccgcaacatgaacgtgatcgaatacaacggtcacctgctgctcatcgactgcggcgtgctcttccccgaggaggagcagccgggcgtggatctcatcctgcccgatttcagctacatcaagaaccgtctcgacaaggtcgacgccctggtgctcacccacggccacgaggaccacatcggcggcgtgccctacctgctcaagctgcgtccggacatcccgctgatcggctccaagctgaccctcgccttcgtggacgccaagtgcaaggaacaccaccagaaccccaccaaggttgaggttgccggccgtgagaagctcaaggtgggccccttcgacctcgaattcgtcaacgtcacccactccatcccggacgccctggccgtctacgtcaagaccccggccggctccctgatcgacacgggcgatatcaagctcgaccagctgccgctcgaccaccgcatcaccgacctcgtcgaattcggcaagatcggcgaaaagggcgtggacctgctgatgatggactccaccaacgccgaggtgcccggcttcgtcaagcccgagacctccatcggcccggcccttgaccaagcgttcgcccaggccacccgcaagatcatcgtcgccagcttctcctcccacgtgcaccgtgtgcagcaggtggtggacgccgcccacaagtacggccgcaaggtcgtgttcgtcggccgttcgatggtgcgcaacatgtccatcgccgccgacctcggctacctgcacatccccgaaggcaccgtcgtggacctgaagcaggccaacgacattcaggacgacaagctcgtcttcatgtgcaccggttcccagggcgaaccgatggccgcactcggccgcatcgccgacggcaaccaccgcgacatccacatcaacgagttcgacaccgtgattctcgccagctccctgattccaggcaatgagcacggcgtctacaaggtgatcaacaagctcgtgcagctcggcgccaaggtcgtcaaccgcgacaacgccgccgtgcatgtgtccggccactgcaacgagggcgagctgctgtacatgtacaacatcgtcaagcccaagtgcgccatgccgatccacggcgagaaccgtcacctggtggccaacggcctgatcgccgtcaagaccggcgtggacccgcagaacgtggtcttggccgaagacggcgacgtggtcgacctgtatcacggcaaggccgcggtcgtcggctccgtgccgtgcggttacgtgtacgtcgatggcgattccgtcggcgagctgaccgatgacgagctggaaaagcgccgcattctcggcaccgagggcttcgtatccgcgttcgtggtggtcgacaccgacaaccacgaggtcgtcaccggcccgaagatctacctgaacgccgtggccgaggacgaaagcgagttcgacaaggtgcgtcaccagatcgtcgaacagctcaacgaccagatgatgcagggcacgcgtgacacctacaagctgcagcagaccatgcgccgcacgctcggcagctgggttgcgcgccagctgcaccgcaagccgatgatcgtgcccgtcgtggccgacatcgctcaggacgtcgaaaccgtagaaaccaagtagtccggattatccagggacgaccgtaaggagtaattgaagtcatgcccggttctaatctcactcgtattgaagccgaagaacgtaaggccgttatcgaagcgccgattcactatcacgtcgaccttgacctgacggtcggcgcgaagaacttcggttccaagtcgctcatctgcttcaacgcgaagcctggttcgtcgaccttcctcgacctgattgccgacgaagtgacatccatcgacctcaacggcaagtccctggacccagccgtggccttccaggacaaccgcatcgaactgaccgacctcaaggagaagaacgaggtcaccgtcgaagccaagtgccgttactccaacaccggcgagggcctgcaccgctcggtcgacccgtccgatggcaacatctacctgtactcccagttcgaggtgccggacgcgcgccgcgtctacgccgtgttcgaccagcctgacctgaaggccaccttcgatttcaaggtgctcgctcccgccagctggatcgtcacctccaacatgccggttgccaccatcgaggacgatccgcgcgaaaccctcgacggcaccctcggcgacaagccgaacgaaagcacccgtctgtgggacttcgagccgaccccggtgatgagctcctacctgaccgctatctgcgccggcccgtacgccgaatggcacaccgaatacctgaacgaagacggtcgcaccgtgccgatggcccagtactgccgacagtcgttggccaaggccttcgcgaaggatgtcgactacctgttcgacatcaccaagaagggcttcgcgttctacgccaagacctggggcgtgccctacccgtacgccaagttcgaccagatctacgttcccgaatacaacgcgggcgccatggagaacatcggcatggtcaccatccgtgactcctacgtgttcgagtccaaggtgaccgacgcgctggccgagcgccgcgtggtgaccgtgctgcacgagctggcccacatgtggttcggcgactatgtgaccatgaggtggtggaacgacctgtggctcaacgagtccttcgccgaattcacctccacgctggccactgccgaagccaccgaatggcatgacgcctgggccaccttctgctccggtgagaagagctgggcgttgcgccaggatcagctgcccaccacgcacccgatcgtcgccccgatcaacgacctcaacgacacctacgtcaacttcgacggcatcacctacgccaagggcgcctccgtgctgaagcagctggcattctacgtgggccgcacgcagttcttcgaaggtatccacaactacctgaaccgccacgcctactccaacgccaccctggccgacctgctgagcgaactggagaagacctccggccgcgatctcaaggcctggagcgccaagtggctggaggaatccggcatcaacacgatcgccaccggcctgaccgtaaacgcggacggcaccatcgccgaattgaagctcacccagagcgcgccggccgaacacccggtgctgcgtccgcatcgcctggccgtcggcttctacaacgaagacgccgaaaccggcaagatcgtgcgcaccgagcagttcgaactcgacgtggatggcgaaaccaccatcgtcgaggccgcggcaggcaagccgcgcccggcattcgtgctggtcaacgacgatgacctgacctacaccaagattcgtttcgacgccgaatcccaggcattcgccgaagccaacctgcatcgtttcgacgatgccctggcccgcgccgtgacctggctcgccttctgggatatgacccgtgacggcgaattcccggccgaacgcttcgtggacatgaccctgcgtcttctggccacggaaaccgaatccaccaccttccgttacgcgctggcctgcatgagcaccaccgcccaccactacgtggcgccagcccgccgcgacgatgtgctgcgccacgtggccgccgagctgtggaccctggccaacgccgccgaagccggctcggacacccagttccagctcgccaccgcctacctgggctatggcgaggagggcgatgccgcattcgccgccaacgcacacggtctgctggacggcaccgtgcgtcttgaaggcctcgaaatcgacaacaacttcacgtggaccatcgtccaagcgctcacctccgtcaacgagatgaccaacgacgacgtggacgcgcagctcgccaagaaggagaccacggaaaaccgcgagttcgcctacggcgcccgcgcctccatggccacgacgcaagccaaggaatgggcttgggatcaggcactccacaacgacgagctgaccaactcccagctcgaagccgtggcccgtggcttctccgccaccccgcgccccgatctggccgagccgttcgccgccaagtacttcgagactgtggactgggtctgggccaacaagacctatcacatggccgaggctttgctcaacggcctgtacccgggttacgccgatcccgccacgctggtcaagctcggtgacgcctggctggacgagcacattgccgccgacaacgccctgaagcgtctgatcgtcgaaaacgtggcatcctcccaccgcaccctcaaggttcgcgaatacaacgaagcgctctgatttccttctggctcccctcgggtgcgaggggagttgtcgcctcaggcgactgagggaatcgcttccgcgaggagctacgtccacattccaacataaaacccgcaaccaatcctcaacagcgtattctcgctcaaggccggcaatgtgccggtcgatgagcgacaaggatacggggaatgattgcgggcttttccataacttcattactactgattctgttggccggaatcggcgcaggattcgtgggctatgcggtaggcgcatcgtcactggtctcatacccggccttgctcgcgttcggcattccgcctgtattggcaaacgcttctaacaccgttggcgtggtcggcacgggcatcggtggcgtgatgggcgcgcgcaaagaactcaaaggccaagcggtacgctccattacgtatgtggtcattggcgcgttcggcggggtggccggtgcgtttctgttgctcaaactcgacccgagtgtctttgaattcgccgcaccagtgctgattttgctgagctcgctgatcatcgccatcaatccgcgcggccgcatgcaggccaagcaggccgccgcggatgccaccgcgcaactcaagcacatcgaagccactgaagccaccgatgccactgatgccgccaagcgcgcaaccacccctaccgcacctcaccgcccgccggaacaactcgtgcagcccatgagccaggattcctggtgggtatggctgggcgtggtggcagtcgccatctactccggctacttcggcgcgggcgccggcaccctggctctcgccatgcttgatgccgccaaaatcggcccattccacaagatcaatgcattgaaaaccctgatcggcacaggcgcgaacatcagcgcctcagtggtattcatcatccaaggcgcggtcgattggccggccgccatcatgctgtgcatcggctgcttcatcggcgggtacatcgccccgcccatcacccgcaagattcccgcaaacatcatgcgtgccgccgccgtaatcgccggcatcattctcaccatcgatctggggctcaaaacctattgattcgtgccttacactgatgcagtgaagcatacagcatggccgccaaccgcagcgtggccgcagaccccgataaggtggccaatgtctggcatttggcgactgcggaacctgagcgcctagaaaccaacgcggtaggcaaagaggtgagtgacttcctcgatccgccagacacgtcgcagattcacggcgttgcgtgccatgctgattggtggttcgcggcgcgagcaggtgctgttcgccggcgttatgaaggagctactcgcgcccatcaacaatccgcgatatgtcatcatcggcaaggaatggggcgtgcgcacgtacggtgtaagctttccatgcccgtccatatttgcccgccgccagcaggacgccgaaatactgcgccgacagttggaccgctgcctgacgcattgcaccatggtatacacccgcactgaggaaggccggcgtacgctacttcgttgccaaacgcgttctttcctcaaccgtgacgaacaactgccgcgcatactgaccacaatatcggagtgatagatcgttgcatgcatagccgagaccactccggtagaggagatgccgttgggcatgttcaccgcatggctcagcgtgttcctcgccgtcgtgttgtatacgatcacgtttgccggcccattcgtgctggtacgccgtcttcgttcccacgccagagcccatcgacctgcccggcatgcccgttaaccgatacttctcattgttcgtctatcgagcaaggtggcacgtacgatacttggtataggggagagtttctcgctgtctgtggtggaaaatccgagttttattatctgagtcagtgctttgggtttgcgttttgggctcgatttactattggacggcgatatccggggcgggcggctagctgttggggttcttgtcgcggctgtagatgtgtgttcggtctatcggtgatgcttgtcctgttcgtggaccgggcgaagtgcgggacgacgcgcggatttcgcggtttttcgtctgccgtcccgcagagagcccgggggatgattatggtccgtaaacggggattggcgtgattgcgcggttctggcggttgatagtgtggaacgccacgaacgtcaaacgattgatttctctaccatcccacgttcctgcgggacgccgcgcggaaaccggccaaatccgcgtgccgtcccacaggcatgaggctgtattcggccggccactgtccatggcggacggacgaacagaccccactggccatcgtctgcgcttctgcagcgctcaccccggccttccacggaaatcatgacagcatgaaggtgacgaatggcctggcttgcctgtggacgccgatcaatgtgtgcgacaatgattcgcggtacatggcccctggcgctggagtcgcagatgctgcttgtgtggcacaggagctgtgctggtacgtgtgatagccggcttgttgtccgtactgctgactgtatggttgccttacgaagcggtttttgatgagagaaggttgatgatgtgggatcgtgtggatgctgttgccggtgcggttgttcgtcggcagttggattggccgtggtacatgctggaggccgtggtgttcgtcggcgtgctgtggctgctgaatgctgataaatctggttttcctttctgggtgggtagggttttccggtacggcattgttgtctggtgcgtgttcgtggtggctggttcgttgctcggctggcgtatggtccgtgtcaggcagcgcatgtggccgacgtggcggtattggtatcgcaacggcgtcatcgcgtcgttcgtggtggcgtgcgtttgcattgcgatgatgtgttgggctttttccgtggtttcggggttcctgtgctggttgagatccgttatgagccggctcccggagtttcttcggtcacgtattcggtccatgcgcgtgattggcaggccaaacggaccgtcgatgctggaagcacggtggtgcttcgtggcgaggccgtgcgtaatatgcgggtgaacaggttctacagcaagggaccgtggctgacgttcacgctgaatgtgtatgacaataatggctttttgagtaattacgccatgcggtatatgcaggtggtggtgttgcctgtgccggctcgttcgcagggggtatgcgtggtgctcggtaagcgatttgttggggcatgcggttcggccacagttggtggggccgccgcagaatgtgttgcaggtattgtccgctcatccgttgcgccccaatgtgattgttgcttcggggcgggcgtatctgtgggtgtccctgtgcgataggtggaatatctacgaccgtttcatgaaccccggtttggagtcgcagatgctaccggtggcgcaggagttgtgcggttttcttgccggccgcgtgtgatgtgtattgcgtacgcggcgatgctggtcgtatggtggtgtcatgccgttctttgagaggtcgtcagggcccacgcgtcatattttcaagtatggtccgtctcgtatttattgttacgatcggccggattcgctgttgatgccggtgggtgcccggcgcacgtacaggtcattgctgaagtgggagcggaagttgccctgtgccacgccgttggatgggatcgcgcgtgatctgggtgctttctggctgttggaccagtggttcacggtcggtctgcatgggtgggccgaatcgatgatcagctccagcatatcggatcgcaatcgtacgttctgccagtccgtgttccgtgcgtccgatgccgcgaaccccaagtatgtgccgttattgcaggaacatcgcgatatgctgttcgaccgggtgcgcggtggtgtggcggggttggatccgtctgcgatggattatgtcgggtttcgcgcggcccgttgccgtgcggggcttgcggattggctgttcggcccggatcgggggatactgctcaatgatgttccgggcactggcgcgtggaacacggacccgttcccgcctgatggctggcgcgagcagctgggctggacgccgccggttcagtatgccgcacgccatctgtacagtctgtacggcatcgttgggggcctcgtcatgtccggtccggtatctggtttgccgggcctgggcatctgctgctcgtccttgttccctttcttgacaatgacaggggctttggctgaacagtggggggttataggccaaaatgtgtgtccggcggtctagtcgttcgactgccattcgacccgtgtgtggaactcgttccagtcgatgccggtgccgtatcttgcggggatgccgaacgtctcgtgcatgctctgcgggctcctttcccatgcctgccggtagaggcgctcgagtcgttcgtcggtcatcgcgttggccgcgagccacgcgtcggtctcgggccgttccgtgtgctggtggcaccaccagcagatcgccttcagccgtctgaccagccgcagtccgcggtggcggcgcggcatgtcgcgcaggcgcgcgttccatgattcgacgaggttgttggtggacggtatcgggccgacggacgcgagcccctcgtcgaggaacgtgaacaggtggccctcgcggatgcgtctgcggatcatgcgccgtgccttgacgagcctttggtgcatgtcgttcacactgccgtcggcgtattcgctcttctcgtcgaggaacgaatggaagtcctgctcccactggttgtagga

SEQ ID NO: 3319 - DNA, 4149 bp, Unknown
  R151_18m  MAG No. k141_10151
cgaggaccgcaagggtcgtcgtggccagcgcggtgaaggccgtcgcggcgagcgtcgtaaccgtcgtgaagaaaaccacggcgacgagctgctcgatcgcgtggtgaccatcaaccgtgtgtccaagacccacaagggtggccgtaccttcagcttcgctgcactggttgtggtcggcgacggcaacggcaccgtgggtgtcggctacggcaagtcccgtgaagtcccggccgccatcgccaagggccagctggacgccaagaagcacatgttctctgtgcctcgcgtccgcggcaccatcacccacccggttcagggtcacgacgctgctggcaccgtcctgctgcgtccggccgccccgggtaccggtgtaatcgccggtggctccgtgcgcgccgtcatggaatgcgcaggcatcaccgacgtcctgaccaagtcgatgggctccgccaccgccgttaatgtggtgcgcgctaccgtcgacgccctcaagcagctcgaagagcccgaggagatcgccgcccgtcgtggcctggcgctcgacgaggttgctcccgatgctctgctgcgcgcccgtgccgccggcattgccgaggctcgcaaggctcgcgaagaggctgctgccgctaaggccgccgaagagaaggatggtgagtgatactcatggctaagaacctgaagattaccctgcaccacggcatcgtgaaccgtaccccggctcagcgcgccaccgtcaagaccctcggcctcaacaagatcggtaagaccgttgtccgcgaggacaccccggccaaccgtggtctggtgaacgccgtgcgtcacctggtcaccgttgaggaggttgactgattatggcagataacgaaatcctgcagatgcacgacctgaagcccgccccgggcgccaagaaggaccgcacccgtgtgggccgcggtgaaggctccaagggtaagacctccggtcgtggcgccaagggccagacgaagcgtaaccacgtgcgtccgggctttgaaggcggccagctgccgctgtacatgcgcctgccgaagcttcgtggcttcaagaacccgttcaaggtcgagttccaggtcatcaacatcgctcgtctcgtggagctcttccccgagggtggcgaggttgctgtggccgacctgatcgccaagggcgctgttcgtgacaacgctccggtgaaggttctgggcgacggcgagaccaccgtggctttcaccctcaagggtgttaaggcttcggcttccgccaagtccaagatcgaggccgccggcggttccgtttccgaggactgattagtcctacggggagcgcaataggctgtacaacccccgcccgccaataggtggacgggggttcccttttctcaaaaattgttgttctgagcgcagagaagcagtctcaacacaatgatcgttttgagtatgcttcccccgttcagtacgacggagcataattcaggtaacattcgcgagacatgaagtggccgaagtaggcactgtagactatgctcattcgttagtttgtgtatttcgcgtgattggcgcgctattgggaggaaatctaggtgaggacactaatccaggccctgaagaccaaagagttgaggaagaagattctcttcgtcctgttcatcatcatcgtctaccgcatcggttcgttcattccgacccctggcgtggactacaacgtggtgaacaagtgcatggccactgtcggcagcgcctcccaggagaacttcatcggactggtgaacctcttctccggtggcgctatgctccagctgtctatcttcgcgctgggcgtcatgccgtacatcaccgcgtccatcgtggtgcagctgctgcgcgtggtcatcccgcgcttcgaggccctgcataaggagggccagtccggagaggccaagctcacccagtacacgcgttacctgaccatcggcctggccgtgctgcagtccaccaccatcctggtcaccgcccgctccggtgccctgttcaactaccgctgcgaccaggtcatcccggacggctccgtgtggaacctcgtggtcatggtcctcatcatgaccggcggcaccggcctgatcatgtggatggccgagctcgtgaccgacaagggcatcggccagggcatgtccatcttgatcttcatgtccatctgctccggcttcctgccgcagctgtgggagatcggctacggcaccaacggcaagaacggcgactggaccaagttcggcatcgtcgtgggcgtgctcgtggtcatcctcatcttcgtcgacttcgtcgaactgtgccagcgccgcgtcccggtgcagtacacgcgccgcatgatcggccgtaagatgtacggcggctcctccacctacctgccgctgaagatcaacatgtccggcgtcatcccgccgatcttcgcctcctcgatcctcgccatcccgaccctgatcgcccagttcggcaagtccgaccagtcctgggtcaagtggatcaacgccaacctggcgaacaccacatccgtgtggtacatcgccctgtacgcgctgatgatcgtgttcttctgcttcttctacacctcgatcacgttcaacccggacgagaccgcggacaacatgaagcagtacggcggcttcattcccggcatccgcgccggcaacgccaccagccgttacctgacctacgtgatgaaccgactcaacaccgtgggtgccgtctacctgctgttcgtggccctgatcccgaccgtgctgatcatggctctcggactcaacgccaagctgccgttcggtggcaccacgatcctgattatcgcgggcgtgggcctcgacaccctgcgtcaggccaaggcccagaccgaacagttccagtacaccggcttcctgttcgaaaacgtggaccacaaagaaggctgacgcccgcttggcagcggtcgcccgcaatgggcaggcggccgcgcgaggagtggaacagtccagtggactgttccacgacggagcaatctttcttccacatataactcaatggctcccctaaccaagggagccaaaaccgtattaataaccgacacaaaaggagaccaccatgcgtctgctcatcatgggcccccagggcgtgggcaagggcacccaggctgctctgctcgccgagcacttcaacatccccaccatctccaccggcgacatcttccgctacaacatcaagaacaagaccgaactcggtcttgaggcgatgagctacaccgacaagggcgagctggttcctgactccctgaccaacaagatcgtcaaggatcgtctggccaaggaagactgcaataacggctggatcctcgatggctacccgcgtaacgccgcccaggtcaccgctctcgacgagatgctcgccgacctcgacactccgctcgaccacgtggtggccctcgaagccgcccgtgacgtgctgctggagcgtatgaagaagcgcgccgccgagcagggccgcgctgacgacactccggaggccatcgccaagcgcctggagacctacgagaaggaaaccgctccgctgctcgacatctacgaatcccgtggcctgctcgtcgtggtcaacggcgtcggcgacatcgacgagatcagcggccgtatcatcagccacctcgagtagtaggttcggcagcccggccaacaagccggagtgatgccgaaataccacatcaacgtttccatacccctgtgcgacacgccgagtgttcgtacaggggtatgtgcgtatatagttgacagttggtgtgtcttcggatatgccatagtaatcatccaacggaataggactagaggcacatggcaaaagacggtgtgattgaagtcgaaggacaggtagtggaagcactgcctaacgcgatgttccgcgttgaactcgagaacaagcacatcgtgctcgccacgatttccggcaaaatgcgtaagaactacattcgtattctgccgcaggatcgtgtcgtgctcgaaatgagcccttacgacctgaaccgcggacgcattacgtaccgttacaagtaaaggtacacaagaaaaggataaccatgaaggtcagccctagcgtgaagaggatctgcgaaaactgccgcgtgatccgccgtcacggccgcgtcatggtgatctgcgtcaac

SEQ ID NO: 3320 - DNA, 2606 bp, Unknown
  R151_18m  MAG No. k141_10368
caatctggtgaaccgaaccccttcagcgaggaatgccgtctatcgcgaggtcgccgccatgcagcgcaaagcgtggagcgcatctgccgggcagatctactggagctaccaactgcgcggcaatcgcgctttcctgcccactatcgacccgcaatccgacacgtcacggctcgacccatgggacctcacccacatttggcacgccggttggatggactgggggactcagggtatgtttgacggcgctaagttgccaagctctggcaagatggcgacactgacggaatctctgcggcgccaaactgccagttcttggcaggttgacgccgcagagtgacgtctgtgcggtgctattctgccaaggagtggcagtttggcgccgttgaatggcggttttgtggcgctagcctgccaaacactggcagcttggtgcgattatttgtactgagtgaggccaaactgccagcgcttggcaagttagcgccgctcgggacaacggcagtctcggctacagccacatttacgcgatggatatgaatcgcaactgtaacgctcagcgatacccgtcccacaggggcaggggcatcagaacatcctcacagtcggcccacatggcattgaggtcttgtcctggggcgcgcagccagcgcagctggaggccgtccatcatcgagaacccggcctgcagcacatgctcgacattgacgccttccggcacggcccagttgatattgagtgccatggtcaccgtgcggcgctcacggtcggcgaaataatcgtgcgcggggtgggtcgggtcaagtgcctcggcgctcagtgtggagaacatgtgcaccagtgcgggcctcttgttgttcaccgtcaccacctgacgccacatatccgcgataagcgggcgctcttgggcgaccatcgcggcattgatcgattcggtgacccggtcgtattcctcggtcagagccagatcgagcagtccctccttgctgcccacgtaatgcagcacgccggccttggtgagccccacttcggtggcgatgcgttgcagtgacgtgccgtaatagccgagcttgccgaacgattcgacggcggcgtcgagaatcgtggtacgacgatcggtatcggtaggggagggggcgttcatgcaggcaaccttacggtcggttagtagtggttccaaatgatttcggcgtgttgtgacacagattttgataatctacctaccaaccggttggtcgagaaaaagcgacgactgaggttcgtggaggaacctcagccaacgttccaaaccaacagcaaccctactgggccggaaacgacacacaacgacgaacgcaacacgacaacgaaacaacgcaacaacaaccgcacaacctaaggaaagaggcaacatgagcgagtccacctacccgtccgtcaaggatctgaccctggaagagaaggcatccctcacctccggcggcgacgcctggcatctgcagggcgtggagtccaaaggcatcccaggctacatgatcactgacggtcctcacggtctgaggaagtccctggcctccagcaccggcgagaccgaccttgacgactcagtgcccgccacttgtttcccgccagctgccggtctgtccagctcctggaacccggacctcatccacaaggtcggcgaggcgatggctgaggagtgcattcaggagaaggtggccgtgattcttggccccggcgtcaatatcaagcgcaacccgctcggtggccgctgcttcgaatactggtccgaagacccgtacttggctggtcatgaagcagtcggcatcgtggaaggtgtgcagtccaagggcgtgggcacgtcgctcaagcacttcgccgccaacaatcaggaaaccgaccgtctgcgcgtcgatgcgcgcatcagccagcgtgccttgcgcgaaatttacttcccggccttcgagtacatcgtcaagaaagctcagccgtggaccatcatgtgctcctacaaccgcatcaacggcgtgcattccgcacagaaccactggctgctgaccaacgtgctgcgcgacgaatggggcttcgagggcatcgtcatgtccgattggggcgccgatcatgaccgtggggcctccctgaatgcaggcctgaatctggagatgccgccgagctacaccgacgaccaaattgtctacgccgtccgcgacggccgaatcacccccgcccagctcgatcgtatggctcagggcatgattgacttggtaaacaagacccgcgctgcaatgagcatcgataattaccgtttcgatgtggacgtccacgatgaagtcgcccatcaggccgctattgaatccattgtgatgctcaagaacgatgatgcgattctgccgctgaacgccggtccagtcgccaatccgtccgccacgccccagaagatcgccgttatcggcgaattcgcccgcaccccgcgctaccagggcggcggatcctcccacatcacccccaccaagatgaccagcttcctcgacacgctcgccgagcgcggcatcaaggccgacttcgcccccggcttcacgctcgatatggaaccggccgacccggccctcgaatccgaagccgtggaaacc

SEQ ID NO: 3321 - DNA, 22642 bp, Unknown
  R151_18m  MAG No. k141_10996
caggttgcatccggcgccgatcacgccgtcggcctcccaatggccgaaaccgctgcggtcgccggcctccggcggacgctcggagatgggaacccgtccgggaatcgggaaacgcgacgtcctcctgccgccacgcctgcgacgcctcctgtggccgcatggaaggcagcgcgcccagcgttcacggcgatggcggtcggcgcagatccaacggtagacggtctccgggcacacgcgcatggcggagtcgtcggggaacaggacgcgcagcctgccgctgacgggcagcggcgaccagccgcgacccagccattcggccacctgcgcccacaggcgttcgcatgacaggcggtagcgcttgcgcggttcggcgcgcctgcggtcggccttgcgccgcggcggggccggcgatgtagtatccgcccgtccatgggcccgtcttcagccgtttcggccggtacggccgtcaggactcgttctcgttggacgggaaccacgtgtcgcgttcgatctccctgccgaccgtcgaggcgttgcggccgagcatcagaccgatcctgcggatgctggtgccgttgccgatctcgatccggatgacctggcgttcctcttccgacaggtgcgaatatacttctcccataggtgcaacatcccttcggactggttatccggacaatctccaatctaacgggtgttgcactttcaattagacaacggggcgcctgacatttcaccaagggcggcttataatggtggaatcagcatatagagattagggttacaggagggtgattgtggaaaacaaaggttggagaattttccaaatcattcaattcatattgttcttatgcattagtgtattcctttttataagaacagtggacgggcatggaactgtacagacactaggagtaaagctgattagtttttccgtatgggcgcttttctaccttggtatcttagccatagagtggttgatttactgtattgtccgacatgctaaaaaataaattgatatacgaatttgctgaactaatagaattcctttagtctctaaggggataacgaccgaattcttgcgcatttttggattccggccttgatggaaaaggacatgggccgtgccgggtacgattttcagtcgccagacaatgaaaaaccgcgattggaaagaggcacggagccatgtccaaggaaatcatacagttcgaccaggccatgttcgagagcaagctcgacgccatggtgcgcgagaaggtcgagcggatcgtcaacgcgatgcccgacgcttcaggcgaacgagatcgccaacgccgcgagatacgagcgttccggctgatggtggccgaccggtgggtgggaatcagttgagattattcttgggtgcctgtaggtgcctcgtggaaaacgagcgtaaccggcaggtttcccaaaaatcgaaaaccttggaacaaagccaaaaacagttggctaggattatcatgcgaggtgcgcatgataatggtagccatggctccaagtgtctcatgggcttgagaccggcgatggtgcgattgcgggaatggcgcggagagccgtggactggccgcggccgatagccgggaagccgagccgcagcgtgaagcgtcatacgagttgtctcgcgatggccaacgcgccggcaacgaccatgagcgccgagaagacacgcagaagagtccttttgcgttctcttcccggtttttggatccaatcacgacgtatatcaggaccaatccgacggccagcggcaccaaggccagcggaaacagcggtttttccatggcatctcatctcgaatgctgtggttcagatttttcgatgttcggtttttctgcgcttactgacaagagccatggagcagcatgccgatacgcacagattcactatgcaggtcgccgccggcagtagccgtatgaacggctgactgtagaaatcgaggacatctggatccatagatcctgagtatatttcaaaaaccggatatgatgcgagagccggcgccgaactcacgaggaacagtatccaaatgacgggcaatctcaggatggatactgttcggcctttccgatggacttctttcgagaacatgaaaagagcccaagaggtcactgcgattaatgcacccgcgcaatacaacagaccagagaactcgctacgcatgattccgtcctcacttcagtcgcaggtaatttggcttatcgatcttctggctggttcgagattaccatacctgacatggcagtcgaattgcccgttgtctattggcagagcatccgactgttaatcggacggtcgctggttcaagcccagccgcaggagccagacaaaaacccggaacttcggttccgggtttttgttacccgccccccccgaaactcctttatcaaggaatcatccataagggatgccgcagcagacggtctccaaggcactacaccgtgctcatccccatggacgacggcaactggcacgtcaccgtgtactgtcccgcctcgctggacggcccactgctcgacaaggattccaacgaattcgacacggacgacgtgaaacccgacgacaagtcgtacacagttgccaatccattccacctggatcacgcacccggaacagacggtttcatcttcggccctgacaccctccgatgatagcgatggactaaccattcaaccgcacgcgtaggaggagcgcattccaaccatgaatgaatgacatatagacgtcaagggcttgcggacatcgtgtccgcaagcccttgacgtctcaatccaacgaaatatcgacttttacccgtttgtcggattcaggctttcgcgcaagtccggcgatgaggagggccaccagcagggggatcgtcgtcagtgtaccccaggaaatcgagaacgtgtcggcgatgtagccgcacagcggggtgacgaccgcggtgaaggccatcaatacgagcgatcccacggagaacgcggtcgcgcggatcgaatcgtcaatgctctcgtgcaagctgctggagatcgtgttcgccacgtacatctgcgcgcaggagaacacgaagaacgccaggatcctcaccgccggcatcggcgtggccgcaagcaccaccgccgacacgatgagcacgaggatcgcaatgtcgccggaacgtggatgcagccgcagcatacccagacgactgccgacgatctgcgcgatattagtgaacactaggccggcgaactgccaccagaccccggtctggtggcccatcagcagcagctgccagaacgtcagcaccgacaacgtacccagattgaacaccaccatattccatatctccggcttccgcagcagcacggccgcggccgcgacggtctgcctgacatgatccaacaccgtcagcgaggtcccggactcgcccggctcggcggatccatcggattcgacggacgcctcggcctgccgttccgtcgtcccgctcccatccgtcgctgcggccttggtgcgcgacccggccctcatcagaccgagaagcgggatgatcgccaatacgtagaacaccgtcgcgcccagccagatcagctgggagtcaagcaggaacagcacggcaccgaccgcaccgccgcatatcgtgcacacagcgatcatcgccgacagtcttgacaccaaggtcttcatacccagcgagggatcgtgcttgcgggcgtattcgatgtacagcgaggacgccgcgccgctttcgaccgcggccccgatgccggccagcacgttggccaggcacagcacggcgaagttcgcggaccagaacagcatcaatatgaatcccgcgacgcggcacaacacgccgatgatcagcgtccgttcccgggaccaccggtcgaacagcacggacgtgggcagctcgctggccgattcgctgacgtcgaacaccacattgacgatggagatcagcagcaccgacaggcccacatcatgataggccaccatatagtagaccgaaaaacatccggtaccaagataaataagcgcattatacaaacaggcaaaccgaaccatcaatcattcccttacataaacaaagaaccggtatacgtgggactgtctctcgaagtgtgtaactggccttaactggccggtcgtgtggccggtcggaaaggctggtggacgatgtgtgctgggacaatgggaaacatgacaccgacgaagaagccggacgcggaaaaacgcaacgccgagcgggaggcagcgctcacattcgtgcgcatggccaaggaaaaaggactggacctgacagggcccgacggactgctcaaacagttcaccaaaagcgtgctggagacggccctggacgaggagatgaccgagcacctgggccgcgccaagcacaagaaatccaaggacggcagggccgcgaacacgcgcaacggcaccaccgccaagaccgtggtcaccgattcggtaggtccggtcgggatcgaggtgccgcgagaccgcgatggctcgttcgagccggtcgtcgtcaggaaacggcagcggcggctgcccggggtgggcgaggtggtgctgtccctgtatgccaggggcctgaccaccggcgagatcagcgcccacttccaggagatctacggggcggacgtgtccagggagaccgtcagtcgcatcaccgagcgggtcgtggccgagaaggacgaatggtgctcgcgttccctggatcgtgtgtacgcggccgtgttcatcgacgcgaccgtcgtcaaggtgcgcgacgggcaggtcgccaaccgcgcgttctacgtggccgttggcgtggatctggagggcgaccgcgacgtgctgggcatctggacgtcgcccgccgcggagggcgcgcgctattggctgtcggtgctcaccgagctgaagaaccggggcgtggacgatgtgttcttcctgatctgcgacgggctcaaaggcctgcccgacgcggtgggcgcggtatggcctctggccatcgtgcagacctgcgtggtgcatctgctgcgcaacacgttccgccacgcgtcgaagaaggactgggacgccatcaaacgcgatgtcaaacccatctacaccgcggcggcggcccgcgacgcgatgctggacaagtgggaggcgagatatcccgcgatccgcaggctgtggatggacgcgtgggaacggttcataccgttcctggactatgacgtggagatccggcgcgtgatctgcacgaccaacgccatcgaatcgctcaacgcgagattcaagcgctccattcgcgcccgcggccacttccccgacgagcaggccgcgctcaagtgcatgtacctgaccgtccgctcgctggaccccaccggcaagggacggatacgatggagcgcgcgccggaagcccgcgctcaacgcctttgccatcaccttcgccgaccgccggccaagcgagggaacacaacaatgaaaacgccagttacacacttaacgagacaggcccgcgtctgggccggtggccggcgatccgctggtgccgctggtgccggtactggttgaagtcgatcccgatggatctttttgcgtcgagccggtgccggtgccgttcgaaccggtctggctgccgccgacgccttggctggtcgggtcttcggtggtcggattctttgaggtgccggtgccgttcgaaccgttggcggtgccgtcggttttcgaatccgaggcgccggcgccggtcgaacccgaggtgccgttggcgtcgaggtcggtggagggggcgtcggttttcgaatccttgctggttcccttcgaatcatcgccggtgcccgtctggggcagagcgttgttctgatcgggggtgcccgttcgcgtgccggtgtcgttgcgcgcgggcgtggtcgtggtgggggatacgagattgtccgtgccgcgtccctgcgtggccagcatcacgacgccggccgtcaccgccacggcgagcaggccggacaccaaggtgacgatcatggcggtgtgcttcgaagcgcggaagcgggacttgcgcagctcatcgaccgagtacgtcctgccgttcgcccggctgaacacgatttcacgcggtctgcgtgtggaggaagcatcatcggcggtcacgcccgtcgccgtatcgggctcgtcccgaacgtcggtccggctgccggccgttcggggggtgccgccatcggcatcgccgttctcggcgtccttcgtgatcccgttgccggaggacgaggccgattggagtttttcgccggaggcggtgagcacgttctggtagatcttggtggccacggcggagacgacgtaactggccgccgctccgatcaccgaaccgccgatgccgatcttcgatgcgagcaggaacgaggtgacggcggcaagggtgcccgccacgatggatgagagggagattccttcaaaaaacttcttcacaatgcacgaccgtagggtgtcgggctgacaggttgcctgagactcgatggaagcggggcgaggcctacacgagaccttcaaaatcggccttcgtacaggtcggacacgccctgcggcgcacacacgtgcgtttcgcgtcgccgcaggccgcgggacatcgtcaattacgatgcagcgactgcccggtcggtctgatcaccgacatcagtacggcggcgaaaatcaaagcgaaacccaccagtgagctccacatgatcctctcgccccagaacaaagcggaaaacgtgacggcgaacagactttccgtacacatgatgattgacgcctgcgaggcaggcacgtgagccagaccgatgttctgcatgatctgggcactcatcgtggcgccgaggaacagatagagcacgctggccactactgagggtgccagccagctggcgttcggcatgggttcggtgaacaacgcgccgatgatgaacaatacgccggcaacgccgaactgcacaaaagtgacggcgatagggtcgaagcgtttggtgtagacaccaaggcaggtcagattgaacgagaagatgacggcggttgcgatggtcagccagtcgccggcgcccagcgacaacgaaccgcccggcttcaacgagacgaagccgacgccgatcagacagatcacgccggcgaccagattgatggccttcgggcgggttttcgaaatgatccacgtggcgaacggggtgagtacgcagtaggcggccgtcaggaacgcgctgcggcccggttcaatggtctgcaggccgatggtctgggtgaccatcgtgccccagtaggtcagacccaccacgagcgccggcacaatgatcttcggcgtcagatacggcacgatgtgcttatggaacaaggccagcatgcacaggcaggcgcctatcatgcgcagacccatcagccattggggcggaatcgcctccatggcgaatttggcgagcagataactgccaccccataatgcggcgcagcccagcaacatgagtcgggcgagattcgggggaaagctgcgggaccagcggctgcgcagcttgctgaaacgttcgaccaaacccatggtgcacctcaggacagttaggaaaacttgtggctctctcggctcacagattacgggaactaccggccaaaatcgaccggtcgatgggcgtcgggtgtgtgacaggtgtgtggctggtgcgcggccggggcgcggcatcgccaagcaggtaagaaccggatgaaagctgtgcgaaggtgaggttactcacagcgaacatccgggctagtcgcgttcgaaaccggtactctggaaagagtaaaaatacgttgtccatagcaatcatgaaaggattcgacatggcagtcattactccggaaatcaaggaattcatcaagaacaacctcggttggatcaccaccgtctccaaggacggcgaactggacctcggcccgaagatgtccctgttcgtgctggacgacacgcacatcgcctaccacgagcgcaccgccggccagcactacgagaacctcaagaacggctctccgctggtcatcgccttcgccaacctcgagaagaagcagggctaccgcttccgcggcaacgtggtgctgcacgttgacgacgacatctacaacgagcaggtcaagatcgccgaggaaaagggcaccaagaagccggccgtgattccggttctcgaagtcaccgaaatccagaaccttgcctccggtccgaccgccggcaagaccatcgccaaggactgattagctgacgtattggtggcttcctcgtcagagggagccactttttcgctttttagtgcgcagtactaggtgacggccttgggcgtcggttgtggcgaagaggtaggtgttgccgccgtccttgagtttgagttttttgcgtagctgggccacggttagggggaaattgcgtacggagatgttggcgtgcgtgagaccggccaatagctgcttcagttctctcttgttcatggtggcgatggattcgatgacgaatgatctgcctggaaaatcggaaataggttcggccgccacgaacaggtggctattcgggctgatgtgatgcacggcgaagcgctgttcgagaacagtaaagcacccggccttcatgattgaggcgttgggttcgtaaaggtacttccaatgcgaggaatcgaagccgttcgcgctttcctcagccgggagatcctcggtattacaggtattgcatgcaactaaggcagaatcgctgataggggtttgattgtcgctgttatcgccggccttgtacgacagcacctgcccgtcattgacgcataccacgagcggtgaggcgcaacggccgcgccccaacaccagcaacaattccttgcattcattaccggtggagacgatatgcacctcgtgcaccgcgccggcgaaatccgtaatggtcttatgccagtcgagcatgggggagagcttgaccatgaccgtcggtgccttggccagcagcgtatccttcagggtcagcacatccggcgtgcaatcggcaatcgcgtaggtacgcgagccatgatcgtcacggcgggccggatcgaggaagatcatggaggctcggccaagcgtatcaagcactgctgttgaatcatcattgatgatttcggcgtggccagggccgagtatcgggaaattatggcgagcgatatcacataaagtggattgttgttccacatatatggcacgattgaacattcgggacatgtaagaaaagtcgacgccgaaaccgccggtcagatcgactagggatgtcggggaatcgtcgtcgactgcttccttggccaacaatcgctgtgctaaccgggctttgtattgagccgtgaactggctggaacattgttccattgggacttgcggcgggaaaatcagcccatcatgggacgcccagtcaggtagcttgagtgaagcgcgctgccagccggcaatctgctccagcgcgaacggcacatccacgtcgccatcatgtttggcgtgcaaggccacatcacgcacatcttcacggcggtgtttggcgatgaacgcccaggtcgactcagaaatctccatgccgccattctaggggttgtgctgagatgagtatggcaaaccgcaagagaacgaggtggcgaaaaccgatgatcgatgaagtgatgatgctgcgtcatggccgtacgcaatacaatctcgaacatcgcttgcaaggccagatcgatgtgccgctcgacatcgtaggccaatggcaggtcgaccagaccggattcgcgctcgcttcacggtattactgggccaaggtgaaccgacttgccgagcatcccgaagccatcgcccagcccggtcctgacgccgccgaacgcactgatacgcgacagttcgaggaggctcccgccgccggccggcgcatggtggtgatgacctccgacctgttccgtgcccaacagaccgcacacgccttcgccgatattttgggattgccggtcacctgtgaccaacgactgcgtgaacgcagcttcggtgaatgggaaggcatgacccgcgccgaaatcaaagccgtggcagccgacgactacgcctcttggaaacagcacactgggggcgaaaccaagcatggtgtggaaagccgtgccgccgtgggccagcgaggtgccgatgccgtgcgcgcactggtcaccgactccgcctattcagacagcatgcccaccacgctgatgctcgtcacccatggctcatggattaccgccaccatctccaacctgctcgaactcgacccggacggcatgaacgcactcggcggcatgcgcaacgcctgctggtgccggctcaaagtgcgccacagcgtcaacggcacccccaccgaacagcccctgtgggagttggaggaatacaacaaggctcccgccatcgccgacagcgccgactgggagaacgggccgaccgatctgcgaggaccgcacatgccaagttggcagccaatcgtctggtgacggtcgctatgcgaaaccccgctcgcaaattcgaacggtgggtctagactaatctcggtttggaaccgtacagcgatagaacagtaggaaagcgcggaaggcgggtgaggcgacatgctgagaatcttcagctcaatcaatggccaagtggagcagatcgagaaaccggaaaacggctcctggttatgtttgagcgaacccactgatgtggagctcgccaccgtcgcatcacagaccggcatcgacctggccgacctgcgcgcccctttggatgacgaggaacgttcacgtgtggacgtcgaagacgattacacgatgatcatcgtcgacatccccaccgtggaggagcgtggcggacgcgactggtacgagaccatcccgctgtcgatcatcgtcaccgaaaacctcatcatcaccgtctgcatgcaggacacgcccgtgctccacccattcatggaaggcacgatccgaggcttcaacaccttcatgcgttcgcgcttcatcctgcagatcctgtaccgcaacgccacgatgtacctgcgttacctgcgcatcatcgaccgcgaaagcgacaagcttgaactgaagctgcgccactccatgcaaaaccgcgagatcgtgatgctcatggagctgagcaagaccttggtgtacttcaccacatcgctgaaatcgaacgagatcgtgatggagaaactcaccaccctgcagcgcatcaagcagtatccggacgatgaggatctgctcgacgacgtcatcaccgaaaacaagcaggccatcgagatggccaacatctacagcggcgttcttgcgaacatgaccgacgccttcgcctcgatcgtgtccaacaacctgaacaacgtgatgcgcatcttcaccatcatctccatcaccctgtccatcccgacgctgattttctcgatgtacggcatgaacttcgacggcggcatgatgggcatgccgttcaccgacaagccttggggcttcctgctcatcatcgtgatctccatggtgctttccggtgtggttgcctggttcctcacacgttcgcgcatgttcaagtaaggcgtttgacggttatgcaccactggtcatcgttcgtcagccgtagcatgctccgcgcccgccgcccgatgcggcgcggatttcgctcccggctgatggcaggattcgccgcggcctttggcgtgatattgccattatctggtctggccggttgcggccaaattcaagtcaccaccgtctccggagcgccggagggacccaccatcgccattggggtcgcagccgacgaaccatcggtgggagcatggcatgacggcacataccagggcttcgacatcaccatcgccaaatacgtggccgccaaactcggctatgcgaacaagcagatcgtcttcaagcaggttcgccccgaaaaccggcgctccatgctggacaatggacaggtcgacatggtcgtcgcctcttggcctatcaccgatgggtccagcgcgatcgttgattttgccggaccatacctcacgaccagcgtcggtttgctggtcaggtcggatgagcgtggccgattcaccaatgacgcaggttcggtgggcgacgtaggcgacggcacggtgtgcgcagtgaaaggtgacgagacagtcggcatcttccgcggcaaccacccgcaggctcggattcaggagcgtagcagttatgcgcagtgcgtcacggccgtgcaagtagggtcggcggatgccatagcctccgatatggcggtgctttccggtcttcaagcggccaacgggccccagtatatggacgtgattgcggacaagggcgaggtcagttatggcatcgccgtgagtcaaggcaccagccaattggcgcagaaaatcgcggaagcattggaagacatggttgaggatggcagctggacggccgccaaggatacgttcacaagccaaacaaagctcatggtttcgctgaacggtgaccccaaagccatcgtctcggatgctgaataacgattgacgacgtgtccagttgcgaggctaccttgctgatttatgagtgacaacgagaagagcacgcaaaccgaagagcccaacttccgctacaacgccgcactggcgcaggacatcgaaaacaagtggcagaagatctgggatgagcaaggcaccttctgggcggccaacgtcaacggcgatttgaaggacggcaagggccgcaacgccgaggggcgcaccgcctacttcgccatggacatgttcccgtacccctccggcaagggtctgcatgtgggccacccgctgggctacctggcctccgacgtggtgagccgctaccaccgcatgaagggcgagaacgtcctgcacgccatgggctatgacgccttcggcctgcctgcggaacagtacgcagtccagaccggccagcatcctcgcgtgaccaccgaggcgaacatcgccaacatgagccgccagctgcaccgcatgggcctgagcttcgacaaacgccgcacgttcgccaccatcgaccctggctacgtgcgttggacccaatggatcttctcgcgcatctacgattcctggtacgacgaggacgccaccaacccgtccggctccaagggctccgcacgcccgatcgccgagctcgtggccaagttcgaatccggcgaaaaggccattccgggccacgagtccgatggcaagcagtggtccgacctcactgacgccgagcagcaggatatcttgaacgacttccgcctggcctacatctccaagtccccggtcaactggtgcccgggtctgggcaccgtgctggccaacgaggaggtcaccgccgaaggcaagtccgagcgtggcaacttcccggtcttccagcgtgagctacgccagtggtccatgcgcatcaccaagtacggccaccgtctgatcgccgaccttgacggcatcaactggcctgagaaggtcaagctcatgcagcgcaactggatcggtgaatcccatggtgcctccgtgcacttcaccgtggccactgccgacggtgacaaggacatggaaatctacaccacccgtcccgacacgctgttcggcaccacgttcgccgttgtttccccggaacatcacctgctggagaacgtgcccgccgaatggccggccgatgtacccgaagactggaagggcggctatgccaacccggtcgaggcggtgaaggcctacaggctcgccgccgaagccaagaccgccaaggaccgcgtggacgaaggcggtgagaagacaggtctgttcaccggcctgtacgccaccaacccgatcaccggcgcgaagctcccgctgttcaccgccgactacgtgctgatggactacggcaccggcgccatcatggccgtgcctggtggcgaccagcgcgattacgactttgccgtgaagttcggtctgccggtcatctacaccgttgaaccgctgccggaatccggcgatgacttggccaactacgagggcaaggcgccgttcgtctcccatgacggcatcgtgatcaactcccacgtcgaatccacgtacgctaagggcgacgcgctgtcgctcgacggcttgcgcgtggacgacgccatcgccaaggtcaacgcctggctcgaatccgccggcgtgggcaagggcaccgtaagctaccgtctgcgcgactggctgttctcccgccagcgctactggggcgagcccttcccgatcgtgtacggcgaagacggcactccgcacctgctgccggattccgcattgccaatcaacctgcccgacgtgcccgactacgagccgcgcaccttcgatccgatggacgccgagtccaatcccgaggcaccgttgagccgcaacgaggactgggtcaaggtcgagctcgacttgggcgacggcaagaagacctactaccgcgacaccaacaccatgccgaactgggccggctcctgctggtactacatgcgttacatcgacccgaccgacaccaagcacatggtggagaaggacgagttcgactactggatgggcccgaaccacaacaagtactcgggtgatgaaggcggtgtggacctgtacatcggcggcgtcgaacacgctgtgctccacctgctctactcccgtttctggcacaaggtgctcttcgatctgggctatgtggattcggccgagccgttccacaagctgttcaaccagggcatgatccaggcttacgcttataccgacgaccgcggccagtacgtgccggcggacgaggtcgtggaagggccggccgacgcctccggcgagccgacgttcacctggaacggcgaacatgccaatcgcgagttcggcaagatgggcaagtccctcaagaacatcgtgaccccggactacatgtacgaaaactatggcgccgacaccttccgcctgtatgagatgagcatggggccgctggacgaatcccgcccgtggaacacccgcaacgtggtcggcggcatgcgcttcctgcagcgcctgtggcgcaacgtggtggacgagaccaccggcgaggcccacgtgaccgaggacgcgcccgatgagaagaccctgaaactgctcaacaacacgatcgccgaagtgaccgcggagatggagggcatgcgtccgaacaccgccatcgccaagctcatcgtgctcaacaaccacctgaccggcctgaaggccgtgccgcgtgccgcggtggaaccgctgatcctgatgctcgccccgatcgccccgcacatctgcgaggagatgtggagcaagctgggccaccccgagtccctgtccgccgagccgtggccggtggccgacgaacgctacgtgggccacgacaccgtgaccgccgtggtgcagatcaagggcaaggtgcgcgccaagctcgaagtgccggtcgacatcgacccggccgacctcgaacggcaggcgctggccgccgtcgccgaccgtcttggcggcaaagagccgcgcaaggtgatcgtcaaggcccccaagatcgtctccatcgtccctgcggagtgacttgttgtgggttaggctcccctctttgaggggagccgctcgcgtagcgagactgaggggagcgtcaaccgccccacctcaattgtggataacttcataagctagaaccacataccccgtttcagctggacaaacgcccatgaatccatcagcgtggatgcatgggcgtttctcataaccatcgcgcagaccatgccgccaaccgtttgcgcgcattcagcaggcagagcgaagccatgccccaaccgcgagtggaacggcccacgacgcctccgccgcctcccggccatgcacggattcgtccggccggccacccgccccaaagggagcagagcggcctgcggcaggcgacccgtgacaaacgtgcgttatcggatctgatcggcgtacgttccgccgatgccgtcggagaatcagccagactcacccgggatcagccgcgattgtcgttcaccattgggcatgccttggccgtgatattgctgctgatcgtcgcccttggcatcagcttggcattgctggtccagcagtcgatgaatatggccatgctgtctcaaccgaccgccatgcagaccacgggcggctccgctggagatcagacgatgccatcgcagaacaccacggatgagaaacgcacggatccgcagcagtcggagcattccgatgccacagcgaaccccgaatcggataccacgcaatctccgcacatgcagacggacggcagcgatgccggcgcttccacgcatggtctcatcaacctcaacacggccaccgctgaggaattgcaatccatcaaaggtattgggccggttaccgctcagcggatcatcgatcatcgcacggcgattggcgggtatgcatcagtcgatcagctgctggatgtcaaaggcatcggctccaagacgctggagaccatgcgagggcaggtgacggtcggatgagcagggatcggatactgcgcgagcaggggagccgcgattggaggatgctgccgatcgccatagtgatgtgggcggcgagcctgggagcgcacgcattattcgcatggaggatgtctgatggactcggcaccggtcaggtaaaagccgatgccggagctggcattgacgtcaccataatcggcatggaatggcctgtcacgcgaatattgcctataacagtggcgtcatgtgccgctgtggcggcgacgatcgtggtgtctttccgcctgcggatcaggtggacgggaacattgaccgtatgcgtcgcggtggcgtgcatcggcagtatgacggcaatcgcgtcggacaccattgcctggcatgatcctgcctccgcacaagctcgccaatccagttcataccacgaagtcatggccacggtgacgacgcccgtgatcgcttcggaccaacgcacatacgattgtcagacggacatacggctgagcggcatcactgtggatggcgcggacgtacgttccacggtcgccgtgcgcgtatacgccgatgaatcgtattgtgggcagttgcgtcgaggcgcggtctatctgttgacgggcgtattgcagcaagcgcgatatggacgcataccgctatggctgctcttggaaggaaaacagccggtagcgcaggtgcgggctccgccgtggcatctcgccgcgatcgcacatatgcaggaggcgtttttcaccgtgaccggacaattgtccgatcaggggcgtgtgttggtgccgggattgacgatgggtgtgcttggccaggattatatcggcggcgatgccggtccgatgccggtcaacagcacgtatgcgcaaacgttggaaaatcagttccgccggtccggcatcatgcacctcatggccgtatccggcggccacttcgtactggtggcaggactgatgcgtcggttatgcatgtggatgctgcttgatcggcggctgacggcgttgctggtctctggagtatatgcgctgctggcattggcgatgttccccagtgattcggtcacccgcgcgttcatcatgggattgataggtgcgttggcgtatgcgatgggacggcgtacgcaagcgttgagcgccctgtgctggacgataatcggtgtattggtggtgaacccggatatgtcggccagctacggattcgccttgtcttcggccgccgtactgggtatcgtgctgtttgcggggcggctggccggtgtctttgagcgagcgatgccgcacagcatcgccgaaatgatggcgatgaccgtggccgcgcaattgttcaccctgccgattcaggtgttgatggaaccggaattgccgttgctgtccgtgccggcgaacctgctggtgtcaccgttcgtgggattggccacgatggcgggattgatggcactgacgtgcgcatggtgcacgccatggctggccggcgtattcgcgtggatatcgtcatggggcacgctggtgatggaacgggtggcgttgtggctgggcggcagcacgatggccgtcatcccatggaaagacggcgttacgggcgccgtgctgattgtggcggcggaaatcggtatcggcatgctactggtgttcgtcagccgttgcctccagcatgtccgtcgttatgaggccggaatgtctggcgtgcgcttcggttccgcttggcgcgtccgcctcagtctctggggtgaggagacgagacgcctctttacgcggcggcaagccgaatagccaatgcggtattcggtgcagcaaccatcgcaatcccagccgaataccactatcttgacggcaccggcaaaatcgtgatgccggcaggtcattgtccaacctgtgtggcgagatgggggcatgacgaaaacagcagcgaatgcaccggtaaccgtggtgcccggaggcgactcgtatttgaacgacgcacgcaccaaggcactgtgcgcgcaggcgttgaaggcgcggcccgacgccgacctcatcgaactcgacgccgcatcggccgaccagtatgccttcgatgaagccgtcagcccatcgttgctttccgacgttgccgtggtcaaactcgtcaacctgcagaatgccgacgacaagctcgccgaagctctggtggcgtacaccaagcaggccgccaaggatccgaacggctccagcgtggtgatctgccagcacgagggcggcgtcaaagggcgcaaaatcatcgaccaactggtgaaagccggcgctcgcaaagaggacgtgccggatttgaagaaaccggatgcacagctcaatttcgtgctcggagaattcgagaaacgtggtcgtagagtcgaaccgatggccgcacagcagctggtatccgtactcggcggcaaaaccggcgaactcgccgccatgtgcgagcaactgtgtttcgactttgacgataatccgatgggcctcgaccgtgtcaaccagtatttgaccgccaatccgcaggtcaccggttttgccgtggcagacaaggccgtggaaggcaaaaccgcagaagccatcgtcatgatgcgtgcagctgtggaacaagggaccgatcccatcgcgctgatcggcgcgttggccatgaagctccgtaccattgccaaagcctcggcggtacgggccggcacgatttcccaggccgaagcgaaaaccaatccgtgggtgctgaagaatgcgatgcgccaacttggcggctggacttcggcaggactcgcgcattgcatccgtatgctcgcctgggcggatgagcaaagcaaaacaaacggtggcgacccggtatatgcgctggaacgctgcattgaagacatcagtcataaaggtcggtaaaagtcgataaaggggtatttatgagcgaacacactattgcggctcccaccagcgaggccatgcaggagctcggccgtcgtgtggccggaatggtacacggcggcgatgtattgctgctctcaggccctcttggtgccggcaaaaccacattcgcccagggcttcggggcggggctgggcattaccgaacccatcgtgtctcctacattcaccattgcccgcgaactcgacgggcatttcgccgacggcactccgtctcatctggtgcatgtggatgcctaccgtctgggcggctcagcctatgcgccggggcaggacgccatcgggcgtttgttggacgagttggaatcgctgggattggacgaagaacttgaagaccccggcgagaacacggtggtgcttatggagtggggcgaacaaatggccaccgccttggcgccagaacgacttgaaatccatatcgatcgacctctcgattcctccgatgccgcatccgctggatcagacggcgaactcaccagcaacggcactcgtaccgtcgcattcgtcccagtcggcaagcgatgggccgcgttcgatctgcagtaagccatgcgcctatagactcctcgatgtacactctctagaggctttacgactaggaggattcatgggttgcacgttggtgattgacacctcattcggctcgacggtcggcattgtggggcgcgatcccattgtagagaccgattcgcgcacccatgtggagaaactgcaggtcaatatcgcgcgcgcggtcgaggaggccgggttcccagcatctgacattgcaacagtcattgtgggtaccggtccagccccctttactggtctgcgtgccggtatcgttacggccaaggcactggctttcgcaacgggagcgacgcttatcggccataatgttcttgagtctcaggtgcaatggaatctcattcgccgtggcaaagccggcactctcggcgatactcataaatgccatgtgctcactcttgccgtaaacgacgcacgccgcaaacaactctattttgcgttgtactcggacccgctcgttggcgatcccgatggcgaaaccgtggcgacggctctgattgacatggatatcgattaccctgcatccatcgcgcagcgcgtgaatgatgccgttcatacgtaccgcgacggacttaggccagaagacagcaatgtggatgtggtcgtggatgttgtgggtcatggggcccgcaaatatgcggatgcgctgggtacaatcgagcagcttggcgacatcaccgatgaatccgtattggaccaaggggagcaaggtctcgctatctttgccactgatgcggaactggttgccaaccgtaatcacgatacgccggtcgaaccgttgtacctgcgccggccggacgccgaagtgccgaacccgctgaagcacgtgctcggccatgccggtgccgataaggcgtgagacgggttgattcgatgattgttgacatcactgccgtaagtcgtgatcttgcggtttgctccatcgcacagttggaaggcgaactgttcggcctcggcgcatggaatgcgaacatggtgcgagaggaactggacgcaccggcccgcacgtatctgctggatgtgctgggagaggtggaacaggcggttgtccgcggctacgccggcttctggtatgacggcgaggacgccgagctcatgaccatcggcgtgggcaaggcataccagcggcaaggcatcgccgctgcgttgcttcaggcactggtcgacgaggcgaagcgtcagggcgcctcgcgcatgctgctcgaagtgcgtgtggataacgaccctgcgctggccctgtatcaccggttcggattcgaacgcattggattgcgcaaacgctactaccagcctgaaggcatcgacgcatacaccatgagcttggacctgaaacctagggtcgtgggctttgccgccccgcagacggcatcggcggacactgaagacatcactggcaagcaaacggagaagaacggagaagcacgatgagcgaaccggttgtactgggcattgaatccacctgcgacgaaaccgcggctgccatcgtacgcggccgcgaactgctctccaacgtcgtggcctcatccatggaggaacacgcgcgatacggcggcgtgatccccgaaatcgcctcccgtgcgcacgctgaggccttcgtgccatgcgtgtccaaggcgctcgccgacgcgaacatgacgttggcggatgtggacgccatcgccgtgtccgccggtcctggactggccggttgcctggccgtgggcgtgtccggcgccaaggcgctggcctgggctgcgaacaagccgatttacggcatcaaccatgtgatcgggcacatcgccgtcactcagctgcagttcggcccgttccccaaggacacgctggctctgattgtctccggcggccacacctcgctgctgcatgtggaggacatgccgcgcaagatcgatgtggtgggcaccacgctggatgacgcggcgggggagtgcttcgacaaagtcgcccgtctgctcggcttcccgtatccgggcggcccgcacatcgaccgccacggacagaacggcgacccgcacgccatcaaggtgccgatgggtctgacccaaggcaaggccggtgccgcgcacccgtatgatttcagtttctccggtgtcaagaccgccgtggcccgttgggtggaaagcgagcaggccgccggccatgagattccggtggacgacgtgtgcgcatccctggccgactccgtggccaccgtgctagcccgtaaggccatgcgcggctgccggcagtacgattccaacacgctgatcgtgggcggcggcttctccgccaactcgcagctgcgcgccaaactgctcgaattcggcgagaactacggcgtcgacgtccgtatcccgcaaatcaagctctgcaccgacaacggtgccatggtcgccatgctcggcgtgaacctggtcgaagccggcgtggcccccagcgcccccgacttcccgatcgactccgccatgcccctgaccaaggtctcgatgtaagatttgcacggtattcccaaactgatactgggagtactgtgcctctcatcggtgaattgacagtgacctgtctgcctgatgtgagtagtggtgaggtcttcgccatggatttcccggttgatgatggggtgtcgtgtctggtcaccaatgcgatgaaaataaaaaagcctcggagaaccgaggctttcgatggctcctgcgactgggcttgaaccagtgaccgtccgattaacagtcggatgctctgccaactgagctacgcaggaatattcaattttcatcccgtccggagttacccgttcaggtgagctcctgcgactgggcttgaacca

SEQ ID NO: 3322 - DNA, 4313 bp, Unknown
  R151_18m  MAG No. k141_11167
ccggattcatcccgttgctcaaggccatgcctggcccggtacggcactgaggtgacggatggggccggctggcatctcgtgcgccggacgatttcggcagattttgccgtgctgatgtatgcaggtgttgacgttcggcgaggttcccagccacattgctgtgtgattgatgccgctcgataggcatgtcaggccggacacaccacggcgatgccgaatgggcgacgggccgacgacccgcatcatcgcagcagccgggttttgccatccttgacaagcagggcctgccggttggtgaggggcttgagactgagatcggcaccataccggtcgagaatgcgttgtgcggcgtggcccatggccgttgcatgatggtgggggaccacgcggaaatcagccaagcccaatcctgcgtaatcggtgagatcgggggctttgtccgtgcggtccatgagcttgatatagccgatgtcaggtgccgtgatgaccgagcccgcggactcgccgatgtacggcgtgccggcgcgcacctgctcgatgatggcccggtcggcaccggtgcggcgcaactcctgcaggagaaagaacgtgttgccgccgcccacatagatgcagtcggcctcggcgatgctacgcgtgacgcgttcggcggacccgctcggcacatcttccacatccagttgctccacctcgaaaccgaggcgttgcagcgcgtgtttgctcaacgccgagtgaaccggcccccacggttccacggcgctcgccgtcgggatgaacgcgacccgcttgccttgcggatgcggttcgacttcatgcacggcggacgaggcgttgcggaatatcgaagtcagcagcatcgtaaccataaaagccttcttcacatatcgactaggcgactatgcggcagtgtcggccttgaatatacggaagtgttcgtgcgctcgctctgggtatatccggcctgatcagcgggactcggccaatgtgatgccggccgccgtcatctgtttgcgggccgcgacaccgagctcctcgctgaccggtacggtcaggtcctcgaacacggtgacctcgaaaccgaacttcctggcatcgagcgcggtgtccttgacgcaatgcgattcggcgatgcccaccacatccacgcgactcacgccggcggccttcagcgcattggccagcgtcttgccggcggattgctcggccgcaacctcctcacgggtctggatacggtcggtattgtcctcgatgccctcaaaaccggaatatgccgccgaatactggcccttcttgaaatgatgatggataatcagcgccttgatcgccggatgcaattcggcgttcggcgtgccggccgcaccatgcttcggccacgtgtccacgaaatccggttccgccgaccagtgcgcgcccggctcgatatgccagtcctgcgtggttgcgatatacgcgtactcgctgcgatgcgcgttcacataatcggcgatccgctcggcgaccgcgttgccgccttcgactcccagttcgccgccttcacagaacgtcggctgcatatccaccacaatcagtgccttggtcatcatcattccccctattgccttggattcgttttgaatattgtctcgaactcgacgtgcgattgctctcatcatagccatgcgcggccctgtgggaaacgttcgggcttacactgcaagcagcaatcgaatacaagaaccaggggagggtgaccaagaccatgctggaccatctgacgttgcacgtgaaagacatcgaccgtggcatcacattctacaaacaggcactcgcaccgctcggctatatcgtcaaggcgcatcatgagcccacgctcggattcggcgtggatgacggaaccctgcactccgatttctacgtgtcgccgattgacgggccggaggcggaggcttcgccggtcacgccggtcacacacatcgcgttcctggctgacagtcagcaagccgtgcaggcgttccatgcagccgcgctcgccgccggcggccgagacaacggcgctcccggtccgcgcccgtaccatcccggctattactccgcattcgtgctggacccggatggcaataacatcgaagccgtcgtggattgggctcattcgaacgagtaaaaatcatatccgtatcgtgcctcaggcggcatcgacggcgtaggctccagtcagtcggatttgtggtcgcgacggcgttataggtcacatcacgcaagcgtgacggtgacggtctgctcggcggtttcggtgccggtccatgtaccggctttgcggttccaattcatgccgtccgcgtgcagtgcgtcaatgccgtattgacgtgcatgcgtgaccagccagcctgccgtctgccagcaaagtcgagtgcggttgtcggcggacaggccgtccggcagtgtgatcgtcaacgttgtgctggccgtattggtcgcagcgccgttgttcgtgccggttttgccatttgggggcgcaaccgagacactgacattcggcagtgtaccgcctatggcggcaaccagcccgtccgcgtccgaggagattgctggctccaacgcgcacgtgacgtccgccgaccgttcaccggtcagccccgaggcccaagcgcgtgccatcgcatcccatgtggcatatagttccgggtagcctgagcgctgcacctcctgcgcggcgtcctccaccggaatcgtctcccaatccggcacctgcagcagatggtcgtagaagatgtttgtcgcataggtcatgtcggacacctgctccgccgtgccccagccttggctgggccgctgttggaacaggccgagcgaatccaagtcgccgtagtccagattcgtcagtctcgactcctgcatggccgtggcgatggccaccgtcgccgcgtgatccggcagtccgcgcgtgacggcgatgttcgcaatcagcgccgcgttctgcgcctgatcaggcgtcaaggtgcggcgggctccgtcgggcgacaccgccgcgcaatatgcttcctcggccgtgcgcgcggtctcgtgaggtgtgaatagccgtggcagcagcgtccatgccgcgatcagcgccgcaacaacaagtatgacggctgcaatcagcgcgcccgcgccatgggagcggcgtctgccgcaccgcacctgttgtcccattgcgcctccaatatttcggtgtcatggctgaccgtgaccggctggcctatgcagcatgcgagatttgccgtgttccggctcggccgtcatcatgacagcgtggcatatccacctgaacggcggctgcgccatcacgcgactttgtgacaattcttcacgcttcctgacatccgcgcaatcagaccggggaatgatacgccgacatctctattgcaagttcgacgcggctgataagtcgattcgcaatcgtctatttgcgtttcaaggggctgatttgctcgttccgagacatccacttccgtttcgaggggctgatggccgagtagcgacagctccaaaacggcgaaatgacgttggcatgaagccattcgtacttgggttttggccaatgaccagccccttgaaacggaagtggatgtccccaaaccacgaaatcagcccctcgaaaccgagaatggcggtcgggattgctccgacaccaggggagctgctgccgctattgtgtgaaagacgatttgtaccgggttgaaggagaggaacacatggcacaattgcagccgtactgcgcgattgagggcaatgatgatggattgcccgtcgtgttcgtgcatggcatgggtgtggaccatcgttcgctgatgatgctcgacaaggcgtttgacggcaatgattcaattcgccgtatatatctggatctgcccggtttcggccgtacgccggcattgcccgagcatgcctgcgggctgccggaaatggcggattggctgcaaacggccattgacggccttgtcggtaaagcggctccattcgccatggtcggcaactcgatgggcggtgcgcttgtccgcgaagtattggcgcgcgaacctcgccgagtggccggtatggcattgatcgcgccggtcgtggacccgcagcatgccggccggcatgtggccgaacatgtggttgcacagcccaatcccaagctgacgcactccttgccacaggaacaggtgttcgatttcattaccatgggcgtcaaccagtcattcgacgcgtggcggcgctaccaacggttcatcctgcccggcgtggcgttgtgcgaccgtgcggcatgcgaacgactggatcagcgttattggctggccgataatcccgaggaa

SEQ ID NO: 3323 - DNA, 13774 bp, Unknown
  R151_18m  MAG No. k141_11194
caccttcgccccctacttccccgaataccagccgtacgtcaagggcatcggcgccaagctgaccatcgtgccggccgacaccgagaacctccagatcaacttcgaggcgttcgaggccgcgctcaacccgaacgtgcaggccgcgctcatcaacaccccgaacaacccgtccggcgcggtgtattcggcggacacgctcaagcgtctggccgcgatcctgaccgccaagcaggccgagtacggccacgacatcttcctgatcagcgacgaaccttaccgcgaaatcgtgttcgacggagccacccagccctacccggccagcttctatgcgaactcgctgacctgctactcgtggtcgaagtcgctgagcctgccgggcgaacgcatcggctacgtcgcggtgaaccccgcagccaccgacgccgacctgctcgtgccgatgatgggccaaatctcgcgcggcaccggccacaactgcccgccgagctcgatccagctgggcgtagccaaagtcatcgaccagaccgccgacctcaacgtctacgagacgaacatgaacctgctctacgatgcgctcaccggcatcggcttcgacgtggtgcgccccggcggcacgttctacatcttccccaaggcgttggaggacgacgccgtggcgttctgcatgaaggccaaggaatacgacctgatcctcgtgccgtccgacagcttcggcgtgcccggatacttccgcatggcctactgcatcgacaccgagaaagtcaagcgttcgatccccgtgctcgaaaagttcgcccacgaggtgtacggcctgtaaacacgggccgcaagtaacaaacacaagaaaggggttgccatggaatacaccgaagacgccgatcatcgcgaactgctgctgcacagcgcctatgactccgatacggtccgggccatggagcgacccctgctggacaaaggcgtgccgctgatgcgcatggccgcccaggccgcggcccacatggcggccggcatgctggacgacgaggatctggcgctggaggacacgtcgatcgtgctgctggccggggccggagacaatggtggcgatggtctgttcgcggccgccgcgctggcccaggagggcgcgaacgtcaccgccatcgccgtgggccggtcgctgcatgaggccggattcgccgcgctcgtgcgcgccggcggcaaggtgctggtgcttgacccggcagccgatattcccggttgcgcgtccgggttttccgccggtgaggccggcgagcgactgcagaccgccatcgccgtggccaggaaatcgcatctgatcatcgacgcgatgaccggcatcggcattcaaggctcgctacgcggcattcccgccgcgctcgcctccgcccttggtctcgacggcgagtctcccgatgagcccgccctgccgaaccgtgagtcgtcaggcgattttccgctggtacttgctgtggatacgccatccggcgtcggtgtgaacgatggttctctgcccggcccgtacattccggccacggtcacggtcacgttcggcgcgatgaagccgtgcgcggtgctgccgcccgccacgttcgcctgcggccgtatcgagttgttcgatttcggattcgatatcgacgacaaggatccggacgtcgaggtggtggataattcgttcgcgtccgacgcggtccgtctcccccggttcgaggattccaaatattcccggggcgtggttggtctggtgaccggctcgcagcgctaccccggtgccgccgtgctcaccaccagcgccgccgcccgcgcgaacaccggcatggtccggtatctgggcccggagcgcgcgcagaacatggtgctcaccgcactgccggaagccgtgatcggcaagggacatgtgcagtcctgggtcgtggggtccggcgtgcccgaggctagcgtcgagggcgccgacggcgatatgcagcgggacaccatcgccgcattgctcaagcattacgcgctcggcagcgaggatgagaacaaggacgcctacgacatgccgccaatcgtggtggatgccggcgcactcgacctgctgccggagcgcgtgtctggccaggtggtgatcacaccacatgccggcgaaatggcgaaactgctcaaccggttcgaaaccaccgccagcaccgcggagcatgccgattcgcacgagccgtacaccgccgacgacgtgcggctgaacccgttggccagcgcgaagcgcgcccacgagctcaccggtgccaccgtattgctgaagggcgcggtgaccatcgtggtggatgaggaccatgtctatgcgtcgggcagtgcgccggcctggctgggcaccgccggcgcgggcgacgtactggccggtctgaccggcgccctactcgcccagcaggatgacgtggccaccacgggcgagaccgtggcctcggccgcctacctgcatggcctggcggcggcgatcgcctccgaatccgagcagcagggctggcaggagccggaactgatcggccgcgagcatcgccagcgcttcatgacgctcggccacccaatcgtggccggcgacgtgatccacgccatccccgaagccatcgccgacgtcatcgcataaccttgttgacctccctctgacgagggaggtgtctcggcaaagccgagacggagggagagaaacataagcctcaaactccacataccccaacctatacacaaaccccgtacactaaatcgcagaccccacccaacgacccaaacacacaaggaaccatcatggccaactcccccatcaccgacgtgattttcgacttctgcggcgtgctgctggactggaacacccgcgcatgccttgaaggccgattccccgatgaaatcgtggaacgcatctgcgccgacgacgacccctgcggcttcttccactacgaggaccgcatggacgccggcgaggatttcgcggacatctacccggatgtggtacgcgaacaaggccaggaactcgccgacatcttcaagttctacatcggccactacgcggacgcgctgccccgcacgctgccgggcatggtcgaactgctggcggatttgaaggcccacggctacggcgtatggggtctgaccaactggtcgcatgagaccttccacctggccttcgagaagtacccgcgcctcgaacagctgctgcagggcaccgtggtctccggcgtggagaagatgcacaagccgaacgccgacatctacgagctggtcctgacccgcttcggcctcacggccgagcgctgcgtgttcttcgacgacaccgccaagaacatcgtcggcgccaacgaggtcggcatccacggcatcctcttcgagaacgcgtcgcaggcgcgcgaatcgctcgccgaactcggcgtacgcctgtaagtcgccaaatattgcgtcgcggcagttgaagtctatggacccgtccttgacgacggtgaccggccgtttggcgaccggcatgtcgcactgttcggtgagcacttcaacgacgcggcacgcggcaccatgcgcagaatcatcatgaaggcgttctggatgttcatcacgtcggcgccgagcctggtcatcaggctcggcgtggagaagcggtcgatgctggagaaggagaaggtctggatggcatcgtactggtcctgcctcaggttaccaatgtggcgcatatcccgttacacagcgtccgcgatatgcgaggcgtctcatattgtgtcgccatagtggattgatgaggttataaacccgtgtggcgaccatccctagcgatataaatagactttatgacactgctgcagctgaaatacatcgtcaagatcgtcgagtgcggctcgatgaacgaggcctcccatgccctgtacgtctcccagccggccctgagctcgtcggtcaaggaattggagaacgagctgggcatcgagattttcacccgctcctcgcagggcatcgccctgaccgtggacggcgcggaattcctgacctacgcccgccaggtgctcgaccaggccgacctgctcgaagagcgttacaagcatgccaagccgcgcaagcagctgtgccaggtctccacccagcactacatgttcgccgtcgaggcgttcgtggagatgatcaactccatcaagtccgacgaatacgagttcaccatccgcgagacccgtacgcgcgacatcatcaaccaggtcgccaacatgcagtccgagatcggcatcatctacctgtccgatttcaacaaggacgtgattggcaagctcctgcgcgagaagcaccttgaattccatccgctcttccgcgcccccctgcacgtgttcatctcacgggacaacccattggccgccaaaaagatcatcaccatggaggatctgaagccctatccgttcatccagtacgaacagggcgaggaaggctcgttctacttctatgaggaggcggtctggccggaatactcccccaagcagatcaacgtgaccgaccgcgccacgattctgaacttcatcatcggcctcaacggctacacggtgtgcaccggcatcgacaacggcgacctcaacaacgagaagatcgtcaccgtgccgctcgacaccgacgaaacgatgttggtcggctggatcacgaacgagcgttccaagctctccaaggccgccgaaacctacctcaccaagctcaagtccgtagtcgccgatcacggctacaagctcattgattaggagtaagtaaaacaggcatggtcagcagtgagatatactgcgattaagccaaccccgctggggaaatggaagtacgagccggcccctgagtatctcaggggccggctcttgcgctattgagactgactggcaaaaccagtttgatggcctccggctacttggccgagattaccgacgtggcggctgtcgcggcaaatcccttaagcacctcaatcatcacgtcacggtcttcaacatcaatgctgcgggccgcggcgagcattaccggcaacgactgcgtcacgtgcgacgtgagttcgccgaacgtgacgtacccgccggcctcgaagatggcgaacaggttttcgatgaacttgcggcgatgctcgtcgtcgtattttgccatccatccgttgatcgtgcgtgccaggtatcgcgcgctacttgtcagtccatcagcctgtacgaattggccatgatcgacttgccagtgcagggcaaaatgctgcatgatgctggcaccgtcgctgctgaccaccgtatagccgtcttccacatgctcgcgggtctcaaacagcatgccgatgatcgacgatcccggtaccgatttatggattttcggcgcaatgcgcgcgtacccatcctcatcgaagaacgcctcatcgaagcctggaccatcgtgcgaatacacggccgtgatacgtccctgaatttcgccgggcacattggccgccgcgtataccgccagattgccgcctttggaatggccgccgaccataatcggcccggcccagcggccggcaatatcagtcacataccgcacagcggcctcctgcgaggcgaccggacggcggaaggccatcgtgaaatcctccttccacccgacgatcgaactgtcggtgccacggaaagccacgtacagcgtgccgtcgcccagttcgaagacgcaggccgagaactgtttggtggtttcggcgtcgaattcatccacgtattcgccgacgcgcaggtcgcgccagcgcgggctctcccccatcgcacgcagcagatcgacgttcatctgcggcgaccacaccttgccgaacatggcgtcatagcattcggcgcgtagcaggtcgcggatggagaccgtgggaatcatgccgctgacgtccgccgaatcctcgtgatagcgcggcacgttatccggcatgcgcgcgtaggccagctgggacagggcgagactgtccgcctcggtgaacggcagtgcggcgaaggtgtcgaaatgttgccggatatcgtcggtgatgttccccatggcggccttccttgttcgaatgtattcgagagaaacgaacctacgacaattctacgccgcgcgagtttccaccacgggcgaccctaccgtctagatgccgatctcgccttcaaggggctgatttggcctcccgggaacatctatctctgcttcaaggggctgttcatccgtcatatcccaagtacaaacggcaacatgtcaacgtcattccgccattttcatgctgcctctacttgggcaccagccccttgaagcggaagtagacctccggaaatcacgaaatcagccccttgaagcggagagagcatccatttcggcccagattgcccgttaccgcagcgggtaatactgaccgtgatcgattttggcggcgatatcacgtaattcggcagcatctcggcggtcttcttcattaccttgcgacaacttgttcgctttactgtccagatgatgctcgatgccgaagtaactgcatatccccacgagcgcaaacagccctataccaactaaccagttcatagcacgctccttgccaaagcttctgccttaatatggtactgctgttcatggatcgtaataaaaaaagcgggctcgcaagcccgcttttggttttagattgaagacgatcaggcgccgtattcctcaaggtaggcggcggcgcgctgctggatatcgtggctgagcaacggggtgccgtcggagttcttcatcttggcggcggcgtcgaagatctcgcgcacgttggcgatggagagcaccgggaagccgaattcggcttccacggccttcacggcggacaggtcggagtccttggtcttctccatgcggtccacggagagcacgagacccacgacctcgacgttcgcctcggccttgagcttggggatgacttcgcgcacggcggtgccggcggtcatcacgtcgtccacgagcagcaccttcatgccgtcggtcagcggggtgccgaccatccagccgccgtcgccgtggtccttcttctccttgcggtcgaaggtgtatccaacggtcatgttgtggccggcgttcagcgcgatcgcggtggacacggccagcggaatgcccttgtaggcggggccgaacacggtgtcgatgttgcggggaatcgtgttgtgcacgatggcctggctaatcttttcggcgtagaacgtgccgagcgcggcgatcttcttgccgtcgtcgaaggcgccggcgttgatgaagtacgggctcttgcggccggacttcagcgtgaagtcgccgaacttcagcgcgttggattccaacaggaattcagtgaagcgatgtgcgagtgtttctgccatgatgttccttacctccaagtctgtcctgcggccagtttagcagcgagttcgggacggctgtccagcaggtcgtcaagttcgcgggcgacgcgcagcggggccaccgggtcgaagagcgcggccgcacccacttcgacggcgttcgcgccagcgtacaggtattcgagcgccttctcaccactgtcgatgccgccgagtccgatgatcggaatctccggcagtgcggtgcgcacccgatagacggctgccaggccgaccggcagcacggccgggccggatacgccgccggtgacgttggcgatgatcggctggcctgtgcgaatgttgatgcgcatgcctttgagcgtgttgatcatgctcaacgcgtcggcgccgtgttccacggccgcgcgcgccggcacggtgatgtcggtgacgttcggcgtgagtttgacgatcatcggcttgtcggtcatcgagcgcagccggtccataagattggcgagggccaccgggtcggtgcccacgctcatgccgccggcggaaacgttcgggcagctgacgttgatttccagcatgtccgcgtcggagtcggcgagcttttccacgaccgccgcgtaatcgtcatcgcaatgtccggcgacattggagatgacgaacgcgcccgcggccttgagcttgggcaggtcttcggccaagtaatggtcgatgccggggttctgcaggcccacagcgttgatgttcgcggccggcgattcggcggtgcgcggcgaggggttgccctcccacggcacgggcgaggcgcccttggtgcatacggcgccgagctggctgacgtcgtagaaccagcggacggcggcgtactggaaggtgccggaggcggtgccgaccgggttcttccattccagaccggccaccttggtgtggtgcttccacacgtggggctcgtacaggttgatgtggttgtcgctgccctgcgcggactggttgtttgcgctcatcgtcactccccccatccgagctgttcgcgagtgaacacgggtccgtcggagcagaccttgagccggccgtccacggtgtcgatggtgcacagcacgcaggtgccgtagccgcagcccatgcgctgttccatgctcagctgcgcggggatgccgcgttcggcggcccaagcggccacggccttcatcataggcagcggtccgcaggacaagatgatcggcttgcgatcgtaggccttcaggtcgtcgccttgttcgagtttgttgagcaggtcgaccacgttgccttcggcgtcgtcgatgctccacgaccagtccgcgtaccgggagacgtattcctcagcgaagtggtcgttgcggtagccgaatacggcggtggcaaaggaggcgtcgtgttcggcgagcttttgcgcggcgtagattagcgggggcacgccgagtccgccgccgacgagaatgtagttggcgtcttccttgaggttgaagccgcggccgagcgggccgagtacgtcgacggtgtcgccggcctgcagccctgccaactgttcggtgccgtggcccacgacggcgaagatcacgctgacttcgtcgccgtcgacttcgctgacgccgaacggacgcggcatgagcatgaagtcgtcgtgcgtgaacaggttgacgaactgggcgggcttggcgtgggaggcgatgaacgggtcgcggaatgtcagtcgcatcacgcggtcggtcagttccgtaacctgcgtgatttcgacgttgtggcgcggcgggaagaatccggccgcagtcgcctccgcaaccacatcatgggtgggggtgaaagttgtcatttcattcctattcagcacatcaagctccccctatcaggggagctgtcaaccgcaggttgactgaggggtagttaaacacactcggctccggtttccagcccacactcacgtatagcccacagccggacaatctacctacctatatacggcaacccgcagattatcgcgcatgtcgagcgccgcctggcgcgcgctgctcgccacaaggtccagcgcctcgtcggcggtcatggattcggagtacttgccgctcttcttccatgcgccgatgatgccgcgcgacgagttgacgatggcgccgctgccctgcttgtcgaacatgcctgccacgtccgcggccgtgccgccctgcgcaccgtagcccggcacgaggaagaacgtgtgcggcatacgttcacgcaacgccttgccttcctcggggtgggtggcaccgaccaccgcgcccacgcgggagtagccgtggctgccgatggtctcggcgccccagccttccacgagaacggccacatgctcgtagaccttcgtgccgtcggccaggtcgagcatctgcagttcgctggaggacgggttggaggtgcgcacgagcacgaagatgtccttgtcggcttcggcggcggcctcgacgaacggggtgatgccgtcggtgccgagatacgggttgacggtcaccgcatcctcatgccacgggtcgaagtcgcccacgccgttcaggtggtgggcgtaggcggctgcagtggagccgatgtcgccgcgtttgatgtcgccgagcacgtagaggccctgctgggccgcgtattcgcaggtcatcgtgtagatgtccacgccggcggggccgagcgcctcgtacatggcgatctgcggtttgacggcgggcacgatgtcggcgatggcgtcgatgatcgtgcggttgtattcgaagtaggcgacggccagctgcgcggattcgatttcctccggggattcgaccgagtcacgcacctcgtcggcaaagctcgccacgacctgcggcggtaccaacgcctcggtggggtcgaggcccacgacgctggggttctgagtgttgtcaatcgcttcgatcaggcgatccatgctgctccttatgttatctacagacggctgaacatcagctgggagccgatgatcgtggcgagggggcgtccggtgacctgccagccgccgaacggggtgttacgagccctggagtggaactgttcagggtccacggtccattcctcagcggtgttgagcaccacgaggtcgacattgtcggcgtcatccacgcggctcaggtcgagcagtcggttgacgccttcacgctgcggctgagcgtcgctctcccccgcaatcacgccatccggatcatccccagtgggcgcgggttcggcgtagtcctcgaccagcgcggccacgtcggttggcacatgccccatgagttcggcgggtcccacggacatgagctcgatcagacgctcatcggaaatgaagccgccgtcgacgagcaccttgtggcacacgccgtacgcgcattccagtccgatgatgccgttgggcgcctcaaggaagccgagttccttctctgccaacgtgtgcggcgcatggtcggtggccagcagatccacggtgccgtcggcgatggccgcgatggtggctttgcggtctgcttcggagcgcagcggcggattcatcttggcgagcgtgccgtacttgagcagcgcctcgtcgctcaacgccagatagtgcggcgcggtctcgcaggtaatcggcagtccttcggccttggccctgcgaatcgcctcgaacgagatggcagtgctcacatgctggaagtgtacgtggacaccagtgcggcgggccgcttctatatcgcgggccacgatcttgagctcggtgtcttccggaatgccgggcacgccaagttcgcgcgagaccgggccttcgttcacggcacctgtatcgtgatgctcgcaatgctcgattaggtacaggtcggaggccttgacgttctccagcacctggtccaggatctccggcgtcacagcggaaccgtcgtcgctaattgcggtgatggggtgcgtgagcatggccggcgtcttggcgtcgtcctcgaatccgggcacgtacctgagccagtcggcaacgtcgcttgcctcatgaccggcgcgatccttggacgcgcacacgcacagatcgtaacgaaccggcaattgaacatcgtgcgcagtatcgtactgctgcaggaagtcgatgacgttgtcgaagccggcatccagaacctctttcgcaccggccgcttccaggtcagacacggtctgcccatccagtgccggcaacgtgttcggcatgatgagcacgttcgtgtatccgccggatgcggacgcgcggcagccggagaccatagattccttgtaggtctggccgggatcgcggaagtggacgtgcgggtcttcgaaaccgggggccacggtcagtccggtggcgtcgatatcggcaccgtcagccacggcggaggtgtcggcgaagtaggcggcagcggtcccgggcaccacgaggtcgatgacttcgccggtgttccagaccttgatgttgcgtagggtgatgctcacagtttggcttcctcgtcgcagtagtcgcagcggtattcgagccgttcggagtgcacgaggtggaacatctgcttgatgccgggctcggtggtggtcacgcagcgcgggttcacgcaggagatcacgccgacgatgtgctcgggcaggttcggctgcttcttttcgacgatcttgccgccgcgcaccacgtctacggtggcctggcgggccacgaagccgagcacgtcgaggtcgatgtccttgtcatcctcgattttgatgatgtccttggagccgtaacgcttggagttggcgttcatgatgagcgcaagcttggttttggccgggtcgattttcaggtattcgagaaccttcagcgaggttccggccggcacatgatcgatgatgatgccgttctgaatgctggtgacttccatcaggcctgaacctccttggggttgagcggttcgtatccgggtagttcgtcgcccaccacggtgctttcgagggccatgcgcacgagcatgccgttcttgacctgttcgaagtaggcggcacgcgggtcgtcgtccacgtccacggagatttcgttgacgcgcggtagcgggtgaagtacggccatggacggcttggcgagctgcagcttttcttcgtcgagaatgtaggtgtcgcgcaggcgcaggtagtcgtcttcgttgaagaagcgttccttctgcacgcgggtcatgtacagcacgtcgaggtcgccgatcacggaggccaggtcgcgcacttccacgtaggagcagttgtcggtggcgttgatgcggtcgatcacgtactgcggggtcttgagctcgtccgggctgataagcacgaagcgcacgttgccgaagcggcacagggtctcgatcagggagtgcacggtgcggccgaaggtcaaatcgccgcacagtcccacggtcaggtcggtgatgcggccgaagcgcgactgcagcgtggccaggtcggccagcgtctgcgtgggatgcatgtgaccgccgtcgccggcgttgatcaccggcacggatgcggcgcgggaggccaccagcgcggcaccctccttcgggtgacggatggcgaccacgtccacgtagttggacacggtcttcaacgtgtcggcgatggattcgcccttggtcacggaggccagctgcgctccggcgaatccgatgaccttgccgccgagacgcagcattgccgtctcaaagctcaggcgcgtacgggtggagggctcgtagaacagcgtggccagcactcgcccatcgcaggtatgggcaacctctttgcggtgggaatcgatgtattcggccttatgcagcaggtcgagaatctggtttgtagacaggccgtccagcgttacgacgcttttgccgaccattggcgtttcttcagacaaggctcaccttttcgctcgtggttttcaggtggccacccttgtgtgacctaatataacttacgccatttttcggacagccgcattcaccgagtgttcacctgaaaatccaacgaatatgctgtgtctgtatagctgatatctgctttggaacgccagagctcattcattaggtcgatttgacgttcattaggtcactgcaccctcgtatctgttgttggaatgccgccattccaacaaggtatgcggcggcggaccgacctaatgaacgatgaatcgacctaatgaacgtagtgaacgcaatacaagaaaggtctatcgctgcgcgcggcgtcggttccgctccagtcgcggtgcgatcacgtgcatacgcgggcgaagcgcggtttgcggctgctgcgttgcggcggaggccgtggcggtggttgccgcagtcgcctcgtcttcggcctgcccgtagaacaggcgctggcatacgtcacggcatttgcgcatcacggccagcaggtcgttctcgaaatgctggccgcggtgggcgccgtagccgaggtagacggcgatgccgcccagcgaatagatgtcatcaggcagaatatcggcctggttggcgcgcccgctccacagatagttgccgttgcgggccgcg

SEQ ID NO: 3324 - DNA, 13271 bp, Unknown
  R151_18m  MAG No. k141_12269
ggccgaaggacattgcggcgccgtcctgggacttgatggaggccaggtagcccatgtaggtccactgcacggcttcctgggcggtctgagcagggcgggacaggtccaggccgtactcgttgccgaggttgatgagctgcttcagagccttgatctgctcgtcgtgctcctcgcggaagcggatccagtgctcgatctccggctcggtgaagtcgttgcggtacgggatggagtccttgtcgcgcttcttgaaggcgatcagcttgttgacaccgtacagggcaacacgacggtagtcgccgatgatgcggccacggccgtaggcatccggcagaccggtgaggatcttgttgtggcgggcgaccttgatgttcttggtgtagacgccgaacacgccgtcattgtgggtcttgcggtacttggtgaagatcttcttgatctccggatccggctccttgccggcttccttgatggcctgctcgaccatacgccagccgccgttcggcatcatggcgcgcttgcagggcacgtcggtctgcaagccgacgatcacgttgtcgacttccggggagtcgatgtagccggccgggaaggcatcgatgccagccggggtgtgggtgtccacgtcgtagacgcgctgcttgcgctccacggccaggtagttgtcgtcgaggtacttccacaggtgcttggtcttctcggtggcaggagccaggaatgtctcgtcgccctcgtacggggtgtagttcttctggatgaagtcgcggacgtcaatatccttctgccagttgccctcggtgaagccggcccatgccttggcgtcgagctcctcttgggagacagctgcattttctactgcggtcatgtcactccttaaatggggttgtaggtttcgcatcttcacggaacccttggttcaacagtgtagttggcacttgcttgggaaaagccgaaattgggagtgagctatctcacattgttttttgtgaacgctaccattccaatggtttctaggtattgatggggctattgcacgtctccagatatgggaaaccgctcatactgtgatgttcgtatgagcggcttggtgagcggttcggtcttgagattgacagcagaaccgtatccgtctgttttggccgtcagtcttcatcgttcgcttgcgcggatttcacaccgtagttcttccagcgccagttctcctcctcccatctggcgttgcggtccaccacgatgtcccaggcgtgttcggcatcttccttggtcttgtacggacccatgcgctgttcaatcggtgagaccatgcccagctcggcctgcttcttgacggtgttgaaataccactgcttcttgttatcgtctgtcattggtacctcctcaacggtattacttgctcccgctggcgggagcaatatatgtttattccctgaacgcgttggtgacgggcagtcggcggtcgcggccgaacgcgagggccgtgaccttcggtcccaacgggtattggcggcgcttccattcggcgcggtccaccaatcgcatcacagtgtccacggtggcctggtcgaagccgtcggccaacaggtcggcgcggccgtgcgcgtgctcgatgtatgcggcgagcaccttgtcgagcagcgcgtattcgggcagggagtcggagtccttctgcccggggcgcaactcggccgagggagccttctcgatggatgagaccggaatcatcacgccgtccttcaacgggatgccggcgttgccgtcctcgttgcccacgatcttgagcccgccgataccgacgcctgcggccgcggccttgttacgccaacggctgatctcccagacacgggtcttgagcaggtccttgatgggtgcgtagccgccgaccgcatcgccgtagatggttgagtagccgcaggcgagctctgacttgttgccggtggccacggcgagcaggccgcgagaattggaactggccatcacgatcacaccgcggatgcgggcctgcaggttctcggcggagacgccatcaaggtcaagttgctgttggtaggtgttgaacaatggctcaataggctggacctcgtaatgggcaccgatgttggaggccaggtcagcggcgtcgtctttggaaccatcggaggagtacatggagggcatggagatgccccagacgttctcgccgccgcatgcgtcggccgccatggcggctaccagtgcggagtcgatgcctcctgagaggcccagcgtcacgccggtgaagtggttcttggccatgtagtccttgaggccgagcacgcaggcagtgtatacctcttcgtccgggtcgagttccggaacgatctcggccttgacctgatgttcggcggtggaatcgaagtcccagaacgtcaggttttccatgaacatcgggccgcgttcgataagcgtgccgtcggcatcgaccacgaagctgccaccgtcgaagaccaggtcgtcctgaccgccgacctgattcaggtagatgaccggggcgttgacttcggcggcacgacgctgggcgagctcgaaacgggtgttggtcttgccttcctcatacggcgagccgttgatggtgagcagcaggtcgatgttcttggtggccaggtcggccaccgggccaccatcctgccagatgtcctcgcagatggccacgccgatggtggcaccatccacgtcgagggtcacggaacggtcgccggcggagaagatacggaattcgtcgaacacgccgtagttgggcaggaagtgcttgtcgtagccggcccagaccacgccctgatgcaataccaccagtcggttgcgcggcttggaggtcttacgatcagtgcccacggtgccaaccaccacgaacagattgccgaggccgtcgtcgttgagctgggcggcgagttcgttggccttgtcccatgcggcttggcggaaggtgcggcgcagggccagatcttcgatggggtatccggtgagggtcatttccgggaaaacaaccacttgggcattccctgcggcggctttacgggagtagtcgagcactttggcggcgttggcatcgagcgcgccgacgcaggtgtcgatctgggcgagtgcgaagcgaagctgtgtcatagcttcttagtgtagccgcgtatggcgtcggattgcctgttcttccggcttggcgtcattcattaggtcgtttttgcgttcattaggtcactgcaatgcgatatcagtcgttgcaatggcgcgattccaacaaccagtatcgtcgttcaccgacctaatggacgatgaatcgacctaatgaacgaatgccactcccctcagtcagcttcgctgatagctcgtcctgcacttatggacgggcgaggcccgcgcatatctggttcggctgtcgcctcaccttcggctgcagacagcccattgggctgtctgcctaacgcctcagcctccagaggggagccaaaaaaggatttacctcagctcgttgagcacgcgcagggcggcgttgacgtagaagttgacgaaggtgggaatggattcgtcgagacccacgaaatgcgggctatgccagtcggcgcaaccttcctggccgtttgacccgacgaacgcgaacaccggcaacgtcaccttggcgaattcgcagaagtcctcccccgccatcgactgacgtatcggttcgagctgcgcgtagtcgttgacatccgccgccacggccttggcaagacctggattggagaccagcgggtcttggaaatcatcccagaccacatcggcgctgataccgtatgcctcggcggtgtgttccaccacttccttgaatcggcggccgaccagattgccatccgacttgtggaaatagcgcacagtcccttggaatccggcttcggcgggcaccacgttccacacatggccgccgtgcacttcggtaacggacagcaccagcgggtggaagggcgtgacgttgcggctcacgatggtctgcaggctcagaataatactggcgagcgcttcgatgggcccggtgcccttgtacgggtagccggcgtgggtgccttgggcgtggagggtcacgcggaatttcacgcagccggccatcatcggctcgacgccgatggccagctggccggacgcatagttggggttgttgtgcgtgccgataatggcttcgacgtcatccacgagtccggcgtcgatcatggcgcgagcgccttggccggtctcctcactcggctggaacagaatcttgattgagccggcgaacttgtcacggtgctcggcgagccagaaggcggcaccgagcagaccggtcatgtgcaggtcgtggccgcagccgtgcatcacgccttcattgacggagctgaactccagtccggagtcttccacgatgggcaggccgtcgatgtcggcgcgcagcccgatacgcggcccgggaccggcctcgccctgaatgagccccacaacaccagtctccagcgggttgtgcaggatctcgatgccgtgcgccttgagctggtcggtcagatagatgctggtgtcgaattcacggaaactacgctccggatgggcgtgcaggtagtggcggatggtgatgagttcgtggtcgatgtcgatatgttcactcatggttcccgattctagtagcgcgaagaatatattgcggccctcgcttcatattggcgagggccgcgatctatggggtcagtatgccttgttattgctggcgtttgagcagtcgtttggcgatggcgttggcgatgccctgcaccacctggaccagtacgatcatgatgatcacggccgtccaggtgacggtctggtcgaacttctggtagccgtaggcgatggcgaagttaccgagaccgccaccgccgatgtagccggccatggcagacatgtcaagcacgccgatgaacaggaaggcgtaggccaggatcagcggtgccagggcttcggggatgagtacggtgcggatgatggtgagcttgccggcacccatcgaacgcgcggcctcgattactcccgggtcgaccggcacgagattctgttcgaccagacgagaagtggcgaaggtgcacatgaccaccatcgggaagatggcggccacggtgccgatggacgtgccgaccacgacgatggtgagcggctgcatggctgccaggaaaatgatgaacggaatcgggcgcacgatgttgacgatgatgtcaaggatgcggtagacgaccgcgttctcgaacaggttgccggggcgggtgccatagagcaccacgccgaggatcaggccgaggaatccgccgatgacaagggtgacgagcaccatggtcagggtctggccgatggattcgaacaatagtgggcgcagcacgttccagtcgctacgcgagttggcgaggatgatcatgcgttgtctccttcatgtgcggcggcggatacagcgggcgcggtggcagtatcggccgccagtgggtcatgggcgcggtcttcggcgtaggaggcatgtccggcaactgcgtcggcgtaagccacgggctttgcggcggtgccgaagtcaatgacgtcgctattggcggcgagctcgcgcaggaattcgtccacgtgccagccgggcccgttgaattcgtaggtgatggcaccgatggcggtccccttgaccgtgtcgatgccgccgtagagcaggctggattcgacgccgtatttggcgatgagttcggagatgttctgtccggatgccttgagttcgtggccatggctgccggaaacgtccttttggcggatgagcacggtgacgatgcggcccgaccattcgtggtgcaatcgctcgacccggtcttcctcgggcaggccggacagggcggtggcgatgaatcgcttggtcaccggctgctggggcgcggcgaacacgtcgtatacgtcgccggattcgaccacgcgtccggcgctcattacggccacgcggccggcaatctgctggaccacgttcatctgatgggtgataagcacaatggtgatgccgaattcctcgttcacacgcttgagcaaggccagcacttcggtggtggtttccgggtcgagcgcgctggtggcttcgtcggcgagcagaatctccggattagtggccagtgcgcgggcgatgccgacgcgctgcttctggccgccggacagctgcgaggggtatttgtttgcgtgctcactaaggcccacgaattcgagaagttcgttgacgcgacgatcctgatagtccttgcgccagtgatcgagttgcagcgggtaggcgatgttctgcgccacagttttggtggagaacaggttgaactgctggaaaatcatgccgattttctggcggatgggccgcagcttggtctcactcaaagaggtgatatcggtgccgagcacggtcacggtgccggaggtgggtcgttcgagcgcgttgataagccggaccagtgtggatttgcctgcaccggaatagccgatgatgccgaagatgtcgccgcgatcgatggtcaggctgacgtcatccacggctcgtgcgatgttcgcgccgcgtccgcgtgttttgaattccttcacgacatggtcgaaggtgatgatggggtcgctcatagtgctccctgatgctggttgttgatgtccggtcacggaagcggagcgaatcccgattgttggctcgggtactcgctccgcttggtggtaatggctatggacaggttagtcgtgcactcgtatcagccacggctcactgctgggctttggcgtccttctcaatgtcggacaggaagccttgcagctcgctggcgctgaacttgtcggcgaacaccgcggtaccgccggagttctcctgcagggcgtcgagcacatccttctgctggtagatggaaacgagcttcttgtaggtctcgttgttcacgtccgccttgcgggccacccacacgttgatgtaggggcgagcttcttcggattcggcgtcatcctggtagatggcgtccttcgggttgagaccggcgtcggccacgtagtcgttgttgatcacaccagcggcgatggtcgggtccttcagggtggtggccacctgttcggccttgagcggggtgaccttgaccttgctcttggcttcgtcgatgtcggccggagtggagaaggcggtccagtcgcccttgagcgtcacgagaccggcggccttgagcacgccgatagcgcgggcctggttggtttcgtcgttcggaatggtgacggtgtcgccctgcttcaggtccttgatgtccttgaccttggtggagtacacgccgagcgggtagatggcggtgccgccgatgggctgcaggtccttcttgttgctcacgttgtagttggccaagtagagcaggtgctggaattcgttgaggtccagctcgccggagtcaagggccgggttttcggaggtgtagtcctggaagtcgacgatgtcgacgtagatgccggccttctcggcgtcctgcttgaacttgacccattcggggttggtagcgccgaccacgccgatcttgaccgggttgcccttgctgcccttggcggacgactcgttggcaccggcaaacgcgcggtagccgaagaacgcggccacggcgataatcgccacgaccacgatggtgatgatgacgttgcggacggtgtggttcacacgcaccggctcgttattgttaggagcggccggagttgccgactgggttgctgctgtcattggatttcctctctccaaaattgatgtcgggtaacaccataacgcgcttgaaccgcgaaagtgacggaaaatggccgattgccgtataggtgtcttttatggcgcgcatgcaatggccgggattcgtgcgtttgataacccgctataggcgtgccgaacacgccggaaagcacgtcgagaggggctttgacaatggaagctatgactaccgatactgccaatgccgatatccgagccgtattcttcgatatcgatggcacgctcaccagtttcacgacccatacggtgccggattccacaatcgaggcgattcaccggctgcaggccgcaggcgtcaaggtgctgatttgcacgggccgcgcgccttcacagatgcacgtggtgctggataccatgccggtgacgttcgatggcgtggtggcgttcaatgggcagtattgctttgatgacaccggcttctttgcctcgcaggccttggatactgctgatattgaggtgattctcgactggctggaccgtcaccccgatgtggtgtgcaatttcggcgagaaggattacgtgtacttcaaccagtccaatgatctgcttcgcgccacgtggagcaaactgggcaaaaccgcaccgacccggtattttgaggacccgcgcacccgcgcgctggatcatgagactttccagatcagtccctttgtcggacccgagttggaggccgaactggtgggactgtgcagcaatgtgcgcggggtgcgttggcatccggatttcacggatctgattccggccgatggcggcaagccgcgcggcatccagcggttcatggcgcattacggcatcacgcgcgggcagaccatggccttcggcgatggcggcaatgacacggatatgctcgcctacgccggcatcggggtcgcgatgggcaatgcgaccgccgagccaaaggccgccgccgattacatcaccgacgacgtggaccacgacggtgtgcgcaatgccctactgcatttcggggtgctacgcgattattgatgccgtagcgcctcgaccgggtcgagctttgccgcgcgcctagctggatagtagccgaaaatcacgccgacagcgatgcagatgcccactgccagtccgatggactgcacggaaactgctggcgcgatactcatgccaccggcgatgccggacaccaatccagcggcgcccaacgacagcaagtagccgatcaacgtgccgataagacctccaagcactgtgattgcaatggattcggcgaggaactgcgcggtcacgtcacgccgagtggcacccaatgcccggcgcaggccaatttcgcggatgcgttcggtaacgttggtgagcatcatgttcataatgccgatgccgcccaccagcaacgagaccccggccaccgaacccgccagcacctggaatgcgctcatgaagctggaaagctggtcgatggaggattgggcgcttacgaccgacagattctggtcgatctgttcggttgggatacgcatgatgcgagcgacaacggtcttcgtctgttccgtgagctggtcgatatcaaccccgtccttggccagtccgtagatctgcatgtatcccatgttcgaggacgcaaaccgcagcgccacagtggtggcaggcatatagatattcacgccgtcgccgcccatgccgcccatcaatccagacgactcgaccacacccacaacggttgcttcattgccgtcaagcgtgacggttctgccgatggcgtcaatgtccgcgctgccgaacagcttctgcacgccctgcccgtcgagaatcaccaccattgcaccactcgttgcttcactcgatgtgaaggcccgtccacgaccaatcatcactccggatacatcgaagaaatgctcgtcgacaccggtgatgctcgccgacaccttgtcggtggtaccgggcgcggcgattgacgaggcggcaccatagttcgtcggcgagaagtactcgtagtcggtcagttcctcgcgcatcgcagtgatctgttcgtcgtcaagggtgccgacgtccgtgtaaatcgaaatcgtgcgcgccgcgttcatacccagttcgccgaccagagagtctcgaatgccaccgatcagtgaggtcatggtaatcaccgcggcaatgccgatgacgatgccgagaatggtcagtgcgcttttgcctttgttcgccctcagtgcggagccggtttccgccagcagatcccgtgttctcatcggtacatcccttcacgcagtacgccgtcacgcatgtgcaggcatcggtcggcgcgttcggccacttcggggctgtgggtgatgagcacgatggttttgccttgctgcttgagctgttcgaacgtgtgcatcaccgcatcgccggttttggagtccaggttgccggtcggctcgtcgccgagaatcagcggcgggtcctgtaccaacgctctggcgatggccacgcgctgcatctgaccaccggagagttcattggttttgcggtcgaacagttccggactcaacgccactgattggagtgctttgatggcacgcccttcccgttcacgcaccgggcagtcggaataggccaggggcagcatcacgttgcgcagcacgctggtgcgcggcagcagattgaaggattggaacacgaagccgatgagccacccgcgcagttcggagcgttcgtcatcactcagattctgcacgtccatgccgcacaggcggtaggtgccggatgatgggcggtcgagcaggcccagcgtgttcatcagcgtggatttgccggaaccggatggtcccatgatggcgaggaactcgccttggcgcacattcatggtgatgcctttgagcacatgggtgtaggtgtcgcctgtctcgaagatgcggttgatgttttcaacctcgatgacgttggctgtggcggtgggcacggcaatggtctcattacgccgtttgccgcgatttgcccggctcgcgtcggaacgaaacgggaacatatcagcgtgccctttcgtccgaagccgcggtttgcgaggtggaagaagcagcatcgccagtattgtcggcagccgaagcgccatcaagcatgatgacatcgcccttgctcacattgccttccacaacggctttggtgttgttcttggctttgaccgtgactcgcacccgcttgaactcatgggtttcggcgttggtctcgagcatgaccgcgctgctctccttaccctcatccacgatggcggcgagcggcaccatcaaagcgttgtcaatgctctgcatggtgattttcacactggccgtcatgcccggcttcagtttcggatcaggggcgggaatgatgagacgcacggcgtatcccacgccgccgttgccactctgcccgcctgccgaggaatcagccaactgcgacgtggtgctggcgatggtatccaccttggcatcgagcgtcagccccggcaccgcggagaacgtgactttggcgctctggtccttggccactttagtgatatccagctcattgatgttgacattgaccttcatctgactcaggtcggcgatctgacacaatggtttaccgtctgcgccggcggaagtggatgagccatcggaggaagctccgatggcggcaccgggcaccgcgctcatggtcagcaccgtgcccgagaccggagcagtgaccgtacgcttgttggcttgggcgaccgcctcgtcataggtggcttgtgcttgctgaacggcgacctgcgcgctctccacgccgctttgtgcagcgggcagctgtccggccgcatcatcggcagcggcttggccttcctcaccatcctgattacgtgcctgacctatggtcgcattgatttggttcacctgctgctgggcggcattaaggtttgagttcgctgctcgcagagccagatcggcctgattcacgtcgctatcgagcttgtcgttgttgatggtaaacagtacgtcgccggcgttgacggttgcgccttcctgcaccttgacttcgccgatggtgccgtcgatctgcggggcgacgacggtggagttgatgggttctatggaaccggtggagctgacttggtcgacgaaatggccacgttccaccgttgccgtggataccggagacacgcccccatctgacggggtaataatcgcgtgcaccaccataaagccgataatcagtaccgccacgacggcgacggcgatgatgcgatgcaccacgcgctttttcttgcgcgtctcacgttcgcgcattaatcggttgaattcggcgacttccgcgttctccgcctcgccttgggcaagggcgtcgacacttgcttccacggtgtcggtagcgtccaacggttgtatgattgcggtctgctgctgatccttctgcatgtgctctcccccatggctggctccgagcctcgtgcccggatactggttccaagcctatggaggaatggcgtggtttccatcatgcgcaggattgaattgatggggagttgtcatccttaaggattagttggggtggggaatttatgggctgttttcagtcttggctctcgccttcgcttccgcttttctctcccccagtcatgcttcgcatgacagcctcctcgtcagagggggcttatgaataagcaaagggctcgggacgaatcccgagccctttggcgttagcgaactaacaacaccgtggaggtgttatcactcgttgtcgccagcggtagcggcggtagcggtgacggcacccttcttgtcggtgttcacgccggagtacacccagtcggtgtagtccgggtggtcgtagcccttgtcgacggcgaactggaaggcctcatcacggaacttctcgagctcgtcgatcttgtcggcgtacttgtcggcgtcgatcatgcgcagggcctcagcggtcagctcgtagcggtcgatgcggttgacacgaaccatgtcgtacggggtggtggtggagccctcctcctcgtagccgtggacgttgaagttgtcgtggttcggacggtcgtagatcaggccgcgcacgtcgtgagcgtaggagtggtacgcgaacagcaccggcttgtcggcggtgaagatgtcggcgaactcctcgtcggtcagagcctcgtcgttctccttggcggactgcagggagagcaggtcggcaacgttcacaaccttgaacttgacgcccagttccttcagcttgtcggaagcagccatgatctcctgagtcggaacatcgccggcggcggcaagcacgacctcggcctcatcgttgttcttggcggtggaagcccaatcccaagcggcggcacccttctcgagctcggcacgagcctcgtccagggtcagccaggtggcagcaggctgcttaccagcgatgatggcgttgatcttgttggtggacttgtagcacttctcggcgatggccagcagcatgttcgcatcggtggcgaagtagatgccgatgacgtggtcattgtggaagcacttgttcagcaggacggaggtgacacccgggtcctggtgggagaagccgttgtggtcctgacgccaaacgtgggaggaga

SEQ ID NO: 3325 - DNA, 2894 bp, Unknown
  R151_18m  MAG No. k141_12305
aacgtaggcatcggccagtcgatccaaagcctcgctatatgcgccgttggccatacgcggcccggaatcggcctcgctgggaaccggggattcacccgagcccgccatatccggcgcccaaatcgggaacggcggcacatcctccagatcggcaaagtcggcgagcgcctttgcacagacgccccacatgcggtggtccaccgggtaggcgttcatcagcaccactggcacgccctcgccgtccctatatctatgattggccagttctattgccatgaattactccttcacattcatgcccccgctggcggggactgtcggcaaagccgactgggggtggtctcagacggaatcctccccggaccatcctccggcgctacgcgccacctcccaccagtgggagatagaaaactgttatgtctagattccggcccaagccagcgcctgccgcacgatgtggccatgcccgttgaccatctgcgccacgaaagtatccatcatgtcgctcttcaggtccacccattccacgtccagggtctcgtcctgcggcttgcagtcgccggcaatgggcaccacgtaacacaatgcgatcgcatgctggcgcggatcatagtattcgcccagccccggcgtggggaagaattcagccacggtgaacggctgcagtgaggtgggcagcaacggcagcgcgatatctcccaaatccttggccacgttacgggcaatcgcctcgcgcaacgtctcgtgatacagcacacggccggtgatcagcgtgcgctcaatggacccgtcttcggaaacgcgcagcaacgagccgacctgggcaatgcgccccatttcatcggtacgcaccggcactatctccacgtatgcgatgggcatttggtggcgggcccggttgatatcggccgggccaagccaccccggaggattgccatggcccgaaccgcccccgtgaatgaagtcctcgggcgtgatgttgtcgaattcgccgcggccacgcccggcatcgtaatcgccctcatcgggcacttcatcattcatgactggcatggtctcattatcgcgcgcattgatgaacatgggcacaattcaccgaaaaattgtctgtgaattctcaacaaagcgcctcatcgcctccatgcgcccgcaatccattcagcttggggcacaagcttgtgccgaaatgttgggtggtgctgggaaactggtacacagcatcaagcactgtgtttgaggaaggaacttcaatggccaccaccgccatcacttcagctgagtttgagaagaccattactgacaacgaaatcgtgttcgttgacttctgggccacttggtgcggtccgtgccgagcattcggcccgattttcgaagctgcgtccaacgagccggagaatgcgaacatcgctttcgtcaaggtggacatcgacgccaatcaggatctggctcaggctgccggcattcaagctgtgcctacgctgatgattgccaagcagggcgaggtcatcttccagcaggccggcgcgctgcaggcctccgatctagacgacctcatcgcccaggccaaggcgctggatctggccgccgccaaagcacagcaggcagcgcaggagcagcagtaagccttatcgcactgcggcagcggaagcgcggaaaagcccatatatagcgcttccttgcactgctaactactacatatgccatccgtggcgggtcgaacacccaccacggtttttttattcatccactcaacgtcctatgatggagagcagtgtgtacccaaccaaggagcgcaatgtcgaagcacgctgagcggacctcattcgtcaaaaccctgtctcggggccagtgggcgaagatcgcggcggccgtggccgcagtgggtctcattgccactgcaggcgttatatctcgcgacttctatcagtcgagcaccgctacaccttccatcaccccaacctcattctccgccactgatggtgcggcttcccgttcggcatcccgcggcgcgctcaagagcaccacctacgtgaccgtcaaggtcaatggcaagtctcgcgtggttctcggcgaaaaagccaacatgaccaccgtcaaggatgtgctggaaaccggcgatatcgtcctcgatccggaagacagcgtgactccgagcctggattccaaggtcagcgagtccacagtcatttccatcaaccgcgccaacaccacggtggagaccaccgacaccgaaatcgccttcaatgaagtgcgcaaggagacctcgagcctgcccaagggccaggagaaggtcgagaccgaaggcgagaagggcgtgctggagaccacgtctctggtaacccgctccggcgatcaggtcgtttcctccaatgtgttcacctcctgggtcaagaaggctccggtcgataaggtgattctggtgggcaccgccaccgtgtcttcgaccagcgccgccagtctcggcaccaccacgccggccggcgagattcagtcctgggcgcatgactacctgatttccaacggctactccgaggccgacttcaccgccgccaacttcatcatcagccacgaatccggctggagccccaccgccacgaacccgtcttcaggtgcttatggcctgccgcaggcgctgccgggcagcaagatggcttccgcaggtgcagactggcagaccaactaccagacccagttcaagtggtttgtgaattattgcaacggccgctatggctcgatttccggcgcgtacgagcattggcagaagcacaagagctactaagccagccaaatcaacacgtacacaacaggttccgcgccgcaagaaggctgagtgaaacccggcccaaacgccgagcgaactcatgcacatgatgccggttcccaatcatcgggga

SEQ ID NO: 3326 - DNA, 2847 bp, Unknown
  R151_18m  MAG No. k141_12387
accggttcaaatccggttgggggtacgacgaacaactcttcggagttgctgcgccaagccaaattggggtgtggtgtaattggcaacacagctgattctggttcagccattcttggttcgagtccaggcaccccagccaataaccctcgcggattagcgagggttttttgtttttacacgtcctgctcatgagatacggccgagagggtaatcctgaatagacaactctggggcaaagactgggctatagtcccaatccgtgactcaaaaacggcagaaatcccgcgtccgaacgtaaggggcgcgggatttctgccgtttcgggccgtgcaggaccggccgacatcgcgcgttgccgcgacttgagcgctgtccgatcctgaaaacgtgagggagaccgacctcgtcttacttcttgaccgcgttgacggcgtcaacagccttctgcagcgacgtggtgtgctcgtggtaccacgtgacctgctgttcgagtttcttggtcgcggcctggtagcccttggtgtcgtcggccacgcagccttcgtacgtcggcagttccacggtcagttccttggacagcgcgtcgagagcggagacgtccgagacgtctgccttggtcagagcggcggcttctgcagcatcgccattgaccaagttgttgtagtcgttggtggtgttacgtacgtcttccgaggcggcggcgcaggcggccactgcgctatcgtactgagacgcgctgtatgcgcgggcgccgaacaccgcgaccgcggcgataatcgccaccgccacgatggcaatcactatagcgacccacttcgccactcgcttgttgtgcggctgtgccgtcgcttctgcttggttctgggattcgggctggttgccgttcgcctgctgtgcgtcagtcatatttacctctccttctcactgcccctgtttgtatcttgcggagggcctgtttcaaacaacgggtatccaacatatcgaggagagccgagattgccgggcgtttcctactggttgcgctgtggcgtggccgtttttgtctcatatggcgaaagtatgcgccagaggctattgccggccggtgacccacggcgcatccgaatggacgtgcggaatcatcatcgcgatgaccgccagcagacacccgagcatcaccatcaagatgatgttctcgtgtccgtgcgcctgcagaagcgcgccggtcagcgcgccagacgccagcgccagcattacgaccgcacgccgcccgagcttcgactgctggtggccgtgtgccgaagcgtctgcgacgacgccggtcagcgtcatcgtgagcacggtggtgggcaggtccggcaccgacagcttgcgggcggtggagttctggatgcccattgccggggcgagcagcacgatcagcaggatgatgtgcaggtcgatgtgccgtgcggtggggaagttcaggctcggctgtgaggcctgtgaggcctgggtggtctgtgcaagccgtgcaatcgaggagacgccggacgcatcgtctgcggggccggtgatgagctggttcaaaagatagacgccgattagcgcggcgagtacgaacgacgcctgcacgcaggtagaaaccaacagatgcttggcccggttctcctcgaatcgccggatgatgcgcccgccgataagcgcgccgaccatgaaggagacgagcgtcagcgccgacgtccaccagacgaagccttgggcatgggcgatcgaaaacccaagaaacacgatgttgccggtcacgttggccacgaacacatgccccagcgacaggtagctcagcgcgtccaccagcccggcgacgaacgtcagcaccaccaaggcgggggagagcagaccgtatctgtcttccttgcggggaaccaacgtgcgtcctgcttcggcaagatgtgatgtcatggttgcgacgaggctccttttcgggattgaaattatggcgagaacatgcgtcggtcgacgccgccactctactccctactcccgtacggttcctccggtttccgctcgtgcgcagatcgtcgggacggagaagacgccggtgatgcagatcgatgtgccgaaatcccgcagcgtggtctcgaccaagtcgggcaaggtgttgcgacgccgtatgaaggtggatggtacgccggagagcgtgccgatgtacccgtacgagatcgccacgcgcctgtccgatttgggacgtttggacttttccgcgcagccggtgccggatgcgacccgtgatgatttcgatccccttgaacgcgaccgtctgcgccggattatcggcacctaccaatccagtgaccgtaatttgttggaactgaccgatgaggagctggagaaatccctgcaattgacggtgaccgtcgatggcaagaccatgccgacgctgaccggtttgctgctgctgggcaagggggagtctctgaaacgcttcgttccgactcatcgggcgtctttccaagtcatgtctggtacggatatcaaagtcaaccaagactatgccggaccgttgctgaagaccatcgagcaaatcaacgacatgttctctccttggaatccaagcgtcgagctatccgtcggtctgttctcaatgatggtgccggaattcgaccatcgggcgttccgagaggcgctggtgaacgccttcggccatcgtgactacaccctgctgggacgtgtgcgcgtgcagttggatgatgcggggcttaccatcgccaatcccggcgggttcgtggagggcatcaacatccataatctgcttaccgccgaaccgcatggtcgcaatccctgcctgatggatgctctgaaacgaaccggattggccgagcgtacggg

SEQ ID NO: 3327 - DNA, 7593 bp, Unknown
  R151_18m  MAG No. k141_12603
cctttccgaacccggaagctaaggcctggctgcggcgatggtactgcactcgagagggtgtgggagagtagcgcgccgccgcattcaacgtcggaggaccttccggtcgagtcccctacgggattcccggaaggtccttttttcgtattcccctcgggattcccgtcgagcgtcacgctccggaaacctttttttattccgtcttgtctttttccggggttcccgccgggcgcatcgcctcgggaaccccttcggtgggaaggggttccgtccctgtctgttctggagtcggctttttctcaatataacgcatggccaccggagcgtttcccgccacgtcatccctgccagagagagctacgaaatcgagtatcaaggtgaggtgacaggcacgattcgatataatcgatacccaggaactcagcgttccgctcatgagggagcgtggcatgggctttccggggaatggaggatgctcttggcagtggcagagaacaatcccgtcgatgaggacgaggaggcgctcgaggggtttctcaccgactccgaatgcctggatcccctgcgcaagtggacgagcgggttcaacgcgttcgatgttctcggaatcacgagctccgagatccgtcacagcaacgtgctcgcatggctcatgaatcccgacgggaaccacggattgcatgatggcgtaatccgcggtttcgtcgactatgcggccaggcatgcggaggacaacggggtgttcgacgatctgctcatggactgcgacggattctcgattcgacgcgaatggtgccacatcgacatcctcgccgtgaacgacgaggcgggatacgtcctttgcatcgagaacaaggtcttctccggcgagcacgacaaccaactggccagataccgcagcgggatagagagggagttccctcattaccggcatcgtttcatattcctcactccaagctcctgggatgcctctgaatccgactggctctccatgggctataaggacgtgctcgacatcatcggccacgcggtcgaggcgtccacgccggcaccggagccggcacggttcatctcggaatacatggataccgtgaggaggaacatattggaggacagggatctcgaacgcgtctgcgcgaaaatctacgcgaagcacaggaaggcgttggacctgatctacgagcacaggccggatgcggtctccgccatctcggattgttgtcgggaatggatcagagaagtatccgggaatgacgggatgatcaggttccacgaggacacgggcgataaatggaacacggtgttcgttaccgaccttctgctcaggctttttcccggcgtcgatgagccgggcggtttctggggagggcgttgcccctgcgtctaccagatccatgtgaaggacgacagggacgtccccagcgtgaggttccaactggttttcaacttcgacggtcttgacgaaaaactgagggaaaaatgcggggagacgatccgcgcgatcaacgaggtgaatgctccgaccgccaggcccggaaagcattggtgcaccattcgaatcacggaatacgcatcggtccccatcgattccgaagaggactgggacaattcgttgagaaagacgctcgacagtggcctcagacatctcgggaatctcgaggacaggctctccgagacccaacgggtcaggagtctgattgccggcgcatccattcaggaataggcatccgaaccgggcgacgtccgtcgtgacacggatgggaggcaggagcatacgcgggaatacgagtaccgtttggacatcggatgtttgtgttcggcttcctgcgggaaggaatgtttatttccccgattggcaacttacggctggacgcgtcccggcttggaccatcggccggaatgagggcggcggcaacggcgtcggggtcgcgcggaagctttccatggggcatgcgtccgccgggggcggtgaacgcgacctcgatgtcgccgttccgcttcacgagcctgcggtccgcggtcctcttcatcggaagggagacgatcgaggggacgcgggagacatattccgagtatttcatggctccgagcgcaggggatcgccatttccgtgtcttccgggtgccggccagtgtcttccaagcgccggtcggcggcgacgggaaaccgctcgccgatgtccttcgtggcgaacgggctccgatggatgcgctccatcgccggcccgaagcagcatgcccgaacgcctgacaatgtattaggagcgtcggaacgcaacggaagacgggccggggccggaccggtcacggagcagcccccgcgcgtgggagcgggcccgacggttcatgggaacggccgtccgacagtcgttcccgacgggccgccgagacgatatgggggtcggcgtccctccggaacgcggcgtgtcagaaagaagaggcgaagggggagaggggagtggtgtcgcggctgccgtccgcgacaagggaatcccggcttcgtacggcggagaggggtggatggcgcgtcgggtggaagacgtcccccggcgctgttccgtgttattctgccttccgtagcgggggaaccaagccgatccgtccggagggaggcgcgcatgccggcatcgttgaagaccatcgtccgcggcggggtcgtcgtcgtatcccgacagcgccttgagggccccggtcccggcatcccgtcccctgcattccaggagcacgtccaggttgcgcagcgcgcattccgcaatcagccgcgcgtcgatccggtccgtcttggcccgtcccgcgaccatctgcgcccttgtccacgtccagcccgagcacgcacccgtatcccatgccgtccagccgttccatcgccgtctccctcgcagtcgtcatcggttgcggcgggtcctgacgcgggcgcctgcacccacattacgaagacgatccaccgtcgggtagaatcggttcaggtgtcctggttcctatcagcggtcgccacacgtccgcccccggcggcgacactcagtaagccgtccgtcctgacaacggcggcggggagataaagtcataccggggaccgagacccacacaggctccactctctcatgaaacccactcaacaaggtaatgggagagaagcacggcgcagccgttggaaaactgtatcggccttcggccgattcgattgtttgacagacactttcacaattacggtcgatgtcataattggagaatcgtcggaaatgctcggatcggaaacggagatacgcataccatagcttgcgttcccatggagccgtggaacggggaagtcgctgtgctcgcgcgacgttgcgcctgtcatacgatgatataagaaaagcggcttttccggttcttcggctctacggccccattttggtatcgagccgatacggatgatcagctggtatgtgatgtttctggtggctgtgtcgttgatgatttcgatttcggtgatgtagactcaaaagcagatctattacgatgggtgtaggccgttggcagcgtcgcgatatcggtttcggtgagcttcggtcgtttgtgtcggtacggtgaggagatgcatcatggaggccgcggagaacaggcaaccgacgatttacgatgtcgctgcggaggcgggcgtttccaagtccatggtctcccgtgtgatgcttggcaaggacggtgtgcgtccggagaaggtggagcgggtccttgccgcggcggagaagctcgggtatgttccgagcgccatggccagcggtctggcgtcgaggcgtacgaagacgttgggcgtggtggtcaggaacgcgaaactgccgttctacgggttcctgcagagcgcgatgcagaagcgggcgcgtgagcgtggctatcagatggtgtccatcagtggtgtggaggagttgccggctgatgatgcgcgtgcggcgttgcgtgatctgatcgcccttcgcgtcgaagggctcatcgtgtgctcggccatgttgtcggtggaggacttcgctccgttcgtggaccgtatcccgttcgtgatggccgggcatgaggattcgacccgtacggtgtcgtcggtgttctgcgatgaaggggacggcggtcgcaggctcgcccagtacgtgcatgatttcggacatcgggaagtggccgtgtttctggttcccaaggggtattcgatcagccagtacagccgtggcgtggctatgatcgggttgctcagggagctcggcatttccgtgaagatactggacgtgcaggcggcgggggagatgggcgccctggtggacgaggcgttgtgccatccccgggtcaccgcgtacatgtgcccgtccgatgtggttatgctcgaggtgatggacgagttgcgccggcgtgatgtctgcgtgcctcgagatgtttccgtgaccggttatgacggtttcggaccgctcgcgtccccgtatctcgggttcaccacgtatcgtcagccgttggaagagatcggcttccgtgcggtggatctggtgctcgaacgtctggatgacggggagcatgcggtggaggcgatacctgtcaagggggagttcatccacgggcgtaccgtggctcttccccgttgggaggcccggtgagcggtggtcgcccctgcacggcggtgtgttccgcctgcgccgggtgtcctgaggggcgtctcggatgtctttcccgggccggttccctggttttcgtggttctcatgacggtagcagggcgaatcccctggcggcggcgtagcctaggatccatgccaggggcagggtcgcagcccatgcggtgaggattctcccgacctctccccagcgaatcttgcgccagtcgttcgtctgacaggtgccgatgagcgcgccggagatggattgggtcatgctgacggggcttcccagcgtcgagctgacaagcacggcgagggaggccgcccacagggtgacccacgtctgtctggagtcgggcacgatggtgccgcgttgcagggcggtggcccctttgggcatgccggtgaggacacccgcaaggaacgccgcggtgacggtcgcggtgatcgcgacgtcgtgcgtggcggcatccaggctggttcctatggcggcggaaaacagggctatcatcttctgcccgtcgttgctgccgtaggcgagacaggtgagcaggaacccgaggaagaccatggtggtcgaggaccgcggcgtccgggaatgggccagcaggtatattgtgcgcgagatggtgaacgccgccaggggagagagcaccgctattccaagaacgcgcagcaccaggtgccagttgggctgtcctccggcgaatcccgccccggaggacgcgccgaccaaggcgagcgtgatcgaggtgggcacgccgccaccgttgagcaccagcagggtgaccgatgccgcaatgagcaccgttgccagcagaatcgggccgtacgcgtcaccttcagtgggggacaccatggcgactaccgtctctccgacgcgactgttgattgcgggcagcaggacgactgccgccgacagcatcaggaaggggacggctgtgacccggcgcgcggccttgagattgatggccaccagcggcgagccgtcattccttcctccgagcaggcagaacaccaacgccaacatgggaatggtccacatttctcacactccttgctgataacgctcccaatgctgtaattactgagtttctaaatttagcattgagttcagataatgttcattgaaaacttaaaaaacttgaaataacaccgattagactttttcgtgtcgaaaggatatactatgaatcactgggagcgctccaaagatggggtgatcccgcaaaccaacgaatagagaagcaaccgataatcataaacactgcacccggaatcccccgcggatgcggttcgcaatcaagagacgtaaacagattcttccgtgccaagtggctgggacggtcaaggacagagaaaagaaaggaaaacacgggaaatggtgtcatcaaccaagtcgccgaaatccctgcgagtcgccaggacgcgcagcggacgtgtgacgaacgttctcgcggcaaggaatcgtacggtcggcgcggccatgctggttccggcgttggcgttgctggtcgtgttcgtgttcggcccgctggtgcgcgtggtcatgatgagcatgcagggcacggacatcttcggttcgtcctccggcttcgtcgggctggagaactacaggacggtgcttacggacccgatgttcgttcaggtgctcatccagacgttcctctacgccgtgctggtcgtggtcgggcgtattgcgctgggtgtgctgttggcgatcctgctgacccggcacatcatgggcatcaaggtgctgcgagtggccatgacctcgatcgtgagcgtgtccgtggccgccgcgtccctggggttcctggccctgttcggctcgaccggcgtcatcaactcgatgatcgagaggttcggcatccgcccgatcggattcctgaccgacccgaagtgggcgttcttcacggtcacattggtgaccatctggaccggtctcggattcaccctaatcctgctgtgcgccgcgattgacggcgtggaccaggagatcctcgaggccgcacgcatcgatggcgcctccgaggcctgtatccagtggtccatcgtactgcccctgatcacgccgaccctgttctacatcgccgtgaccacatgcatcgaagccctgcaggcgttcgcccagatcaacatcctgaccaagggcggtcccggccaggcgaccacgaccatcacgtacaacatctacaccgccgcattcaacgcgggcagcgcgaacttcggcatcgcgtccgccctgggcatcgtgctgttcctgttcgtgttcttcctgaccctgctgcagttccgcttcctggaaggaaaggtgaactactgatgatccagaagcgttctcccatcagccaggccctgtgggccgtgctggccttggccgtgaccatcctggtcatgctgcctgtcctgtacatctacgtgggtgcgttcttcttcgacgccaacggcctgttcaggggcttcaccctgggcaatttcgcccgcgccatgtcccagatgcccctggcccagcagctgggcaacagcatcatcgtgaccatctgccagaccgccggccagatcgtcaccgcgtttctcgcggcctacgccatcgtgttctgtaacctgaggcgcccgggcatgtggatgatggtgttcctcatgagcatgatggtgcccggtgagaccacgctcctgtcgaactatctcaacatcgccaactggggtctcatggacaccatcccggcggtcttcctgccgttcctcgtgcagggcttcaccgtgttcctgttccgtcaggcgttccgctccttccccaaggagctgcgcgaggcctccctgatcgatggcgccggacacctcaggttcatggtcgacgtgctcctgcccatcgtcaagcccaccatcatcgccgcgaccatcaacgccatggtcgccgcctggaacggctacttctggcccctgctcgtgaccaacaagcccgagcaccgcaccatccaggtc

SEQ ID NO: 3328 - DNA, 9871 bp, Unknown
  R151_18m  MAG No. k141_12634
cgcgaccatcaacgccatggtcgccgcctggaacggctacttctggcccctgctcgtgaccaacaagcccgagcaccgcaccatccaggtcggcatcacccagctgagcggcaccgacggctccaacatcggcgtggtccttgcgggcgctgccatcgcggtcattcccgcgatgatcctcacgctcacgttcaacaagtccctgcgcggcatgagcgtcgccggcagcatcaagtaagcgcaatcatcgtccgttccccaaggcggacctctacacaaagcaaccaatccccattcacagggaaccccgcgaggccatcgggcaccgcggaacgattttcggccggcggccagcgagccagccggcacaacaagaaaggaaaacgcaccatgaggaagtccaacctgctgaaggcggtcgcggtcgcggtcctgcccatgctcgtcctgtccgcctgcggctccacgtcggacaccgacgccgacgcgaagaccggcgagcagaccgtcacgttctggtactcgaactccggcccggccgtggacgccatcaaccagctcgtctccgagttcaacgacgcccacaagggtaagatcaaggtcgaggcctcctaccagggatcctactccgatgtgcagcagaagttctccgccgccgtccaggccaagtccacgccctcgatcctgcagatgaacgacacgtccaccggctatatgatcgacagcaagatgaccaccccggtctacaagttcgccgagggcgactccgacttcgacaccgccgacctgcagcccgtggccctcaagtactacagcgacgacaacggtctgctgtccctgccgttcgccatcagccagcccgtgacctacatcaacaacaagctcgccgaggaagccggactggacgtgtccaacccgccgaccacgttcgacgaggtcgtcgaatgggccaacaccatccacgagaagaccggcgcatacggtttctccatgaacatggtcgactcgtggatcctggagatgctctccgccagcagcggcgagctcatcgccaccccggacaacggccgcggcggcaaggacgtcaccggcgtgaacatgacctccaaaacccagctcgacatgttccaaaagatcgtcgacatgttcaaggacggcaccgccctgaaccccggcaccgactccagctccatgatgaccgcgttcacctccgacaagctcggcctggtcctgacctcctccgcctcctacacgtccctgctgcccggcgactccacctcgaacgtgaccgtcgcccagttccctcatgacgcctcgaacaagaaggccggcaccccgatcggcggcaattccctgtggatcgtggccgccgagcactccgaggccaagcagaaggccacctgggaattcggcaagtacatgatgaccccgcacgcccaggccgtgttcgccaaggcctccggcaacctgttcgccaacaccaaggccgtcgacgagaccgaaggcaaggaggccttggccgatccgaacgtgcaggtgttctacgaccagctcgccgccaacccgtccaccagcgtgtccctgggcgcccgcaccggtgcctacccgtccatccgcaaggatgtgatggcttccttcaacgaggtagtcagtggttccaaggacctcaagaccgccatgcaggaggcccagacccagtccgccaaggatatcgccacctacaacaaggccgcaggcaagtaaacacccgcgatacccgcaaaccccaatcggccttcccgccccggtcttccctcccggggcgggaaggcctgtatcacccatagcctcccggcagtagcaaaggagccgacatgaacaccgcagccacccccattcgattcggacgcgaacaatacgcgcagatcaacgccgatctcaaccaggcatgcgcccgctcgccgttcgtcatcgccgcccaccgcggcaccccgcgcggcgacatccgagaaaacacgcttaacagcgtcctcgccaccaagaaagtcaacgcagacatcgccgagatcgatgtaatccgctccacggacggcgaatacttcgccttccacgacggcaccgagatggcccgcctgcgtatcaccgacgacatcctgtccaagacggccgccgaacttgatgaactgcgctacaccgaataccctggcgcctactacggcaacgtcgaaagggtcgctcatatcctttcgaacgcgcccgacatcctcatcaacatcgaccgttcctggcgctactggggcagcggattcctcgactggctcgaccagttccatctggaaagcaagctcatcctcaaatgccccgtcactggaggcttccagcaggcgctccacgaccatgcgaccaaatacatgttcatgggcatgatccaaaaccccgacgaacttgatctgttcgtcaacgacgaacagatcaacacggtcggtgtcgaactcgtcgccaccaccgaggacaccccgctcgccgaccccgcgatcttcgccaggatcaacgaactcggcctgtacgcattcgtcaacgctctcgacctcggcaacggatactgcggactcaagggcatggacgacacccgctccatcctcgaaggcccacaagcaggctggggcgccctcctcgcccttggcgccggcgtcatccagaccgactggcccgagaagctcgacgaataccgccgcaccatctcctgacgaacgacgctcccccctcctccttcctcttcccaacggcccctgcggccgggcaatctatccacatggacggccccggccgcaggggccgcctgccctgaacatacccacaagaaagaaggtgccacaatgccgtggttcaacgcgaagaacccttccgacaaagaccccgtcatgagcctgctccgggaacaggtcgccaccacccgcaaaggcgtatccatcgcccttgacgccatcgaaggccacaccggcatcgaggaatcccggaaaaacgtcaacgacatcgaacacgaaggcgacgagacccgagccaaggtcgtccacgcgttggccaaggcatggaccacgccactggaccgcgaggacctgttccgattctcccgatccatcgacgacgtactcgacaacacccgcgacttcgtacgcgaactccacctctggcaaggaaacgccggcgaacacgccgacgtcgccctgacccacgtgaacgtcgccctgcgagacctcgaactcgccatggccgccgaaggtgccgacatgcgcaaatactgcctcgaagccagcaaggaatccgcgcgcgtgcgccgcgcctacgaatccggcctcgccaccgtctacaccggcgaaatcaccatggacaccctcaaaacccgcgacctgctacgccgtatcgacgtcatcggtctcagactcggcgaatcctccgacgccatcctcgacggactcgtcaaacgcggtctataaccactcggtcgttcaacaccatcagacagaacaacgcgtatagaagggcccgccgtcaaaggccctatgcagacaatgattgcaaggaagtagcaatgcgtaagaagctgattcttgatttgggtaccggtatcgatgacgcgatggcgattgcgtatgcgttgggcagtgcggatgaggcggatctgatcggcgtcacggccacgtacgggaacgtggcggtgccgttggcggcacacaatgtgttttgtcaaattgaagtagtctagaagggctggtgccgttttgttggacttcgttgttcctgttttctgattatgccataagaccgagctcgcgccgccggtccatgatgtccgtgtccgaactccgtcttgatccgcctgtcccggtaccggaccatgtactcgtcgagcataccgatgaacctgtccatggagaccccggcgaagctgcgcttgtggaagaacccctgcctgggccggccgaagaagccctccgcggccgcgttgtccgggctgcatcccttcgcgctcgtcgaacgcgtcagatcgtgctccttgcagatgcggatccattccggccaccggtagtggcagccacggtcactgtggatgacgggattctccccgtccttgagcgtggagcacgcgtccagcagcatgccgttggccaacgccgcgttggggctcgtgccgatcgtccacgcgaccggaagcccgtcgtagcagtcgatgaccggtgataggtgcgccttgccggcggggatcgagaactccgtgaggtccgtgacccacagcatgttcggcctctcggcgtggaaatccctgttcaccaggttcttcggcgccttggcgggctcgcccttgtacgagctgtaacgcttcgcgctcttgaacaggggcaccagaccatgcgaggtcatcagcctcatgacccgtttggcagataccctgacgcccatgctcttcagctccaggtggatccgcttgcatggattggctacagtgtattagacagtccgatgagggacgatcgaggagacgcgagggatatctcaaggagttcaaggcatggtctgggcgagtccatcaggaaaccattggcttggatgcttctcttgggaagcaaggcgttccaaggcccgaacatggtcacgcggagaatcgagccttttccgctggggaaggccgatgccttcatttcgcttttcgccgctgaccgcgtatgggtcgggcggaaaatcaactctctattcggatcgttgctgttgacgaattcgaaaggggaattctccaacctgagataacttttcgccatgcggtacaggctgtccgcatctttctaaagaaacgctcgatctgcttggacatggctcccctcgctcttcatcattggctttttgaaacagaattctagccgtattgccggtacagtccgggaaagtgttcttggatatcccatcttccgttccgcgctttccgactccagacggtggaagaaagcccgatatcttagatggacgtttcgtgcggcggcgccgtgaccatgggaacgacggcaggggagtgacccgccttttggaatgacggtttccttgccgtcaacgccggtcggatgacgcatgctcttccggcagataaagccgttcggagtttgcgtatgacagcattccaatctcccggcatgcctcacggacgtctaggaatccgttctcgacacgtctcgcatagacgtctcccaccgccgcacgccagaccgatgcctcaagtgcgtgggtctctggaatcccgatgccatccgatccgtaaaggagtcttgccggcggacaccattcaagtgtccgctcgatgatgtcccgcgtccgtgggcccgcgtggagcgttgtcagactgagatccatgtacacgttccggtgcagcgagcacagccacgcggcctgtcgttcgaacggagcacagtgcaacaggacgatggggacatggagtccggcagccctgtcaatcaatggttcgaggagcgttgggtctccgtcggacagtttggcgtcggaatccccgaatcccacatggaactgaatcggcagtccggtttccaacgcctctgagaggatgaaagcttcgattgccggatcgtcgacgcgtggattcggtttcctgagggagtcttggacagcccggatgagatccgcgtcatctggaggggtccaatcgattctgaaaccggtgcggtacgcggcaatgcttttgaacgcgaccgtggattccagtccgctttcctcgagaaggagtttgcggaacgtcgtcgcgaacgcctcgggggcatctcctatggcgcgcagcgcgtcctcgcccaccgtctccagccttaccgaccggtatacgtgtccgccggagacggagtggaacaggtcggccggcagcaggaagtctctcgcgcacccatcgtcgagaatccatgccttggtgccggttcccctcaacagggtttccgtccacttccgcctgtcgtccggggacaattccttctgccatcgcaggtagccggcaagatccgttccatcggtctggataccggaccatgccgcgaaacgcggcatgatatcacgcgtcagcagtcttccggggacggtgcgtcccaattcgggaagcatgatttcgtctcctgtgagaaacaggcattcggcgtattcccttggtccgggtgtggtccggtagatggagtgggcgtggtcatcgacaagcggaaccgtgcgggcgtaatcacgcaccgtttccgtcggattgtcctcggcgctctcattccgcatggcatccgtcaccagatcaccagatgttgcggaacaggtagacgagctcctcgtcgggggtgtccttgtatgtttcggaattcaggttccggattgctgtaatcgcgtccaccaagccgttaccgaggaactcacgtagcactgcggattcctcgaaggccttggtgacggcatcgaacgtggctgggaacagggagagcccgcgttcgcaacgttcctcctcgtcgtattcggacggaatgccttcggtcggtttcgccagtggcaacctgttcctgattccgtccagtgcgcccgcgagcagaccggcgatctcgacgtacgggttcgtggccaggtcgccggccttgatttcgatgttggctccatgcggattacctagggttgcggctatgtagcggatggcagtctccctgttctcgagaccccatccgattgcggcgccggaccacgtgtccggctgcagccgcaggagggataccggagaaccggcgagcagtgccgtgagctcggcgagatgacgatgaacgccggcgatcgcatgggctccatcctcgctcaggccgtattggaggcctccgccggacaggatcggcgagccatcgtccacgcggttgagagagaggtggacgtggcctccgttaccggtctgatcgacgaacggtttcggtgagagcaccgcggtgaggccgtgacgagccgcgacgcgtttgagcaggagcttcaggagcacgacattgtccgccgcgcgtaccggatcctccggggcgatgctgacctcgtactggtatggcccccattcggtatggagctgttccaaggtgattccggctgccccggctgcggcgatcaggtcggagaagaactcctcctggccgatgaacggaacggctccgtatccaggccatggtgttttgaagatgtccgggttcctctccagcgccgtttcctcgggcagtaggaggaattcaaactcgtgcccgaacttcgccgtatagccgagttccgccgccttgttcaccacattccggagtgtgttgcgggcgtcgtattcgattggatccccgttctgttcgacgaggttggttgggccccacaggatgtgctcgtcgagcgggcgcacctgcgatgcgtctagacggaggcgcaggtcgccggtcacgttgaagatctcgttctcggcgaagttgttgtcggcgttgaacacgacccagaccttcggcgctccgactccgtttttggcgaatgtgttcaacctttccgccggtacgttcttggctctgatcacgcccgcgaggtcaacgatggttccttggacgatccgatgcgtagaggccgggaagatgctgctgttggtcattcctgtttccttttgtttgtaaatgttgttgttttccgatgggttcacgcgaaatacgctgcgaggttgcgctcatcggcgaggtgacgggtgaatccacgcgtacggacggcgatgatggccagtcccacagcgatccatgcggctccgactccccaagccagcggtccaaggccggtgaagatccatacgctgaccgcggcgccgatgagcggtgacacaagatatttcacaatggacttgatgctcttgtcatcgttcttgatgaacagatgccataccacggtgagattcagcaggatgaagctgaacaacgctccgaagctgaccgtgttgccgaggatatcggtgttggtcgtcagggacaggagcaatgtgatggcggcgacggtgacggtggccacgaccggggtgtggaacttggtggagagcccaccgaacgccttgggcagaatgccgtcgcgtccaatcgcgtagatcacgcgggagacgctagtgacgcattcctcgccggaggcgagggagaacgacaggaccaccacaatgcttgcgaatatctggagggcccgccctccgacgataccgaggatatcgaggaatccggaatcgggattgacttgtgtgtagtcgggctgtaccgaacccgcaaggaaggtgagcaggacgaagctcagtccgacggtgaccaagctgatgatgatggcgcggggtacattgcgccggggctcttgggcctcctcgctgagcgtgctgatggcgtcgtatcccatgaacgatacgatgacgagaccggtggcgctcaacacgttggagaaactgaaatcattcggattgtagaaggcggccgccgagaaatgcacggtgccgtgtgccacggctaggaaggtggcgccgacgaaccatacgatcaatacgagctggagtgcgaggaacgccttggagaatttggcaagtattccgacgccaagcgaggagattgtggtgatgatcgcgacgatgatcacggcccacagccatccgggcacctgcggcacaagctgggtgaggaagctcacgcctactagggtcgtgacggacggaagaaggagataatcgaggatgatgctccagcccgcgatgaatccaacgcctccattaccggttccctgacggacgaagttgtatactgatcccgcgtacggatagagttttgacaatgctatatagctgaaggccgtgaacagcatggcgaccagtccgatcacgtatgcggtggccactagtccatgcgctccgcctacttgggatccgtagaaggcgaccggcgcgaccggaatcatgaatatgagaccatacgtgatcaggtcggacagtttcaacgtcctgttcaatgtggtttcctgggggacgtcggaggacgttccgttttgtagtgccatatttatcccttctctttttccgtccaaaggacggttaatttatgccatgcgtttcgtggcttcatatgcgtatgctcgaatatttacgtccttcatttgaggattgcatgcatgatatgcggaatgacggctcggaaacgctgtcactcttatcgtttctggcgctggagcgtcataagaagttgcgataatagggggaatttataactggctcatgaaaacggtgagtgccggattgctgtagatggtcccacaggtttcctgtgctgcgctcatagtgcaatatcggcttttctgcaaacagctatgccgaagtgtcggttggcgctgatagtcatatttcaatatatttattgaaatagataaataaaatatttcgctgggactgtttctggaaaggcttccgaaatggccgatgctgatccgaagccggcgtctccgcaggcattccgtccgggggtatcaggccgggtgggcagagatcgcacggcagctgcacgtgaacgaaattgggtacttattccttatatatagtgtttgaggacgggatggaacgatagacgtccctgcgcagatgccacctcgagttgtgaagcgttgcattggaattgcgtgcaacgcttcaataaaccagaatgtgtccgcagccccctaccgatatcaatcgctatatatcgacaatatattgcgataatccaagaatatttgatgattagtcgacgatgtcggctttgtagaagttcacgtaggaacggctcggcgtcggaccgcgctgaccctgataatgcgagccggtgccttgcgaaccgta

SEQ ID NO: 3329 - DNA, 7816 bp, Unknown
  R151_18m  MAG No. k141_12736
gtgtccctgtccgtggacggcaagaagttcaaggcccacgtgcctgcgggcgtcaaggacggccagaaaatcaagcttgccggcaagggcaagccgggcatcaacggcggcaaggccggcgatttgtacctgcacgtcaccgtcaagcccgatgccgcgttctcgatgcgcggccacgacatcgtcatggacctgcccgtaactgtgggccaggccgtggccggtggcaaggtcgaggccaaggatatcgacggcaatcccgtcaccttcaaggtgccggcaggctccagctccggtgccgaggtcaagctcgcgggacttggcgtccagcgcggcaaccagccgggcgacctgatcggccgcgtgcagatcatggtccccgccaagccgggtctggccgtcaagcacgccgccaaagaattcgacgaaaaagccggcgactatctcagcctgtaatcaggaggtgaacaatggcgcggttagccaaccaaatgaagcagttgtacgcgatgtgcgcaaccgcgctggtgatgggcagggccgatctcgacggagccgatgacgtcggcttcgacatcgaactgcccatcttcaccgtcggccaggcagccgaactgggcaacatccacccccagaccctccgccagtacgaccggctgggtctggtccgtccgcagcgcaccgatggcggcgcacgccgctactgcctgcgcgacatcgcccgcctgactcgagctcagcgcctaagtcaggatgagggcatcaatctttccggcatcgcacgcattttggccctcgaagaagagaatcgccaactgcgccgcgaagtcaaacgcatgcaaaccggcgaccaggagagcgttttcgccgcaggccgtgacggcaatatcgtggaggtacaacgctccaaccgcgcccgcctctggcgcaacgccatccgccgcgaaacccgcgaactgcccggccgcgataccgctgccgacaccacgcgcgaatccgactccacccccgccgattccaaatccatggtcctgtggggttggtgatttgctgttcggctgtcgtgcggagttggtgagataggtatatcgaatacgaatagttgaggattcactgcgacgtacggaggtaaccatgctgctcaaggccgtgttttgggatttggacggaacgcttatcgattcggagccgctttggcatgacggtgaaatcgagattgcgcacaacaatggcggcgagtggaacgaggacctcggttgggagtgctccggcactccggtgccacacgtggcagaggtcatgattgcgcatggctgcacattgagcgttcccgaaatcgacaaacagctcaaggattatgtgttcaaggcggaggtcgaacgtctgccgtggattcccggcgtattggacgtgctgcactcgctcaaggaggccggcattccgtccatgctggtcaccacgtcgccgcgccgtatggcggagaacatcatgaagcagtccgagggactgttcgccggctacgtctgtggcgacgatccgtacgaacacaagccgaaccctgcgccctatctggccgcagccgacaagcttggcatcgcccgtgaagacatggccaagtgcgtggtgctcgaggattcctcggttggacttcaggccggtgcggcatcgggcgcgactctgatcgcgcagactggctggattcgcacggatacttccggcctgggccagttcgcgtccatcgaatcgtatgacggtatcgatgcggccgcgctggacggtttcgtgcgccagcgtcttggtgagtaattgattacatcaccgcgcatgcagttctcctcatgagcggtggaatgtgttgacgatataccagcgaagcacgccatatttgtaaagaagatggcagtaatggctgctatgaggttccggtggccccctcttgtatcggggcgactggtagagtggttgacggttttcagacgaatgtctggttcattggacagattgttcacacatatagacgtataggactcataggaatcacatgggcttcgttaatttcatcctcgaactgctgaaggatccgcgtgccgcgattgccggttggattgccatgggcgtggcgccgaccctcggcttcatcttcctcatcgtatttatcgaaacgggtgtggtgttcttcccattcctgccgggcgactccctgctgttcgccgccggtgtgttcgccgctcccgatgccgcgaccggcaaggccgcgctgccgctgttctggctgctgccggtggtctggtgcgccccgattatcggcgaccagtgcaattacttcattggtcatttcttcggccgtcgcatcatccagtccggcaaggtgaaggccttgaccccggagcgtttggccaaaaccgagcacatgattgagaagtggggcccgctggccgtgttcctgggccgtttcttcccgttcattcgtacgttcatgccgttcatctccggtatttccggtatgcgttggagccgtttcacgccgttctcagtgctcggcggcctgtgctggtccacgttgttcacgctgctgggctacttcttcggtaacattccggcagtacaggaccacttcgagctggtgatcgtgctgattctgctggtctcgctcgccccgaccatcatcggtctgctcaaggccaagttcggcaagaagaagccggccaaggtgaccgatgctcagttggatgctatggaagacggcattaagaacctcgataagtaagcaagaaatgtagattaccgcataaggaatcgtcgtgaaaatgaaggccctgactgtgcatgtgaggtcagggccttttctgcatgagatgggcgtgaaacagcagcgtggttatccacatttgtcgtggacgacatgccggggtgtggataactcagcaagctagaaccacaatggtcgattcgtgttgagcattgaactcggacacgtttcaatcggcttatgaatagcaacaccacaccccgcgtggcgcgtaggatcacctcgccagcggtagcacctccgggcattccgctgcccacggacgatgcgccaattccagcgtatcgctactacactccgccgcccaggccgttggcctcatgcgaacggcagagatcgggcgaggctccggcactcgccctaactacagacaccagcttccataacattgtaacgatgacgtcaggtcatggaggcgtggggttgagtgtcatggcttccatgcttgcatggacattggcgagacgtgaacacagctgcgttctcatagacgctgatttcgtggccggatgccttgacctgctgcttggtgtagaacgagagccgggcttgcggttcagccaagtcgacgcgcccctcggccgtatcgagggtgaggcgatgaaccatgagctgatgatgtgggagggtgtgcgagtacttccctatgacccttggagcgcgcgccagcctgactggtgggaagttcaagcggccattcgggctttggcggaaacgaacgacgttgtcatcgtagatgccggtcagggtggactcattgagaccgtacccgatctgcgcagtggcctgcaggtgattgccgcggaattgtcggtaatggggctggccagagccaagtcgcaccggtccagattggattcatggggctgtgaagcgccacatatcgtaggtgtggaaccacgtggcgctccacgtgggagaggccatgtgggtattggcgaggcgcaggactatttgactgccacggtattggggcccatcaagccaagtgtcaatctgtgcggagacgtactggaaggcctcggcatcagatcggtgaccaaaggcagtcgcaaagccatgaacttgcttgccgatctcgtagaacaggccattcgcccggtttcgggagcttctcacaaggaccagtgatgctatggctgccgtcagcacgcgagccaatgaggctggcacagcgctcagaaccatattcttcggtctgctggatgacgtggcatctgacccgcaggttaccgatttggcggtgacctgtgatggccgcgtttgggcggaccgcggcaatggcatgcgcgaaacagtattgcatgtgccgttccgctcgccgcaagtagttcgagaatacgccgtccaactgtgcgcgcagctcgggcgcagactggatgatgcctgcccgatagcggatgccgccagtccggatggcatccgcgtgcatgcggtgattgccccattggtgccacaaggtgccgcgatttccatacgattccctgaccgaaccatggcatcgctacagcacctgagcaaattaggcgtattcccggctgcttggctgccgacgttcgtgggattggtgcgcaaacatgccacagtgctgattaccggcggaacaggcgtgggcaagaccaccttgctcaaggcgctgctggcgcaatgcgacgtgaacgagcgcatcgtcaccgtagaggaagttcgtgaactgggggaactgggacgcgacgatcatgtctcgttggtaacacgcgaggcgaatgtggagggcgtcggagccataagcctggcggacttggtcaaagcgacgttgcgaatgcgccccgaccgcgtggtgctgggcgaatgccgtggcgcggaaatcgtcgacctattgcgcgcgttcaattccggtcaccacggcggcatgaccaccgtgcatgcggacggcgtgaaccgagtaccgtccaggctgatttcgcttggattactcgccggagtcagtccacaggcgttgaccatgctggcggcaggcgctttcgacgcggtggtgcatttggagcgagtgaacggacagcggcgtatcacgcagatcggcgaactgcgcgtagcacatggtgaactggcaggaacaccgctggcggtatggaatggctgccatcctcctcggtatgccgccgaatgggggcacttcattgaacgatggggcatcgttcccaggccgagtggtggtgggtgatgatgtggtgtgctgttctggtggcgctcgccgtgctgatatggccggggaacaagtccgggaggctgtaccggctggcttaccgcgggcgcgcggtcgattccgcagccataaacgaacctcgatatgccgactcacctcgcgtgggcgttgcgcaggtgattacgtccgccatcgcgcgattgcgaggtggcggcacattggttgaagcattcgaggaacaatccagcagacgcttcgccactcatcgcattactgtggaacggctcataacggtgttcgaacagcggcgtctgcccgacgaatcaccagcgcaggtacttgaagctgcacgcggggtcgccgccgcagcggttttgagcgatgagctcggttgccaagcggtgccatgtctggaagcggtattgactgcttaccggcagatgaggctgatgcagaacttgcgatcgcaagcatgtgccgttcctaaagccactgtggggctgctgagcgcgcttccggccgtcactgtggcattgggcgagcttctgggagctagaccattggcgttcttgcttggatcgccacgcggtgtggtctgcttgatattgggaggatgttgttatgctgccggcttggcatggatgcgggcattgttgaaaggcagcggattatgagtacggtgtgggtacacgccgcggcaggctgtgcggcgattgctggttggctgtataaggctctgtctcgtcatgacagccgcttgccgggcgaggagccggccgtagcgcatgattgcgggtcgtcatggaccatactcatattgcgtatgttgcaggtgtccttgcgtcagggctcctcgattccccgggcgcttgacatggtgggcaaagccgtcggcggcgactgcggcgctcacatgagcgaggtcgggaactccctgaccagaggggttccctgggctgatgcgtggcatgccgctatggctgttcagcatgagggtgcgccagctgatagtccatccaagggaaatacgaataccacgcaacgagatcttggcctgctgcaatcggctttggaatcgtcatggacgcatggcgatatgcctggtgtgcgcctcgaatccgccattgaacagctggaccgtgacgagcgtgctgctatcgaacggaatgccgcgaagctgtcggtaaagctactgatgcctacagggctatgttttctgccggcattcgtgctggtaggagtcattccggcgattgcgtccttcatgatgtgaatataggcgtgaactgagtgcgcttaggctgaatcttgttgtattgctcggtattgtacttggctgcgtttggttatccacatttgtggtggacgacacgtcgaggtgtggataactcggcaagctagaaccacataccccgtttttcctggtgcatgaagcgttgatagtccacagtggtatgcaccccgcgtcaacccggcgcgggggccaaccactcacatacgcatggggaaggtgcgaagccactgcgcagcttcccctccttaccgaaaggaacgccaatgaatacccctatccccgtcatcgtcgacgggcaggccggcatctttgcgcacagcaaggctcgtgtggccacgctgaacgccaaggcgaaagaacggctatgcctcatggacgcacgcatccgcgccctcatggctgagcccgaagaaggcgcagccactgcggaatacgcagtcgtactcgttgcggctacaggctttgcggcggtgctggtcgccatcctgaagtcggatgccatcaagacgttgctgaccaacatcatcaaacaggctctgaaagtcgggtgacagccatgaagaccatgagatgccggtggaggctcgccagactgccgccagacctatgcacgggatcggccaccgccgaattcgcgatcgtattgcccagcgttatcgccatcgccgggctgatactggcaatgggacgtgtggtcatcgtttccatggactgccaaggtgccgcgacggcggctgcacgcgagtttgtggttaccggtgacgaatcatccgcgcgcagcatagctgcggacgttgcagggggagatccccgcgtcagcattgcccacaacggccaatcgacgagcgtgatggtcgaatgttcggtactgcccggcccactggatgtcactccaacgcgggtcaccggcaacgctacggcgataagccaataactggtcggctgctggctgggcggccgcaatagaaaggaactgcggtgcagggaatgcgttatgaggagggatcgggcacgatggccggagccatgctggttatggcggtgggcattgcgctcgcggtggcggcaagtgtgggcaacctcatgatctgccagaatcgagcgcgttccctcgccgatctcatcgcctttgacgccgcgtatgcgctgtggcatgtggatatcggtgatccatgcgcgcttgctgcaaacatggctgaagcgaatggcgtcacgctgggctcctgctccgtgcgggatgaagacgtgttggtaaccatcaaggtggaaaccatggttccggtggcatcatccgtggagcggatggctcgggccggaccggtgaattgtacggaaagagacaattatcacaataatggaccgtaagcactgatgctctggcgggcttctggacctttggttaaggtgagagcatgagcgagagtgaacgcacagaacgccgtcgcgtggtggccatggtgggcaatcccacttccgataagggccgtggtgccaaggtggatgcgcgagtattgggactgctggagga

SEQ ID NO: 3330 - DNA, 6382 bp, Unknown
  R151_18m  MAG No. k141_13210
caccgaagaggacatgctgtgggacatccgcttcatgaagcgccacaacatcaacgcggtgcgcacctcgcactatccgaaccagtcacgctggtacgaactgtgcgacgaatacggcatctacctgatcgacgagaccaacctggaaacccacggcagctggaacagccccggcgacatccccgtgggaacctccgtccccggcgacgacgaagcctggctcggcgcatgcatcgaccgactcgacagcatgatcatgcgcgaccgcaaccatcccagcgtgctcatctggtcgctgggcaacgaatcctatgcgggcgaagtcctcaaggccatgagcgcgcacgcgcaccggcttgatccgggtcgtcccgtccactacgaaggcgtcaactggaaccacgcctacgacgagatcagcgatttcgagagccgtatgtacgccaagccggccgagatccgagactggctcgaacacggcgacgaacgaggcgaggcgagcaagccgttcgtcagctgcgagtacatgcatgccatgggcaactcatgcggcggcctgagcgagttcatcgacctcgaacggtacgagcgctactccggcggattcatctgggactacatcgaccaagggctcgtccagcgtctgcccgacggatgcgaacgcctcagcgtcggcggagactggggcgaccggccgaccgactacgaattcgtgggcaacggcatcgtattcgccgaccgcacccccagccccaaggcgcaggaggtcaagcaactgtattcgccggtcaagctcacccccgacgggcacggcgtgaccatcgagaaccgcaacctgttcgccagcaccgacggctatgtattcgccgcacggctcctcgaagacggacgcgagatttggcatgccgactaccgtttcgacgtggccgcaggagatacccaacaccatgacatcgccttcccggacatcgactccgacgagggcacgcgcgaggtcacctatgaggtcgatctcctgctcgcagaggccaccgcgtgggcacccgccggctacgaactcgccttcggacaactcaccgacaccctcaaccccgcaggggacatcaccgggaacgaccaagacgacggccgcgcgacggtcactctcagccgatggaacgccggcatccgccgcgacgacgaggaaatcctcatgtcacgcacccagggaggcatcgtctcctggaagcgcaacgggcgggaaatggtcatccgccgtcccgagatcgtcaccttccgtccgctgaccgacaacgaccgcggcaatcgctccggatacgaccgggccgcatggttcgcggccggccgctacgccgtcgtgaccgatacgagcatcacgcaatccgacgatggcggactcacggccgcataccggtacaaactcgccgacccggatcacacgccggtgtcagtcacctaccgcgtcacgcccggcatgcgcatgcaactgaccgtcgaataccccggcaacgccgcaggagcggccagcctgcccgcattcggcatcgaatgggagctgccaggcgaataccagcacttgcgctactacggtaccggccccgaggagacctatcgcgaccgcaagcagggcggcaagctcggcatctgggacaccacctcagaggcgagcacggcaccgtatctcatggtgcaggaaaccggcagccatgaggacgtccgttggctcgaagccaccgacatccaaggccacggattgcgcgtcacccaacgcggcgaccgccacttcacggcgagcctgctgccctggaacacctacacgatcgaagccgcgcggcgccacgaggacctgcccgcgccgcgccacaactatctgcgcctgctcgcggcccagatgggagtcggcggagacgactcctggggagcccccgtccacacggcctaccagctgcccgccgacaggccgctcaccctcgacgtgaacctcgaactcatctgaccgcaacgggcggcggcatgcaccatcatgccgccgcccgtacccgtatatattcatattccccaaacataacaacgacatcaaccaggtgccgacccactgcatcacgcagggcatcggcacggtgctcaaagcccgccacctcgtgctgctcgcattcggcgcgggcaaggccgcgagccagtgccgtccgtcttcgtcaattcatcatggccgaggggacaaaactggctcgcggcaccagctcggtcgtcagcagaatgtgccgtcgcacccgacgctcatgcttcaacccatcgatcagggtggagaatgccatgcgcgccaactccctttgatcgattgcatatgagctcagcgacggtgacgtgtaccgagcgatcgactggttgttcacgcttaccacggccaactcgtcaggaaccgccacgcgtagcgcgttcagtgcttgcaatgcccccaccgcgagcacgtcagccgccacgatcagaccgtcgggcatggtgcctgtcccgcgatggtcagaaaccaattgctccgcgagacgatagccgttctccacggtgaacgtgccggacgaatacaccagcccgtccgtttccaatctcaagtgagtagcccactgacggaacgacagctcgcggatatcctccggataatcatgcgtacccatgatgctgcctacgccgccaagaaacgcgacacgcttgcggcccgtcgcgatcattgcatccagagcgtccagcatcgtctgcgacagatcgggccgcaccgaatcgaacagatgaggcgccggattcgtgtcgatacacacgccatgaggcagcaccgcgtgcaacgcacgtaaatccgcctcggggaacaccgtggcacccatggtgatgaacccgtcgaactccgatgcgcgctccgtcagctcatgtatggaacggatggatgcgggagggtccaattccatcgattccgcgcactccgcaaggactttccgcagatcggcgaagtacacatcctgcagctcctccccagacggaggcgcatccagcactgcgatcgcagggcggaacacgttgcgataccccagctcttcgcatacacgcagcacacgccgccgcgtctcctccttgatggagaacgacgggtcgttcagcaggcgcgacaccgtgctctgcgacaccccggcccgttccgcgacttccttgagcgtggccatgacatcctccccgcaaactttagtaaagggttttactacagcataacccgggatttacaagatgtcggattctctcactcaagaagtgacccgtaactaatagacttcaagcgtcccgacaaagggggcaatgcatagggcgggtttgtcattgaaacatgctcgccctcaaaacaacggataatgccggttcctttttctcattcttactgtcggtttttgaagaaggcgaagagctggctgtcgtggatggtgctgatggcggcgatggtgccgagttgtgcggtgatgatggccgtggcgagtgcgggcagttggatggtggtaagggtgagcgcgttggcgtgtccgctggcccagcgtgccgtggtgtaggtgatggcggtggcggcgaggacggcgggcagggtccatgcgagggtttcgagtgcgttggtggcgaggatgccttggcggggtattcccatgtgcaggtcgtcggctatttcgatgcggcgtgcgcgtgcggccgtgagtgcgatggcgaatgcggcgatcggggttatgacgagcatgatgcgggtggttctttgccggtagcgagtgtcgaggtcggggttggtgccgagcatggtgttggcctgtttggtttgggtggccggggcggctccggggatggcggtggcggtggtgttgagcaggtcctcggcgtcggggttggcggggttgatggtggcccaacattcgtcccattgttgtccgctgtcgatgggggtcggggtgatgatcgcgtaggcgagtcgttggtcgcggctgtcgtcggtccaggggaagaccgcgctgatgtgcatgacgccttggtccgtgggcaggtcgtccccttctcgtgtgtggagggtggaggcgagttggctggagatccacacgccggggcgggtctgttgtgtcgcgccgatgccgagcacgtccgcgaggccgggggtcgcctgccattcgtccaggggtgcggcgggcatggcgatcagggtgatttccccgctgtttttgagtgccccggccgcttggatggggtgggtggtggttccgttggctgtggtgccggtggttcgggtgaggttcgtgcaggtggtggggtcgatctgtttgctgccggagatgatgtggatgtcggcggcgctggtggcccattggcgtgattcgtgttgcagagagaggatgccggtcaggtcgaggatggcggttcctgcggcgatgagggtgagtacgacggcgcaggcgagggcgcgcgtggtgccggtggcgatgttgcgccatgcttcggacaggatggcgtttggtttcatcatgtgtcgtccttggtgtcgttgtcggggttcgttgggttatgccatgcgaggtcgatgacgcgggtgcatgcggcgcgggtgttggggtcgtgggtggcgatgacaacgatcgcgttgccttgggcgaggccggtgagggtgttgtcgatgtcgttggcggtgcgttggtccaattgggcggtgggttcgtccacgaggaggaggtcgggtttgctggcgatggcgcgggcgagcatgagtcgttgcgcctctcctccggacagttcgcggaactcgcgtgcggcgaccttggtcaggtggaacgtactcatgatggcgatggcctcgtcctcggcttgcgtgcggtcgatgccctggccgaggaggggctggacgacgtggtcgatggcggtgcgtcggggcatgccgtgggggttctggaacacccagcgcacgcggttgacccggttgcgtcggatagtgccttcggctggtggttcgaagccggcgatgatcgacaggagggtggatttgccggagccggacggtccgcacaggccgacggcctcgccggtcgtgagagtgaagtcgaggtcgcggaacagccaggggccgttcgcaaaccggtgtcccacgtgttcgcccgcgaccgtcggcgagcctgtggcgtgtggcgactcgttgtcggacggcgtggccggatcggggtcggatgccgtgtgcaggcgcaggatgtcggtgtccatgttcgttccttattcggtggttgcggcggggcattggatgtcgtcgagcttgtggccgaggacaacgttgccgatggtggcgtcggattgttcgggttggatgagcgtggctccgagcgcggagccgatgacggtgaccgggatggcccgtttgccgtcgggtgagacgcatgcacgggtgccgttctgtccggtgatggcagatggtgggaccttgatcgcattgatgggctgttcgagggcgagggtggcggtgggtttcttgccgccttggtcggcgagggtggttttgtagccgtcgctggcctggacttggtcgaggaattgctggtcgctgatcctgccgtcggtcttatcgaggctggtcttgactccaaagagcgtgaacgtgcgtttgccttctctcaggttcgccggcgtggggaaagtgatggccgtcagttggccgccggtcttcatgatttcggcaccgtccgtcaggctggtgttcagtccagccgtgcattgggttggcgtggcggtggtctggggcagccatgccacgtcggccggtccgatcccgccgtcggggttgcggtcgccggcctgagagagcagctggttgacgccgtccttggtgcgccacccgtaggtgccgttgccttcggcgttgtagccgaggcgggcgagttcctgttgcagggcgagcacgtcgggtccggtgtcgccggcgccgatctcgcggtagaggggcgtgtcggtgtgcagggcgatgacgggtttgccgtccacggacagcagtcgtttgccggattcgaccgtttggccgggcgtgcacagggtttcgctgacggtgccggcggcgcgcgaggtgatcgattgttccgcactggtctcgaacgaggccgcgacggtccgttcgtcgtcgaactgctggcggctggccatgacggtgtcggggctcgcggccgcggacagtccgtcgggtgtgggcgtggggatgacgagcgcggtgacgagcacgcccgcggacagcatccccagaccggtcaggatcagcggggtcaggattcgtgttttcatgtggtagtttcctttcgtcggatgattgttcgtcagccgatgttgacggcgaggccagctccgg

SEQ ID NO: 3331 - DNA, 9961 bp, Unknown
  R151_18m  MAG No. k141_13216
atcgttcctgcgtccgaacaatgccagcgtttcgtcggatacgctcggagtcgccttggtaacggtctgcttgagcgtgtccggcgtgtcgacggaccggttcgccgccgcctcacgttcggctttcgcaggcgtcagaatagggtcgaccctgctggaacgcggggtcgactctgattccggcgtagtgcgtgtgggctgggtcactcggccttgccctcgtcagcgggcttgtcggcggcactggtgtcggctgcggcagcagctttgtcgccggcttcggcggcggccgtcttggcgtcatccaccgtctcgctcaccttgcgcttgagctcggtgttcagcgccttgccctgctcgaccgtaatctcacccttcttgacgagttcgtcgacgagctcgctgctcttctcatatccggtggcaagggctccgatgcccgccagcaggaccttgcgcaggccatcacccagaagatcaaaatcagccatgatacccctccttcgaggtctgacatggcctggtgccatgtctcgtaccaccaagcctagcgcaaacaacagggcaatgtactagaccctcagactgatttcgactgatttttcgctgattggtacttaccgaggactcaccgagaattcaccgaggacgttcggcggcagccttgcgcgcgttggtggctacttgatcaagccgggcgagctccttggcttgttcgggggtctgatcggacgtatcgaacgtaccgtaacgacgagtcacggcggtttcgataaggaaatcgctgatggcggggtttttaggcagcaacgagccgtgcatgtaggtgccgatcacgttgtgcacgcgcgcgccctcggtatggtcttcgccattgttgcctcggccgtcctgatcgacggtgccgagtggctgaacgccttcgcgcaggaaggtctggccggagtggttctcgtagccaatcacatcgccgaactggtcggaatgctcaacaagattgccgatcatacgcacgttctggcccacggtataagcaccgataacgccgatgccatccagacgggtgccgtccacggtttcaaagtactcgccgaacagctggtacaggccgcagatcatcagcatcggcgtaccgtctgcggcaagcgagcgcagcaggtcggcgcgatggtagaagtcgtcgatgattttcttctggccggtgtcttggccgccgcctcccagaataaggtccacctggtcgggccaatcgtcgccttgattgtactggtggacgaccggttcgtaaccgtacagttccagccggcggcggatagtcagcacgttgccggaatcgccgtagatgttcatgtctttgggatacagggacaccacatcgattgttctggccatgtcacgttctccttgtcgatgtcttcccgctaaggggaagtcttattcctcaccatgtcctcctgcaggcgggaggtggcgcgcgggcgctagagggtggttacttgcccacgccagcgtcccgtacttcggtgatgcggcccagtacggcgcgggttttgagcatggcggtgtaggtgcagtagatgtgcttgcgtgtgccgggattggcgttgacgaatgcggtgaccgcctgttcgaggtcggtgttcgtatcggcgactggcacttggtcataccccaagcgcaatgccatgtcccaggcgcgcacgccggagaccatggcgacaccggacgcgcgcaaagaggtgaagtccacgtcccatagccagctcatgtcgcggccgtcggcatattcgtcgttgatggcgatcatggtgtccgcgttggccgggtcgaagctggcgagcgagaggcggaagcccatcgggttcttgaccagcagcagttcgaccggggaaccgttgacgtcgatgacctcgccacggccgaaagccggcgtgacgcgggaaacggcggcgatgagctcgtcggcggacacggcgcaggcgttggctgcggcagtggccttggatgcggcggcattgtcttgcatcaccgcacgtaccacggcgagcgcggcggccgcgttgtacaggttgtagacgccttcaagtttgacgtcggtggcgtagtcctggctgtccatctggaaggtggccttgtggtcgcccacggcggtaagtgtcacgtcggcggggagttctgccgtgcctgcggaagctcccctctccgaggggagctgtccgcgaagcggactgaggggagtactgactgaagggagcggcccggccataccttccaccgacacggtcgtggccatgtcgtcatcggacgggaaatagtggcgcaaatcgtcggcgaggccgaagtatcgcactgtggtgccagccggggccttcgcggcgagcgcggcgatacgcgggtcctcgcggttcagtaccacagtgccggtagtcgccgcagccacatggctgagcagtttggccgtggtgtcgatttcaccgaatcggtcaagctgatcgcgcatcacgttcagcagcaacgcataacggggcttgacctgcttgacgaagtggacggcgtacgcctcatcgagctcgagtacggcgatgtccgcgtccaatttgccgccgaaagtgacttcggtgagcagtgcggagaccacgccgcgcacgaagttcgagccggtcggattggtgaacaccttcaatcccagatcggagagcatcgaggcgaccatgcgggtggtggtggtcttgccgttcgtgccggacaccaataccacgccaagcggcaactgcccgagcgtacgggtcaggaagccggggtcaatcttttctacgactttgccgggcaaagccgaaccgccatgtttggtgacgcgggatgcaaaccgcacgaagcggcctgcggccacggtggcgaacgcataccacggtttgcgggtctgcaccacggacgattggtcttgcgaaacatcgcgtgaaacgttgcttgccatcatcacaccccctgattgctgttgtagtcctgcggcatgtccttgaatttggacgtggcaccgaggaaggcgaggtggaaggtttcggtcgggccgttacggtgcttggccatgatgatatcggcctcgccggggcggtcttccttgtcgtagaagtcagggcggtggaccaggaacaccacgtcggcgtcctgttcgattgagccggattcacgcaggtcggagagctgcggcttcttgtcgttacgcatttccgggccacggttcagctgggaaagggccacgaccggcacttcgagttccttggccaagagcttcagggcacgggagaattcggacacctcttgctgacgggattccacggccttgcccgaggtcatcagctgcaggtagtcgatgactacgagtttcagatcgttggtctgcttcagacgacggcatttcgcacggatctccatgaggctcatgttcgggctgtcgtcaatgaacagtggcgcattctgcatcttggtccagaactggttcagggtgttccagcgttcgggggtgatgtcgtcggcgcggcgcagggcggccatcggaatattggtttcggcggagataatacgctgagcgagctccaccttgctcatctccaagctgaagaccacggaagtcatgttgtggtgcaacgcggcggcgcgggcgaagtcgatgccgagcgtggacttacccatggccggacgtcctgcgacgacgaccatctgtccgggctgcaggccctgggtcacgtcgtcgatgtcgcggaatccggtcggcacgcccttgttgacgagaccctgctgcagtttgtccagctggtcgagcgcgtcgtggaccaccgggccgatggcggcatagtcctgacgcaccttgcccatcgacatctcgtagatctcggactgggcgaggttaaccacatcctcagcctgcgatccctcggcggaataaccgagctgggcgattttggtgccggcggcgatcacattgcgcaaaatggcccgctgatggacgatctccgcgtagtacatggcattggcggcggtcggtacggatgcgacgaggctgtgcagatagtccgcgccgccgaccttgtcgaggttgccatccgccaacagctggttggccacgagcaccacgtccaccggctgactggcggaaaacagatcgatgatcgcgttatagatcgtctgatgcttgggctggtagaaatcggtgacgtcaatggtctgcgaaacttcgccgatggcatccttactcatcagcatgccgccgagcacggccatttccgcgtcgtcatcgtgcgggggcactcggtcgaaaatcgggtcgccgaccgccgccgacgtctgcgcgccgccccggcccgcgcggtcgccacgatcgccacgatccgagccactgccgaacccattctgatacgagtgttcacttccttctgccatagccttcaagtataggaggtggcgtggcgagcggaagatatcgcacgactacgttcattaggtcgattcctcactcattaggtcactgtgcttggtaacaccacaaaccatgcgcttggaatggcggcattctgaggcgctcgatcaatatctctcaaagtccaccgacctaatgaatgcacaatcgacctaatgaacgcatgaaagtgcaagtcgtgccgaatcatcgcgcaccaatttcatcgttggttcaccttgcggtcagcgcggcgacacgctgaagcgtcaaatgtggatagaaaaaatagttatccacattttggggataattctggggataatccactaagttatccacatactggggataacttggtggatagtctggggataacattccgcgtccacaacaggtgcttgcgcaatgtagtcaggcgtgatatgcgtgtgagcgtgcacatagactcttccgacgccaaagccaccagttccggcgataccacacgccgcgatggcttcggaaccccgcatgccggcgcaaacacaaacaccagcaacggcccggccgacgcccgctccaccaaccgtcggatcatggcgctggccctgctgaccttcggccagctcatcgccgaaccgaccttcatccttatcgacacagccatcgtcggccatatcggggatgcggcgttggccggcctgtcaatcggctccaccatcatcctcacggcagtcggactatgcatattcctggcctactcgaccactgcgcaggtggcgcatctgctgggagcgggtcgtcgtcgcgagggactgcaggcaggcattgacggcctgtggctggccttgagcatcggcaccgtactgggattgggattgttcgcggctgccgagccattatgccgggcactgggcggtcagggcgaagtattggaacaagccgtgacctatacgcgcgcaatcgtgctgggtgcgccaggcatgctgatggtatatgcggcgaacggcattttccgaggattgcagaaggttcgtatcacgctgatcgctgcggtgggcggcgcggtggtgaacacggcgcttgatgtgttgttcgttattgtgctgaattggggcattgccggctccggagtggcgacgctggtggctcagtggttcatggggctgttcctggtaatccccgccattctgtggtcccgggcggacggtgcgagtctgcggcctcgtttggccggtattgcggcagccgggggcgacggactgccattgttcattcgtacattggcgattcgtgcggccatggtggctacggtcgcctgtgccgcgcgcatgggtactgccgtgttggccgggtttcaggccgtgaactcctcttggaattttgcgatgaacatgctggattccgtgggcatcgccggccagacgctggtggccacaacgctgggcgctggcagcgtgcagcaggcgcggcggttgacgcgggcgaccgggcgtgcggggctggtcaccggcgcggtaatcggcacggcttttgcggtagtcggcctgttcgccgggcacttcttctcccctacgccaaatattcagacgttgattgccgttggcatggtgacgatgggcatcttcttcccactgcaaggctggatgatggcaatcgacggcattcttatcggcgcgcgcgactaccgctatctggccgtcacatgcacgctgaccgccgtggtgtatgtgacgctcatactcatactggccaatatggtgacgccggcgctgacgagcgacctgatgcgtaccgccgtgctctgggccgcgttcaacgtggtgctcatgggcgggcgcggcctgtccaacgggctgcgcgtgcgctcggacgcatggatgaagtaggtatcggccgcgcgaagtgctgggcgattccgtttacatcgcggcgcgggcggcggaatacatgccgcggacgatttgttcgcgccacttggaccagccgtattgcttggtgatggtctcaccggcggtggcaccgagcgaggagccgtcggcccgggtcaggtcgaacagcatatccaacagcatcttgtcgtggtgcaagcggtcggccaactcctccgccacggccggatcataggggtccttacccgtggcaaattcggatagggtcaaatgctcacgcaccagcacggtggcccagtcgacgatgtccggcgcgtagcccatacgcttgagaatcaccggcacatggcgggcaccctcggcggcgtgatcggccacgaacgcgcgcttgccgatgtcatgggtaataccggccaacagcaacgccttgaaatgatcgtcatcataccgtcccccggacggtgtctcacgacccagacgcgacgtgacctccaccatatgccgatcgatggtgtaccggtgggcggccgaggcggacggacggttgcggacgccgagccattccggcatccatcgacccggaatgtccacgaagtcgatgctctcccacacttccataagattcggcccgcatgcaagcagacgaataaacagctcgcgcgattcgtcatcccactggttgtcgtgaatcgggcagtgcttcagattaaccaaggtagacgggttgatgggcaaaccgaattcgccggccgccacggccatacgcaacgccagcttggcatccttggcaggctcggcaccgggtgccaacaccaattcgccttcgtgcttggccacgccgggagccaccacgtcgaattgcggggcttcacgcttgccgccagagcgctgagagaacatctggaagaacgcgaatcgcggcttttcgtgggtcagcgaatgtccagcgcgggatgcggtggaatcaagcgagaaggagatgcgccggccgatacgggcaagcagcgtctgcaaatcgtcgatcgagtaggcggcacgctcgttttcgggccaagtcggatcggcaaggccaagcatggcagccactttggcctgatagggcgtcagcatcaggttagtatccttgccggccaccagatggatgcagtcgcgtacgtcgagcagacgttccacggcttcgtcgtagatgccgtgcgggcggtcggccagccatgagacggcgagcgcggagacgagcaccgaatcgcgcaaccccccacgggcctctttgatgtcgggctgattgacgtattggagccgaccgaattcgtcgagtcgggctttggcggagtcgagcagttcgggcaggcgcttgcgggcggccttgcgccagcgttcgaggatggatgtggcggtggtggtaatcagagcagtgtcgccggcgatgggcttcacgtccagccagcccatggcggcgggaaggtcatggtcggtgacttcctcgcattgggcgcgcgtgcggatggagtggtcgaggtccagaccgctgtcccatagcgggtaccagagtttgttggccaactcgttgagctgctggtcgttcaacgtgcgaggctcgtagatgatgaccaggtcgaggtcggagctggggcccagttggccacgtgccagcgagcctaccgcggcgaagccgatgccggagtcgggcacggggaaagagacatccttgcaggccgcattccacagctccgtgaggcattgcatggccagttccgtgcgggctttacgcttggtcgcaccattccggtagacaccatcgtcatccggctggctcatatccatgaatcgttgtttcaagccatctactgctgaagtcattgcttcatctttcattgccaaaaaggtccccgcacgacgtcaattcgcggcgtgcggggacctttcccatgcagtccatccccttctaggcatggacgtctgtgttatcagatcgcggcggaaccggtctcaccggtacgcacgcgggccacggagtccagcggagcgacccacaccttgccgtcaccgatggtgccggtgccagcggacttgatgatcacaccgaccagcgtctcggcatccgcgtcatcggacagcacttcaacgcgaatcttcggaatcaggtccacggtgtactcagcgccacggtagacctcggtgtggccgcgctgacggccgtagccgttggcctcggacacggtcagaccgtgcactccggcggccgcgagggcctccttgacgtcgtcgagcttatggggctggatgatagcggtgatgagcttcatctcacctcacctccttgagaacagagctggcagtaccagcaaaatcgtaagcacgttcgccctggtcggcaagatcgatgccgccgacttcctgagcttcggtgacgcgccaaccgatggtcttctccagagcgaaggcgatgatcgcggtgatcaccgcggagtagaggatggcgacgagagcgatgaccagctgaacgacaagctgcttccagtcgccgccagccagcaggccggtgccttcgccgaagaagccgacgaggacagtaccggtgaaaccaccaacgccatgcacgccgacgacgtcgagggagtcatcgtagccgaacttgaacttgagaccgcaggccaggcaggtcagaacaccagcgatggcacccatcacgatggcccacagcggggaaaccacatcggcggccggggtgatggcaaccaggccggcgaccatacccgaggcggcacccatagcggtgtagtggccggagcgaatcttctcggtgaagccccaggagagcatggcagcggcagtggcggcggaagtggagacccaagcgtagccagcggtgccgttggcggcgaaggcggaaccagcgttgaagccgaaccagccgaaccacagcaggaaggcgccgagcatcacgaacggcacgttgtgcgggcggaacggctgcgtgccgaagcccttacgcttgccgatgatgagcacgataatcagggcggcgactgcggcgttgatgtgcaccacggtaccacctgcgaaatcgtgggcggccgcgccgatagccttggagatggcgccgtcagcagacagcagaccaccgttccagaccatgtgggccataggagcgtagtcgaaggtaacccacagcgccacgaagatcatccaggtgctgtacttcacacgctcggcgatggcgccgcagatcaggccgacggtaatcatcgcgaaagcgacctggaaggcaacgtccacggaaaccgggtagttgttgtcgttcagaccggtggcggtgaacacgccgtcctgcgcgaccatggaatccttgagcaggaagccgctggccgggtcgccgaaaataccgccgatgtcggaaccggcgtatgcgatggaccaaccccacaaagtccaaataatcatggtgaccgacagcgcggccgcctcaagcatcagcatgttcaaaacggccttggcacgaaccataccgccgtagaagaacgccacaccaggcgtcatgaggaaaaccaaggacgcggatgtcaggatccatgcggtgttaccggaatcaatcgctcccatgtctacctccctctctttcgttcagggcaccggg

SEQ ID NO: 3332 - DNA, 4353 bp, Unknown
  R151_18m  MAG No. k141_13299
cccgaggatttatctcgtgccgccaagaccgtcaatgagaagacgcgtctgggcatcccgttgattatcggagatgactgcatccatggatactccttctggccgggcgccacgatcttcccctcccagctcggcatggccgtcagctgggacgccgccaaagtcgaagccgctggccgcgccaccgccgaagaggtctcctgcaccggcgtgcactggacgttctccccggtgctgtgcatcgcccgcgacacccgttggggccgcgtggacgagacctttggcgaggacccgatgctgatcggcgaactcgcctccgccatggtcaagggctaccagggcggcgccaaggccggcgaggccctgccgaagaacgcgatcctggcctgcgccaagcatttcgccggttactccgagacccagggcggccgtgacgcctccgaagccgacctctcccaccgcaagctcgaatcctggttcctgccgccgttcgaacgcgtggccaaggaaggctgcggcacgttcatgctcggctacgagtccatcgaaggcgtgccggtcacgttcaacaaatggctgctgaccgacaagctgcgcggcgcatggcaatacaatggcacgctgatcaccgactgggacaacgtcggccgctcggtatgggaacagcatgtcaagcccgattacgtgcacgccgcagccgatgcggtcaaggccggcaacgacctggtcatgaccaccccacagttctatgagggagccatcgaagccgtaaaaaccggtctgctcgacgaatccctgattgacgatgcggtagcccgcatcctggccctgaaattccgcctcggcctgttcgaagacccgcgcctgccggatgccgaacgcatcaaggcggtcatcggctccgccgaacaccagcagaccaacctggaactcgcccgcgaatccgtcgccctgctgcgcaacgacggcgccctaccgttcgccgcagacaaggccaagcgcatcgctgtggtaggcccgcttgccgacgacgcccagaaccagctcggcgactggaccggcaactccggtcaggtctcttggatgccggatggccagcctcgaggcatgattaccaccgtgctcgacggcctgacccagctcacctccgacgattgcgaagtggtctactcgcgcggcgcgaacgtcatcgacctcgtgcctgaccctgccggcgagttctacccggacggccagcctcgcccgaaaatcggcgtttccgccgccgtcgatcgagcaatgatcgacgaagccgtggccaacgcccgccagtccgatctgatcgtggccgtggtcggcgacgtggtccagctggtcggcgaaacctgctccaccgccacgctcgaactgctcggtggccagaacgccctgctcgacgcgctcgccgccgtctcgcgcgaaaccggcaagccgatggtcaccgtgctcatcagctccaagccgcaggtgttgcccgcctccatcgtgggggagtacggcgtgttcgccaagcgcgtcagcgaccctgaaaccggcaccggctccatcctgtgggcgccgaacccgggcatgcgcggcggtcaggccatcgccgaaataatcctgggcctgaccagcccgtcgggccgactgccgatcaccttcccgcgccacgcgggccagctgccagtctactacaaccagattcgcggccagcacggcgaccggtacgccgacctcacccaggatccggcgttcgcgttcggcgaaggcctgagctacacgacgttcgcatacggcgaaccgaccattacgggcggcgcaagcaacgccgacggcacattcgccgaaaccgacaccgtacgtgccgaaatcaccctcaccaacaccggcgagcgcgccggcgtggagatcgtgcaggcctacatcggcgacatcgtgacctcctacagctggaccgaccgcgaattgaaggcgttccagcgcgtcgcactggaacccggcgagaccaagaccgtcaccttcgagatcccggtggcgaactgcacgatcgtggacccggacgccaaccgcatcgtcgagcccggcgaattcgaactgctcatcggccactcctcgcgccgtgaggacctgaagcgcaccacgttcaccgtggcgtgagtgagtctgacaatcgccggataataacaaagtgggatgaggctcgatgccccatcccacttgttggcttgttgtactgttgcgatgttgctggtcagcgtcagtcggacgtttcagtcggacgtggtgatgtgctccacatcccagcgcacgccgagcacttcgggcgcgcaactggcgttcgagccctatcagcgcgcccaatgccgtgccgagcacaatgcgtacggtgcagtcgagaatgatggccagagaaaacgtggtgaacatgaggattcacctcctgaaaagtagacgtcaggaacttcccgcacgccctacagcgccagcccgcctcccgcaactacgtcgccgcgttcgggtggttcgggctccgtgcggtgagtgggacgcggccgtatgatggaagcgcgggtggtccgggattggtccgggactgttggatgcggcgggaggtgtcatggttcctatcgagcacgtgtacgaccagattcgcgcgtttgccgctgatgccggcgctcgcaaggtcgtgctgttcggttctcgcgcaaagggcgtgaaccggcctaaaagcgatatcgatcttgccgtggccggttgtcccgatttcaatcgcttggagcagaaccttcaggacaatctgtggtcactgcttaaagttgatgtcatcaatctggatgagccgatttcttcatcgctgagggcggagattgagcgtagcggaaaggtgctgtatgaaaaagtatgagaattacgtttccgcattgaattcgctgcgcaaggctcccgaacaggatctcggcaatgatttcatccagagcggcattattgacaagttcgggttgcagttcgagcttggttggaaactgttcaaggcgctgctggcttatgagggagaccctgtttccgcttccggctctccgcgagatgtgctcaaaaccgcttttcaatactatgatttcatggacgaatcgttgtggctgcgcatgctgcgcgatcgcaatgattctgctcatatctatgatgaagaacgagctcggcgtcttgtggacgccatcatcgctgattacatccccgagtttgagcgtgcaaatcaggggttggtcgctcgctacggtgaagcattgaacgattagcgtgacaggtatggcatcgggcgcgctgggtgttggcgaacgaattaatggggtgaacctcggcaattggctggtgctggagcggtggatgaagccggggatttttgccgccagcggcgaggcggacgagatctggctgcatcgggctacgaagtcggctgagctggaggctttgctgacgcggcatcgcgacacgtatattaccgaggccgatttccggaacattgccgcacatggctgcaatctggtgcgtattccagtgccgtatttcgtgttcggggatgtgcccggtcacccgggctgtaccgagtatctggacagagcgttcgactgggccgagcgggccgggctcaagattcttatcgacctgcacacggtgcccggctcgcagaacggattcgataacggcggcctcaccggcgtggtgcgctggcatcgtagcccgcgagcggtcgcctatgcgctggatgtgctggtccgtctggctcgccggtatcgcgaccacgcggcgctgttcggtatcgaagtgctgaatgagccgattgactggctgacgtatgccatgtcaccatcgagcaggcaggcgaaagaccggtccgaagcgcgaggaagcgggcctattccgatggcgttcctcaagcgtttctaccgcgagacataccaccggttgcgcccgattctggcagggaatcaagtcatcgtgttccatgacggcttccgactgggccgttggcgggactggttcgtgcgcgagggcatgcggggcgtcatgctcgatacgcatgtctatctggtcatggccgagcaattcccgctgttccgtctgatcccggatcggtggctgatgggctggtatcgcttgttcgtgcgctggaacgaacgccgcatccgccgggccgcgcgctatacgccggtgattgtaggggagtggtgcgtggccaacaatctggtgaaccgaaccccttcagcgaggaatgccgtctatcgcgaggtcgccgccatgcagcgcaaagcgtggagcgcatctgccgggcagatctactggagctaccaactgcgc

SEQ ID NO: 3333 - DNA, 24594 bp, Unknown
  R151_18m  MAG No. k141_14115
ccagctcggcgccttccttcacttcgaaggaggtagccagcgtctcgtgggcgatcagatccttgaactgctcgaccttggccacatcaacagccggcacggtcagcaccagggagatgcgatcggcgatgtccagatcggcggccttgcgggcgtcctgcacggcgcgaatggcgtcgcgggcgtagccttcagccagcaggtcgtcatccagagcggtgtcgagaatcacgaagccaccggtcggcagagcggcggacaccgaagcagcggcctcggcggcattctcctcctccacacggttgatgagctcgtactcgccttcgaccagttccaaatcgccggacggcgtggaaaccaccggagcgccggaagcgtttacgctccagtcgccggacttggaggccttgatggcgaactgcacctgcttgcccagacgcgggccggcagcgcgagcgttcacgcgcagctcgtgcacgatcttcagaccctgggaaccagcgtcctccatcgtgcagaattcgatatccttgacgttgagctcggacttcagcaactcgtcgtaggccttgactgcgtccacatcctcggccaccacagtgagcttggcgagcggctggcgcacgcggatcttggcggccttgcgcagggacagagtgccggaaacgacttcgcgcaccttctccattgcggcgaccaaagccggatcgtcaaccagcacgcgaccaagttcggtatccgcaccggtcttctcgtccaccacatacggccagtcggccagatgcacggactcgccaccggtcaggccacgccacacggactcggcttccatcggagcaagcggcgcaagcacgcgcatgaacgcctcaagcacggtgtacagcgtattgaacgcgttcgcatcctcgttccagaagcggtcacgggtgttgcggatgtaccagttggtgagcacgtcgatgaagtcggagaccgcatcgcaggcgtcggaaatcgcaaactcgttcagcgacttctccacacgctccaccagacggcgggtgcgggccagcagatagcgatccatctgcggcaggccagcgacctcgtcggcacgcagctggcgggcgtcgaatccgaccccaccgttggccgcgttggcgtacagggtgaagaagtagtaggagctccataccggcagcatgacctggcgcacggtgtcgcggatgccctcggcggtgacgatcaggttgccgccgcgcagaatcggcgaggacatgaggaaccagcgcatggcgtcggaaccgtacttgtcgaacacgccgttcacgtccgggtagttgcgcaggtgcttggacatcttctggccgtcggagccgagcacgatgccgtggcagatcacgttcttgaatgccggtcggtcgaacagggcggtcgccatgacgtgcagcaggtagaaccagccacgagtctggccgatgtattccacgatgtaatcggccgggaagtgctgttcgaacttctccttgttctcgaacgggtagtggaactgcgcgaacgacatggagccggactcgaaccagcaatcgagcacatcagagatacggtgcatgtgcgatttgccggtcggatcatccgggttcacgcgcgtcaggttgtcgatccacggacggtgcatattgacgttgccgtccttgtcgcgcgggtagtcgccaaagtcggccttgagctcttcaagcgaaccgtacacgtccacacgagggtacttcgggtcatcggacacccacaccggaatcggggaaccccagaaacggttgcgggagatggaccaatcacgcgcgttggcaagccacttgccgaattggccgtccttcacgttctccggaatccagttgatctgctggttgagctccagcaggcgcggcttgatcttggtcacggacacgaaccaggaggacaccggcttgtagatcagcggggtggcgcagcgccagcagtgcgggtaggagtgcacgtagctcttctcctggaaaaggatcgcgcgctgatcttcgggaatctcagcaagcgggccatcgccggcacgcaggttgcgcaggatcggcagattcgcgtcgaacacgtacatgccctcgtattctgggcactgggaggtgaagcggcagccggcgtcgagcacatccgtgctcttgactccgtgcgcgttcagcgtgttcatatcgtcctcaccgtagggagcctggtgaaccagaccggtaccttcgacggtgtcgacgtagtcggcggtgaagatcgtgtagccgttcgggccgggcacgttgccttcggtctcggccttctcccccgcgaagtacgggaagaccgggtagtagcggcgaccggccagctcagaacctttgagctcgcgcacgacctcgtagttctcgccgagttccttctcgtagtgcggcagcagcggcttgccgaagtagaacttcttgccggcgaacttgccttcagtggggcgcacctcgacataatcgatgtcggcgccgaccacgatggcgaagttggtgggcacggtccacggcgtagtggtccagaagacggcgtaggcgtcttcctcatcacgcatcttgacggccacggacacggtggtgtcctgacgatcctggtacacgtcggcatccatgcgcagctcgtgcgcggaaagcggcgtctgatccttcgggcagtacggcagcacacggtagccctgataggccaggcccttgtcgtagagctgcttgaaggcccacatcaccgactccatgtacggaatgttcagggtcttgtagccgtgctcgaagtcgacccagcgggcctgacgatgcacgtagtcctgccattcgtgcgtgtacttcagcacggatgcgcggcaggcatcgttgaacttgtcgatgcccatcttctcgatctggtcgaccgagtcgatgccgagttccttctgagcctcgagctcggcgggcaggccgtgggtgtcccaaccgaacacgcggttgaccttgcggcccttcatggtctggtagcgcgggatcacatccttggcatagccggtcagcaggtggccgtagtgcggcaggccgttcgcgaaaggcgggccgtcgaagaacacgaattcgttctggctgtggtcgccggagggattgcgctccaccgacttctggaaggtatcgtccttatcccaatagttaagaacggtctcctccatttgggggaagctggggttcggcgccacgtgtgcggtctcgccgccctcgttcgccttgggatatacgttttcgctcaccgtaaatctcctagttgtactgtgcactggtcctacaggagcatcattggtggcgattgattcaagtggccgctttagtagtcgccccgcccgaacccatcatcggatgatgttcctgcctacgaggacgatgacgagcgttttgtacgctccacaccgcggtaccacctcgcttatcgcaccggttgcgctccgccgaattgttgcactcagcgcagcgcggcctgcacgaccgcttgtgttcggctgtctcgggccgatcccgtcggttctactaggcgattgccgccgttcttccgaagactccccgctgataacggatcactgcctcacaacggtgcatatcctaacacgccacgcggtcaagtctgcacgaatgttcactgagagatgccgttgaccgcgaacccgtgaatgttgcagacatttctgtatcagttatcagtcatgcagacatatccgtacaagttatcgccgatttatagccataactagacggataatgactgcatcccgttaatccaacaggttatgtctgcaaaatccaccagtacaacaacggattacgtctgcattctcttatggtcagtccaattcgttcccgcatagcgtctaaatggacgtgttaggtctgcatccaattcacggcctgcaagactctgcactcagcaattacttcgcaccaaaccgctcacgaatctgagcggcagtaccataagaggcttgcgcgccgaacccagtcgcggcgtacgcggaaacgtatgaggccaactgcgcactgtccgccaacgcatgacccgaggcaagtccggccagaaccgtgcccataaaggcatctccgcacccggtagtgtcgatggcctcgaccgcaactggcgcaatacgatagatatcatcaccatcgatgactaccgaaccatccccgccaagcgtaattaccgcctgattaaagccgaagtcatgcatctgccgcgccacatcagaccagtccagtccatcccaatcgtcatcgtcaggctcggcaatgcccaacagctgtgccatttcatgttcattgaccagcagaatgtccgaagcctcgataagttcagcgggtagttcagcaacgaatggcgaatcgttgagcaataccttgagcccggcatcatgacagaggcgagcacatgcggtgacggtttccatcgggctctccaaacacagtcccagtacatcagcagcaaccaatgcatcagatgactgctgcacatagtcgacagatacctcaccattggaaccagccgaatatacgatggtgttctcaccattcgcatcgacggtaatcaccgtggtgccactgggacctgcaacggcagcgatatgcgaggtatccacaccagcatcgcgcaaatgctccagcaaaaaatccgcattggcatcttccccgactgcaccaaacatccgcacctgcgctccaattcgcgcagccgccgatgcctgattcgctgatttgcctcccggcaataaggtcagcgggccaccgttgacggtctcccccggtttcggcaaccgtttcgtagttacggtatagtccacattcattgaaccgataaccgaaattcgtgactgagatgcaacaatatcgtctagtaatcccaacacatcatcgggaacaaacttgttgtcaattaacgtcatcactattgtcctttcgtccgcaattcgagccaaccacaatcagaacggcacaccacagcggaagatcacgttggagtatgaagtagtttcgccggtgcgaatcacgaatttcacacctttcaccttcgctttgaaaccgttctcaccatcgtggggtacgtagctcaacggcacatcaaatcgatcttttacccactgctcggcaattgttccacgagcctcctcagccattaacccctcttcaagtaccaattcgggggcaatggcatccagcacctgctcgaatcgcggcacaccaaatgccacagccaaatcgatgacttcaatacctggctgcacaggcagaccggcatcagagaccacgaatctatccttatgccgtagaccggccaaagcctgtgcaagttgagcattgatgacaccatgagtaagcatgaattctccttttatatattcactacgttgtgcgatatgtcggtatagatatggcccaccatcatggttatcgatgatgatgggccatgttgtaaggggcttttaattcccggataagttatctcatattgttactggaaatcagcgacgttcccctttgtcacggtctttacttcaatggactcggtcttttcgacgctctcgcccttgatggccttaaccgcagcctcgacagctttcttaccaagctccttaggctgctgtgcgatagtgcctaccatggtgccattcgacaccgctttaagaccgtcttcagtaccgtcaaaaccgaagatcttcacatccacaccggccttggaaccaagtgactggatagcgcctaatgccatttcgtcgttttcggcatagatgccaacgacatcaggattggactgcatcaggttagtagtcacatccagcgcctcggcacgatcgaagttcgcggtctgttcggccacgacttcaataccggagtacttcttgatctcctttttgaagccgtcgccacgatcgcgagtggaggcggcacccggagtgccctggagaatgatgaccttgcctttttctccgactgctttggccagctcatcagcagcctgagcaccaccagccacgttatcggaggcgatgtgcgaggttacatcttcaccggtgacggaacggtccacggagatgaccggcaggttggaagacagcaacggggccacggcaggagaagcggcatcagaatccacaggattgataatcacggccttggctccttgcgattgggcattctgcgcttgattctgctgagtggaggagtcgttctgagcgtcggacaccatcaaatcgacaccaagatctttggcagcggcctgagcgccatcacgcaaatcgacaaagaacgggttgttgagcgtggagaccagaagcgcgaccttatcgccgccgcttgaggacgtcgagccgcaagcaactgtacctgccattagggttcctgcgcatacaatcgcgagtgccgcacggaaggtcttcttcatagtggaattcaacatcattgtttctttctcttgtagttattggataaatgggattgaagatttggcttgttagttgaaacgtctttcgacgtgatcagtgggcatccaccttgcgacgcagagtatcgaagctcaccgcgaaggcgatgaccagaccgataaccacctgctgccagaaggaggacacattgagaatattgagaccgttgcggatcacagcgagcaggatcgcgccgataaaggtgccagaaatcttgcccttgccacctgatagggacgctccaccgataaccacagaggcgatggcatccatttcatatccggaagcagcctgaggttgagcggaatgcagacgaccggcaataaccagacctgcaacagccgcgaaaatgccggacagcacgaacaccataatctgggtcttatgcacggagataccggagagccgagaggcttccatattgccgccaaccgcatacatggaacgaccaatactggtgaagttcagaatcacggaggcgatgacgcccatgatgatcatcatgacaattgggatcgggataccaagtaccgtgctgccgaagaaattgaccataccggaagtggaaaccggtcgcccatcggaaatgaccaaggtcaagccgcgagcaacggacatcattgccagtgtcgcaatgaaggaaggcaacttcaggaacgcattcgcaataccggaaagcgcaccgaatacagcaccggttacgagtccaacaacaatggtgagaatcggaggcagccccatcgaagcgccagtgtaggcaaccaacatactggatacggcagcaaccgagccgacggacaagtcaataccagcctcgacgatgacaaaggtctggccgaatgccagaatggcgacagtcgcagcctgaataccgacattcaacagattcggcccggtcaagaaagcaggagtcgcgattgacaatatgatgcatagaataatcagacctatcaatgcaccattgcgcgatgcgaaacgcttcactttgtcaagtgtgctgacgctgccggaatcgtaaccgagtttttgttctttagcggtcatgatagtgttctccttcatttctcaacgtttgcagtagtgttttcgctgaagtcctcgttcatatgggaaacggccagtgacatgactctctcttgtgtggcctcactggccggcatttcaccgctcagtttgccgttgctcatcacgagcacgcgatcggacatgccgagtacttccggcagatcggaagatgccatcagcaccgcgccaccattggcggtaatctcgttgatcagctcgtaaatttcgactcgcgcaccaacatcaacacctctggtcggctcatcaagcaacagcaccttcacgttcgccatagaccatttgccgaacacgatcttctgctggttgccaccagacagggagcctgcagtttggtcaatattcgccatacggatacgcagtttcctggcggtatcgttttcgcggtcgcgttgccctttaagatcggcaaatccgaatttggaagtcggcaccatagtggcgagacccagattgtcagcgaccgatgcttcaagaatcaagccttgcgtgcggcgatcttcaggaaccagtcccaccccagcggcaatggtcttgtcaatggaagctttaggaagttgaacaccctccacagtcacggaaccagaatcgtatgagtcggcaccgaaaacagcacgcagcacttcagtgcgaccagcaccgaccagtcccgcaagaccaacgacttcgccggcatgcacgtcaaaggaaacatgctcaatggctccggcacgagtcaaatccttgacttccagcagcgttttacctggctgctgagcgactcgcggatattggttttcgatggagcgcccaaccatcaatcgcaccaattccgattcaggagctttcgcgtcaatcgtgtcgatatatttgccatcacggagcaccgtgaccacatcaccaacacgtgcgatctcatcaaggtggtgcgagatgaataccatacccacgcctcttgccttgagctctcccatgatgacaaacagctgctcgcactccttgcgcgtcaaagccgccgtaggctcatccagaatgagaatcgaagcgtcctgcatgagcgctttggcgatttccaccatctgctgacgagccacgccaagctcacccatcggcgtggaaacatcttcgttaaggccaatcagcttcagcgcctcacgtgccttgcttttcatggcgcttttattgataaagccaaccttagtgggcagagcacccaaaaacagattttccattatcgacagctcaggcaccatgttgagctcttgatggattaccgcaataccaagcttgcgcgcagcttccacattgggaatgcgcaccgtttggccatcgacctcgatatgccctttatccggctgatagataccgctcatcattttgatgacggtcgacttgcctgcaccgttttcaccaagcaaaacatgaactttgccgggttccacggtgaccgacacgttatcgaccaccgtggagttgccgaatatcttcgacacccctaccagagataactgcgtcatacgcctctcgctttcgtcattgggccgacgtcactgccggcacaaaaccgcgacacatgtatgcgtcttggtcaacgctgaatcgtctcatcactgaaatgatttaacgtttaatcacttgcgtgattcataatatatcgtttaatcacaggggtcaatcagcgtgtcgagagcgttaacaatcgcgtcctaacgccattaccagcacatcagaaacacaatatggcacaaaaaaagacaaaatattggcggcgacggactattgagccgaaaccaccactctggcaacagaccctcgtgataaatacacggtgggcacatgaatggtactaccaccttggtgcacgccggattgcatggcctccaacaacaggtcgacgccttgacgccccatctgctccgcctgctgggaaatgaccgagatttttggcgtcatcaagcgaaaaggcgcaatatcgtcaaatgatatcaacgacatctgagcaccaagctcaataccgcgatcgtgcaataagccgatgatggtgatggcatcaggtgaatatgcgcagataatggcggtaacgccgcattcaagtaaataatcgacagtatggcatcgcgattcatacgtcgaaccacaatccacaacaatgcccgtgtctccatgcagcagctccggagcgacggtccggaatgctacttcacgttcattgacgctatatgattccaacgaggaatgcgctatatacccaatacgtcgatgtccgagagcgaccaattcctccatcgcctcgcgaatgccggtgtaaggatccgacactacaaaaggaaccgattcaatcccctgtacacgtcgatccacaaagaccaacggcaaatctcgcgcaatcaacgatctcacacccggggagtcagatccttgaggaaccacaatcgcaccgtcaatacgctgccccagcaagttcttgatgaatgcatcctgtcgttttacggtttccgccgacgtgccaatgagtgtagaaaatccatgtgcatacaggccctcttccatcgacgagaccaattcggcaaaatatgcgttgcgcaaatccggcaccagcagaccaactgttttggtagcggacgaacgcatagatcgtgcacgctgatcaggcacatagcccatttcctcaactgttttcagcactaattgacgagtctcattggagaaacggcctttatcgtgaagaatctgagagacggcagcagctgacacaccagcctgctgggcgacatccttcaatgtcacgaatgccatatccgtctcctccttgcggcttactgcagcgttagaaatgcacaattcaaatgtacccttcttataaccgacgcccgcaaggtcgtgtcatgcgtcaaactcttttactgcagacatttttgaggcttctgctgttttcgtgggttagctgactggttccggtagtcggatgtcgagtccgccgcatctgagcatgatcaggctgatgaggttggtgacgtggtggaagccgtaggccacgcggacggtgaccttgttcccgttgtcgaacgcctcgagcctcgcgttcggatagccaggcccgattgtcctgaggacgtcgggacgccggcgtctgatcttcccggccggttcgacgatttcggggatgcggctgcgggacgcccgggacacccaatgcttcagttcgcccccggcccgtccgatcgggcgtccgagcaaaccgcgcaggagttcctcgagctgccgggctccgcccacggcaccgatgcgacgaccacgccgcacccggggcagtcgacgcgcggcatcatggcgaccggccccaccctccagcagccgaaatcccggtgccgccaacggcgcacgccgccgccccggccataaccacgtcgtttccgcccgcagcgcgagcagcgcggcgccgccttcccggcgcgcacatggacctcgagcacgggctcaggacgcagcgggccgtcgacgatcctcgaggactcgacgaccatgcctttgacgttgaggagacgtttgaatatgccgttcatcaggcgttttccgtggttcgcttctttggtcggaaaacagaatacgcggaaacgccccctacgcttacgaaaccaacggctcaacgacgaacccacacccacgaaaacagcaatagcgccacaaaacaagcgtccgcaagttcctcttgacgagtggcattgtccaatacggtcactcggcgcggcaaagagatgtgacgagagccggcggtatagccaagccattcactgacttcgataatgcggcggcgagtctcttccttgaccgacaacgtcgggtcgccattcaataaccgggataccgctacctgcgaaaatccggatttctatgcgatttccttcaccgtgaccatgacagcatctcccccaatgcaaacgttacgtagtacttcagtaaatgactttactacttagcgtaacgcacaagacccgcaaccggaatacaccggtcacgggctttgcgatatcaatatcacatcagcagacgatatgacctgatgtcagctctcgtcttcggcgacgcgggagcggctgtagatcatcttcatcgagcagatgaagataaccatcgcacccaggacgatgatgccgccgaccatgaagacgttggcataggtcgaggccggaccggattcggtgccgaacagcgagccgccgctcatcgcgccattggccatgagctggccgaagatcgcgacaccgaccgaaccggtgatggcctgcatcagatcgttgaagcccaatgcacgtccggattcctcggcctccacggtcagcgttgcggtatccacaatcggctggtagaagaacgaggtgccgaagtagtagatgcacggcgccacggcaagagcccagatctggcccatcggaatcaggaacgcaacggcgatcaggccaccgcccatgcaggcgagcgccagaatgatggaggccttgcggccgatcttctggataatcgggccagcggcgaagcccatgatggcggcgaggatgatcgaccacaccagcaggttggagacctgggaggagtcgatgccgtacacgttcaggccgatggcgttgcagccggcgttcagggtgtagctgaagaagtagccgacaaagatgacaatcatggtcatcgcgaaggccgggttggtgagcatcttcggggtgatgaacggatccgcggccttgttgatgtagaccacgaaggccacgccggtgaccagcaccgcgataccccagaagatggtcatgtcggtgaagaacatggtcaccgagccggcgaacaggccaatgagtgtgaagccgatcacgtcgatgcgcgcgcccttggcatgctcgtcaggcaggttcttggccaggatcgggatgaagaacaccgcgatgatgccgataccgaagaggatgcgccaatcgacaagggtcatgtagccggcgaggaagacacccagagccgcggcgatacggaacacggcgacgaacacgccgtaccagatgactcgcttcttcttctcgatgtacttggagacgagcaccaggaagatggagccggagacctgccagcctgcggactgcacggtacgggcggcgatgacgatccagatgctcaggtcgccgaagcagccgaggatcgaaccgagcacgaacacgatcgtgccgagaatcatcatcttcttcagggacacgaagtcgccgagagaaccgtagatcacgcacacgatgccgagcacgatgcccggaatcgaggtgatcagcggggcgaggttggcctggccgagctggtcgccgatgttcacataaatcatgccgaaagcctgctgctgcagcacgcccatggtgaagatgatcagtacgatcgggatggcgatctttgccatcttgttcatacgggcaaactcttcggtgccctcctcaggcaccgggataccgttcgccttctccttgacagcggtttctgccatggtggttcctttctattggtttgagtttggtggaatgccttatgcgcgagcgcaaggagtaaaaacagctacctcctctcgcatgggaatcgacggcgccgcgcctcttctggataccgcgagggccgaggccttcgcggcggaatcaagtgcatgggcgatgggttcgccggacatcaggtcggcaaggagataaccggtgaaggtgtcgccggccgccgtggtgtcgaccgtgtcgacgagataagcggactgcgtgacgacgtggtccccacgcaaatacatcgaaccgcgctcgccgagggtgagggctatatccgcccgggagaaacgcgcacgcatcgcacgaatcagtgtctccccgtcttcttcggcccctgtgagcatcgccgcctcgccctcattgagtacaaaacagccgatggcatcaagatcgacttcgtcgagccgcgagtcagccggcgagggattgagcacgatgaacatgccgcgggccttggcgcgggacacgatatagggcagttcgctgatttcgttctgcagcagcagccaatcgtccttcccatacccgtcaagcacctgatcgacgaaatcacggtcgatggcacggttcgcgccggggtacagcacaatgcaattgtcgccgctggcatcgttttggatgatggcgttgccgctgcgcacatcatcgcgcactaccaccgaggtcacgcccaccgcgcaggattcgagcaggtcgcgcaggaacatgccgtcccgtcctacctggccggcatggtgcacatcggcgccggcacgagccaatgcgatcgattgattcagtcccttgcccccggggaacacgtcgagcgaatgcgaggtgatggtctggcctttggccgcaaagtgatccaccccgtacacatagtcgatgttcagcgagccgaaattcagtatgcgcatcaggactcctttcccatgacgggaccggtgagagccagttcgtagatgcgacggcaatcgtcgcgatcaaggcgggcaatggatccgatggtggcgtccggcccgtagaaatcgatgttgtccaacatgcgttcgatgccgtcgcccggcagattgaagtccttgaaggaaacaggcatgccgagcgagcggaaaaacgattccgttgcggcgatgccacgccgggccagttcggtttcgttcatcgagccgggtctggtgccgaatacctcagtggcgtatcgcgcgaaacggaacggggccttctcgctagccacgcgcatccacgatcccatgatgattgacagggtggccccgtgaggggtgtcgtatagcgcgctcagctcgttggcaatcaggtgggtggaccagtcctgttcacgacccacgccgagggtgttgttctgcgcgatggtggagatccacatgatttgcgctcgcaagtcgtaatcggcaaggtcggccaacgatttcgggccgatatcgaccaaggtgcgcaatgcgccttcggccatacggtcgatcacgccgatctcgttgccggcgctgaaataccgttcgcagatgtgggagaacatgtccacaatgccgcaggcagtggggaacgccggcaccgtgacgctgagttcggggttcatgaacgcgaataccggccggagcactggttcgctcagcgtgagcttggaatgctcatgctcattgttgatgacggcgacctggctggattcgctgcccgatgccgggcacgtcagtaccaccgcgacgggaagggtgcgctctaccggcactttgccggtgaaataatcccatacgtcacgctctccggcagctcccagcgcgattgccttggccgaatcgatgacgctgcctccgccgatggccacaacggcgtcgacattgcgggctttggcgatggcgatgccttcacgcaccagcgtcagtcggggattcggcttcacgccgccaagctccgtgtaggaaatgccggcccgtccaaggctgtggcgcacggcatctagcaagccgctggtttccaaatatgctccgccatcatgatggatgagcacgcgggaaacgccctttgcgcccagttcgtctcccactttggtttcggcgtcgcgcccgaaaacaaaggtggttccgatgcatatggtgaaatccctcatatcatgctccttgcgtgtatgacggtgtccgtcatgatgtcgttgagttccgcgatgtcgcgcgccacatatgcggggtttctgctgagcaacgcgatttcgtcgccatccccgtatgtgaccgctatgcaggagatgccgttggtccgcgcagcttcgatgtcgctgaaggtgtctcccacatagaggcattgtctcggcgcgatgccatgccgtcgaacgatttcggccatcatttcgaccttcgtcgcctcacggccgggtatggaatcggggcagatccaatcgtcgaacaggttcgcccagcctttgctgccgagtatgcggctcaatgcgccctccggcttgttggtgacgatgatattgcgtacgccatgttccttcagctcattcagcatgctctgaatgcccggatagagtctggtgcgcgaaaaatcattgagcgtgcggtagtgtacgcgtacatcctcatcaaatgtctccagatacgcctccccgggataggggatcacgtgccgcatgatctcatccatcggatcggctagattggcgtcatcgcgcatgtacaggtcatcgatcgccccgcccgcacgacgcgcggcgtacgtcagggaattccacacgtcgctgccggtgtcggcaagggtgccatcaaaatcccataacagacatcggtattccattggcctgctcctttcgttcattcgcatggcggcggtcgatgatcgagggtgagataccgccggccggccagaaggggttggaatcgccggccggcggtggagggggttgttcaggggcaagactcagtcgtagttttcgagggtgctgttcagcaaatcaacgaatccggggaagtcgagttccagcgcagcttccgcattcggctcttcgccgcggtaacccatcgtcggagtgcgctcaagatccacggcaggcacggtgccgcgcagatgacggtagtcgcacacggtcatgccgcgggtgagtgtgccgtgcagctcgatatcgatatgcatcgggaccgcagtgatcagcgacgggtcgataacccatgccaccgcgcatgcgtcgtgcatggtggcgcccgtcagctcggactcctcctcgcatgcgccgataaagaaatcggtcaggtcggcggccaggttcgcggccttggtgccgatctcacggaacttggctacgtgcttggcggtcagctcgcattgacgggtcaggttgatgccagtcatcttgacgtgcatgccggagttgaacacgcgcgacgctgcctcggggtcgacgaagatattgaattcggcggcaggggtccagttgccgtaggtgacggacccgcccatgatgcacagttccttgacccgctccacgatgcgcggctcacggttgatggcggaggcgatgttggtcagcggaccggtggcgatcagcgtcacgtcatccgtgctcattacggtgtcgacgatgaagtcgaccgcatgcttgttctgtgcggcgtgcgtcggttccggcagcacgggaccgtccagaccagtctcaccgtggaactgcggtgcggtgaccagcggtgcgaccatcgggcagctgtgccccggatatacaccaatgcggtccgccgcgccaaggacctcaagcaccttgatggcgttgcgggtcacgttctccagtgtgcagttgccgccaatggtcgtgatacccagcacgtcgaggtgctgcacggcgagcatgatgccgaacgcgtcatcgtgtccgggatcgcagtcaaggatgaccttcttcttgttttccatagggatacctccgttggttgtgttctttggattggtcgatattcgggtatggcgttcagccggtttgcccgacgaggaactcgtgcagctgcgcggcgtccggcgaggaacgcgccccgcggcgggccactttgtacgcggagacggcattgccctctcgcaatgattcggcgagggaggctccggcgagtctggcagcgatgaaaccggcgttatagacgtctcccgctccgatggtgtcttcgacgttcacccggaacgccgggctttccgttaggccgtcttgcgtaagaccgatcgatcctcgggcgccgtcccggacgatgacggtccggccgcccaccgcataggtcgtggcattgcccatcatgtcgtcgtcgcctaaataggcgaactcgtccggccccgatccaagcagataatcgacattcggaataatgcgttcgagtgcagccgcgaaatcggggtcgagcacgccgtcatccacacgaaggttcaggtcgaaggatgtgggaacaccggcatcgtgggcctgttcgaagatgcggatgatcgtctccctggcactggtgtcgtaggtcaggcacatgcccgaggagtggacccaatccgcctcgcgaatcatgtgcatcggcacgaggttttcgtcgagtaccttgaacgattgccgttcgcggggccatccccacaagtacctctctccgcggtcgtccacgaaagcgaatacaccgaccgtgttcagggtcgaatccgcaaccagcccggtcacgtccacgcccgcatccttgaagtcctgcatgacgaaacgcccgtactggtcatctcccacggtgcccacgaacgatacatccagaccaagctttgccaacgccacggccgtgttcgccgaggttcctcctccctggatgccaatctgcggatattcgacctgcgtgcgctcctcgttgagaaaacgcgggtatggcacgatgacatccacgttggcatcgccgacgacaacgaccttaggcatctttggccgccttgataaaagcctcgacctttgccgggtccttgcaccgatccgtatcggcgcgatcatcgtcgtaattggtcagggagaacgagtcgacgccatacggatgcgtggcgtagatcgcctcggccacattggaggcgtccagaccgccggcgatgatgcacggcacgtcggtggcttcgatgatggcccggtcgatggcccggtcatgggtcaggccggtcgctccgatgtctccggcagcaggtgatttagtgtcgatgaggaagaagtcggaaaccggctcatagtccttcacatactgcatgaccttctgttctccgagaggcactccggccagcaccgggatggcctgcatgatcttcagttcggggaaccggctcttaagttccgccacttcggccggactgatgccttcgatgtcaccagacaggtgcagcacatcgggcatggcttctcgcaggttctcgctgatttcgtcgatgtcttcggcgacggtcaggcctatgcgcacggcctgtggttgcacgccttcgaagatttccctggcccgttcgcaatcgagctgaccgggcgtccgcttgattttgccgtaggagacgccgatatgttcgccgcccatgtcgattaccatgcgagcgtcctcgacattccttattccatagatttgagcaatgacatcagccacgatggttcctttcctgagcaatggcgttgatgaacgcggggacggataacaccgtctccttgaggcctgcaccctgagccactcgggtgacgggcggcggcgtcacgaaggaacgccgaagtgtgtcggtctgggcaaacacctcgcaggcctggccatcgagcagcacgcggccgtggtacatcacgatgacacgggagaagttcgcggtgacgaatttcatgtcgtgcgaaatcgtgatgcagagtttgccttgtgctttcagacgttcgatgatgcgtgcaaggcagacgttgcccgacgcatcctggccgcacgttggctcgtcgaagatcaccacggatgggtccatcatgatgacggcaccgattgtgcagaatttcttctcggtgggcgtcaggtcgaatgggtgcacgtcgagctttttggtgaggcctaccagctcggcgatgctgtccacgcgatgcgcgatgtcctgatcgctcatgccgatctggcgcggaccgaattcgaattccttgcggacgctttccagaaacagctgatcgtcgggattctgaaagacatagcccacgctgcgggaccattcggcggtgctgcgctcattgacgtcaatgccatcgatcagcactttgcctccggtggggcgcagaatgccgttgaaatgcttgaccagcgtggtcttccctgcaccgttctgccctatgatcgccaccggctcgttgccgtcaagcatcaagtccactccgtcaagggccttgtcccctccgggataggcgtgctccagtgcctgcaactcgattttcatgagagcgcctccttggccatgcggatggccggctcctcggtaatggcaatcgggccaccgagcgcacgggtgatcttcacgtaatcgggcacttccacgccatgctcttcaatcgccggatcggagaacacctccatcggagagccaagggccacgacttcgcctcgctcgagcaccatgacggtatccgcgtatcgtgccactcgctccatgtcatggtcgaccatgatgacggtgacgccgtccgcattgagctgtttgacaatgtcgaaaatctcctcgctgcccatagggtcgagctgcgtggtgcactcgtcaagcaccaaaatgcgcggttccatgatgaaagtggatccgaaagccacacgctgcacctgtccacccgacagttccagcgggttcttgtctaggatgtggtcgatgcgcatcaatttcgccacagcttcgacgcggtcgatcatctgcgctctggacacaccgtggttgcctaatccgtaggccagctcttcggcgacggtcccggcggtgtaggacagctggttgaacgggttctgaaataccaggccgatggtcttcgacagttcggcgatggtcgaatcggcgacatcggtcccgtcaattaggatgcgtccagccctcgcccccacgaaatagtgcgggatcaggccgacgagcgcgttgcataacgtggatttgcctgccccattcgcgccgatgatggtgaagaagctgccttcctcgacctggaagtccacgtgtttgacggcccgacgcttgatgtcgcggtacttgaaggagaaatccttgacctctactatcggactcattcacttgcctccccacgagaccggcgacggaatcacaccgatgcggatgcatacggaaacggcgaccacggcgatcagaaataggacgaaaatccaattgagtaccttgtcggcggcattccagctgaccttgacataactggtctgcttcactccagtaacgccgaagccgcgggtctccaaggtcataccccgctcctgggcgtcggtcagcgatgacatgacaaccggaccaagcaacgggatatacgccttgatgcgggcgatgaccccacccgatgcatcgagtccgcgagcggattgcgcctcctgaatcaccgccatacgtcgttgcatctgcggcacgacattcaggctggcgagcaccaggtatccggccttggcgctgagccccaccgaagtgagcgcggataccatagcaccgacataggtggttttgttcatgatgtagaagctgccaagaaacaccagcaggctcaccaccactttggccgcatacagcacgccttcgagccccagttgcgcgaagccaaaatccagtaatgcggtacggttcttggggctgtacagcccttggatgaacatgagcatcacagtgacggggatgccgaaaccgaacattatcttggcgaaatcacgctgtatatgagccaagaacgagaccacaaacagcaacaccacgagtatcagaccaagcgtgaagtcaggccatgccaatgcggacagacccaaggcgaatacggccgctatcttggtgatcggattcagcttctcaattacggtgtcattgatgaccggcatatgcgacgacatgtcttactcgtcttcttcttcgtcatcatcactcagcgcaacattgtccgagccgcccatggagtcggccgcatactggctgagaaagcgacggggaatcttctgcacgatcacccacgcgatggcgacagtgatgcccttgtcgatgaggttctcgatcagcgacgaggagatcaccgaggcgagaatgtctttcatggccacgaccagcgttgccgtcagcaccgatgtaccgttgacgccggtggcaccgccgtatacgaatgcggtgatcagcgatgcggagatcgcattgacgagcgtgcacaccagccagatgaccacgacgccccacttcttacggaacagtccggccttgaccatatagccgacgaccaaaccgcacaataccgacaccgccgcatagggaagatagaccgggttggccaccagtgccaggaaaagattggtcagcaggccggtcagggccgcgacccatggtccagacaggcatgcgacgacgatggtgccgatcatgtcgaggaacagcggcaacttgagtgcggagcacagagttccgccaatgagattgattccaaccgcgatcggaatcaacactagggactttgtggagaattgcgccttgatcccttcccagaacgacagcttctttgccatgctggccctcctttattttccaaccctcagttttccgcattgtgcaatctgcattgtttgccttgcggaatcttaggaaattattttcctaaaatgttttcttgagataagattataggacgccaacgtcagtgtcaacacggcgggtcgagggtcgcgcaacctggaccgaacggcccacaatggcgacgtagcaaggaacagaacgctacgcccttgtacactgatacagaggaaaacaggcaggaggggagacatgaacatcagggacatcgcacgcatcgcgggcgtctccacctcgacggtctccaaaatcgtcaacggcaaggattccagcatcagcgaggaaacccgcaagaaggtcctgacgatcgtcaaggaataccattacaagccatatgcctccgccgcgaagcgcacgcgcagctacaccatcggagtactgctgcgctcccccatctctttcgatagcacgctggatggcatcatccaggctgcccagaacgccggatatgcgaccgatgcctacaacagctactccgatccggaacgtgagctcaaaaacatcgcggcaatatgcgggcgcaacgtcgacggcgtcatctgggagccggccaccccggacagtctcgcctatgcctcgcaattccccgaaggcaccccgttgctgaccataggacccaacggcggagaccagtcactgctgctgccttataaagaggcggcctataaattgaccaacgagctcatcgaacgaggtcaccaacacatcgcctgcctaatgaccagaggccgccgcacacaggattttttcgaaggcttccgctcatgcctgttcgatcaccagctgccatatagcgacgacttggtctactacgacctcaacgattcactgcccagcaaaatcggaagccgtgacatcaccggatttgtctcctcgcattacaggcgagcactcgagttcacgcagatgatccgccccttgcattaccggctaccggaggacgcctcgctcgtctccatcaaaaacgacaccaccgaggcactggcttatcccggcaatgcggaaatatccacctacaccatccgcaactccgacttcggcgcctacctctgtgagaagctcattgcacagatagagcacgacaaagagcagcatccctcgttcgtacaggattttcatctcgacaacaccagcacggtcgccgctccgcctacttccgccgtcaagcacgtgttggtcgtcggcagcatcaatatcgaccactatctgtcgatgccgcggctacctcacatcggaggcacggtatccaccaaatcggcggcacgctaccccgggggcaaaggggtcaatcaggcaatcggcgcggccaagctcggacatcacgtcaccctcatcggcaatgtcggcgtcgacaatgggtccgattacattttcaaggcgatggagcagcatggggtcaatacggccggcgtgcgacgctgcgccggagaagacaccggttcgtcgttcatattcctcgaccccaacggcgaatcgattatcgcgattctctccggagccaacgcatcgcttaccccggatgacatcacctccaacgaacgactgttcgacaacgccggatactgcctgatacagactgaaataccgttggaatcggccaaagtcgccgcgatcaccgcccgacggcaccatgccaaaaccattatcaagccctcgtcatgtgactatctgcccgactccatcgtcgccaacgccgacattctcgtgccgaacgagcacgaactggcaatcatcgaaactgagggaaaaacgatggaggataaggccgcgcatcttctcgaacgcggcgcgggctgcgtcatcgtcacccaaggagaatacggctgctacctgcgcggccagaatgtcgagtgtcactatccggccgctgacttcacccccgtagacagcaccggggccggcgacgcgttcatcagcgcgttcgcctcgtatctgatgtatggatacaccgtgcggcaggcggtcgaaatcgccacctatgccgccggatactcgatcacccgcaaaggcgtcattccctcgcttatcgaccggctctcgctggatgcctacgttcaccacagcgagcgacagcagcacggtcatctgtcttaaagcagttttcaccgcagacgattgaggggagccgtatctagtctgcggctcccctcagtcagcttcgctgacagctcccctcagagaggggagccaaaaaagcactactccagctccaccgcgccggtgtacagctggtagtactcgcccttttgcgcgatcagctcatcatgcgagccgcgctcgatgatgttgccgtggtcgagcaccatgatcacgtcggagttgcgcacggtggacaggcggtgggcgatgacgaaaaccgtacggccctgcatcaggttatccatgccggcctgcacgacctcctcggtacgggtatcgatggaagacgtagcctcgtcaagaatcagcgcgggcggatcggccaccgcggcgcgggcgatggaaatcagctggcgctggccttgggacagaccggaaccgtcgccttccagcaccgtgttgtagcccttgggcagcatgcggatgaagctgtctgcattgaccaaacgcgcggcctcgatgcattcctcatcggtggcgttcaggcgtccgtaacggatgttgtccatcacggtaccggtgaacaggttcacgtcctgcaacacaatgcccaaagacctgcgcagatcaggcttc

SEQ ID NO: 3334 - DNA, 7315 bp, Unknown
  R151_18m  MAG No. k141_14303
cgtcatcgacttcgacgccagcctcttcccatacttcatggaatggaagtcgatgggtgcgggcgactacgtggtcggcctcgaaccctcgaactccagcgtccacggccgcggctggcacgagcagcgcggcgacctgcacaccatcgccccgcagaccagcgaacgtaagtccctgaccttcaccgtcatcgaaggcgaggccgcgattgacgggctcatcgcccgccgcgacgccctgcttggctgaattgtgagataatatcggccgatatgtgaacggctgattagcgtggggagcatggttacccgggattcggaacagtatctgcgattcaaacgggagcacacgctgccctcgcatgaggcgattatggactggtatcgcggcaccggcatgcgtccgtatctgcaggcgcttgacgacgccggccgcaagaagttcgaggccgaagtgttctcccaagtccgcgaggaataccccacacagtcggacggcagcatcatcttccccttcccgcgtttcttcttcctcgcgactcggtagaagctcgccggattcgtgtactgggcggcgcgacctgtttcccgcgccgccagctgtgggttgacctcgctactgggcttgcggtgatgccgctggctgctgcgctgcttccgattgcgatggcatttgcatatgcggtgcgatgctggggagtgtgccgtcatgcatgcactgcttcaatatgaggtctcgctgggcgatgaggtcgtcttcgatctggtcacgcacgtcgcgcacggacgagaaatacaggtagaacgtggcgtgattgtagccggcgagttcggtgatctgacgcaccgagatcttctcgatcggcttggtttcatacagcttccagaacgcctccttaaggcgattgaccgtctgctgcgtaagttgcgggttcttcttgattgcgattcgcggtatggtgatttcgcataagacgcacaaccccatcgattcgtcggtcaaattcgtgaccttctcgatgcgatgctgtcgctggtggtcacgcaggacgtgctgttggaatcccagggaaccgcgcacgcggcgcaatcctcgggactgttcggcatcgggctcggcgtggtggccgtgatcatcggcctgtggatgttgctgagacgtaagtggacggcaacggaataggaatagtgacagcggaatagcgcgcgtgatattggtacgcgacgtatcgtaaaagcggctacaatgcttacggaaaaagtctttgcaacgagaaggaagacatgactgagcggcgtcgagcacggatgaggattcgtcgtcaacgaatttacgttgtacggcgcattgtggttgcggtatgcgcattgttgtgctgcgttcttgccgtcttctcgacgattgacgcccaacgggtgtggccccgcggtgagtcggtcgcacaggggcaggcagaggttcaggggcaggcgcagaaggtgagtcaatccgcgcaacagtcggcatcgcgagtgtctgcatcggcctcatccttggaccgccagcaggtaccggtctttaaccaggcgattcaggagcagcgtgacaaggaagcgcaacgtgcgcgatggacgaatcccaccggcaagcagcctgatttgtcgcaatactccgatctcagcgtgaaagtcagtatcgccaagcaggaagtgtatgtgcaatccggcggtgagaccatctacacgatgatcgccagcaccgggctcaacgatacgaccccgcgcggcaactatgttatcgggatgagaggcgatcacttctacaatcccgcagaaggcatgggtgctgattattgggtgcgattcaacggcccgttcctcttccactcggtgccgaccggggcgaactccggcgagtatatggaagaggaaggcaacaagctcggtcagccggcctcacatggttgcgtgcgactcactgtggccgatgccgaatggttctacaaccaaattccggaaggcacgccggtcaccatcgcctgaggcttggcctgagatcgatactgaggctatcgtgctttaggcgtctgatattggtcgtcggtagtgaagcaggtgcgatagaccatggccatgatcagaccgtcggccagcaaggtcagcgcggcgatggcaccgaagaccacgaactggtatttggcggcgttcagcggatctccgccggctatcacctggcccgccatcatgcccgggatggtcacgatgccgctggaggccagcgaagcggtggtgggcagcagtcccagccgaatcgacgagatgacggatggacgggcggactcccatgccgtcgcccccaaggccagcatcatatccacctcgtcgcggcgttcctccatgctttcatagaatcggctcagcccgacagcgagcgcggaaacggtgttgcccagcagcatgccggtcaggggcaccaccagctggggcgcataccatgggtgtgggcgcacgatgagttcggtgaccaacgccagcatgagcagcatcgtgatgaccaggctcaggaagatcggtccggcaagacctttggggatgccgcgcgcgcgggatatcacgatctgcaccgccgcgaccagcatgaccgtcatcagggcgaacaccatccacacgctgttcgaacgaatcacgtagctgatgatgaatcccatggcgcacagctgcacgagggcgcggcatgccgaccacatcagggtcctgccgatgcccatgtgcatgagttcgctgacgatggccgccgcggccaccatgcccaacgccagaacaagaccccaggtgtcgatgtcgtaggcgccgttcatgggcgcacctccttatcccgcgtcagatcggtgagccgtcccgcatcgagcatcagcgtgcgggtggcgcgtccgtccggcggacggtgtcggatgcggatgatcgccatgccgtgtgcggccgcgtccgccatgatcgcggccactttggatgcgttgtcgtcgtcgagtccggcgtccgcctcatcggccagcagcaccttcgggtcggtgagcagcgtgcgggccaacgccacgcgtgccgcctgaccgcccgacaggtcatgtggcgcgcgcgccaggtcgatgtcctcgcagcccatcgcgtccaacgtcgtgcggatgcgctcgtcgggcagcagctgctcggccctgccccccttgcctcgaatcgcgagcgtccagggcagccggatcgcctcggccacgtccttgccggtcagtatcggtttttgcggcaggtaggagacgtcccgccgccactgctgtgcgctgaattcgtcgctgcccacgccgtcgaggacgaacgtgccgtgcgcgtgcgggttgagtcgggcgcatgcggtcagcagactcgatttgccggagccggacgggcccaccaggtcgatgatgtcgccgcgttccatgctgaaggacaggttgtcgaacaccgtgcgttcgtcgtccgccggcgatcgcgcggggacgacgcaggacacggatatggcttcgaagaaggatcgcatattcatccagtctagtcgggggtcacgtgggaaaccccagcgcccggattcaatttgtaagtgcaacgctcgtgcagagcaaggcaacggtcatctgctgttcctgtagtccacccaactgcgcgaagccgcagatactttccgcgcccaaccaagcgaagaacgaccgctgatttcgcgcaccgacgcgcaagccatgctctccgacgcaatccaccgatgccatgaacgcttcattattcatgtcaataagccaggaaatgcatatagcaaatccttcgattacactgaattcatcaaaaccgtgcaggctatcgcgggcaatgccctgcaatccagtgattacgcaagcgcatgcgaaaacttacgattgtgcatacacgaagtccacgcgcttctgctctcgtccgaaaacgatgatgattccgagcctttgctcacgcttatggacggtctggcgatgcgcgtgcgatgctatatggagaatgtggcggaattcgccgactcccctaccgccggcaaagcattgaacaccattgcacaggcaacgaatgacaagaacatgcggcaatgcgaaccattgaacaacatgttgctgatttccagcgcgctcgccttcgcccaatatgacgacaaacgcatgtgggcctatgacgtaatcgagaacgcgataacgcgtaatctggaatactcgttcaacgaagagagcgaagaaagcgacgaggacgacgaggatacgaacgaggtcgatggcgagaccgacttcttttctgcaacgacaaatccgacacccattacgtgggtaagctgcgcaatctgttgcgcatatacggcggtctcagcgcggaagaatggcacgacgtggctattgaactggccaaagattgcgtacgaaacatcatcgaccgcatcaagtatcagccggaaatgaccaccaaaggcggcacacagcgccacaacagctggcgcaatcccgcttacgagaagctcatcgtggatgagcggctttcggacgcggccctgacctattgtcccatcgtagattacccgccgctgccattgctacgccccgggttctagatagaagcgcaacacctgctctatggttggaagtgttcaagtccacaaccggagagaaagtgctgcgctcgatatgaaagcttattcccacctgtcggcagaggaacggatccggatcgacgaattgcgcaacagggacgggctcggcgtgcgccagatagccctgaggatcggccgcgacaaggccacggtcagccgcgagctgaaacgcggattgtggttcgcgtccaatgagaacgactcgtaccgtccctaccggccgaggaaactgaagaccggggcgtggacgtgccgtccgttctattcggccatgaccgcgcagaggaaggccgagacgcgcgcccgcaggtcgcgcaagcccatgcgcatggcgtacgacccgctgctcacgtgggtcatggacgccctgaggaagggctggacgcccgaacgcatcgagggacggcccgcggtcgaattccccgacgacccgcacatgagggtcagccacgagtgcctctaccagtggatctacgccaagccgcagaggatcctggatctcaggcagtacctgcccagaggcaagcggcgccgcacgcgcgccaagggcaggaggtcgaaggggccgcgcatcccgatgcgcgtgcccatcgcccagcggcccaaacgtgtcgactcgcggcatgagttcggccatttcgagtccgacaccgtcatcggcacggccccctcgaaacggtgcatcgacacgcaggtcgagcgcaggagccgccgcctgttcgcccgcctcatccccgacaagagcgcgccggccacggcgcgcgccgaatacgacatctacaaggacatccccgcgcccgcgcgcatcgaccgcacctgggacaacggcacggagtcctcctgccacctgctcgtggacgaggccctcggcatgcccgcctactatgcggacccctactcctcgtactagcgcggcacgaacgagaaccgcaacggacgcatccgccgctacctgcccaagaaaaccagtttcgacggcctgacggacgaggacctgcaggccatcatggacgagatcaacgacacccccatgaaggtcctggaccgggaaacgcccaacgaggtttggtaccgcgagctcggcaaggtactctcgaagacaagccacccaaagacgggtgttgcacttacaaattgaatccgggttgcgtatcgaccagcttggcataggatgtgacttgaagcacgtcggtgtcgttcagcgtatgactgggcttctctgcatcgataatgacttcgggtcggtcatccacaagaatttcgatgtcactgaataaagtgacttttcgactaccagcttgagcggtaatgggattctcgaatcgcatttcgttttcggagtatcccaatgaccgcaaatacggcatgatgattttctgcttcgcgtcttcctccgaatgaacagcaacaccgggagcatgtgcgggccgtcgactcgccgccagacccacgacatcggctcatcgttggacggcgaccgggccgaccgcgatggatggtctcaagcggatccatgcgatcatcgagagcgtcacggtgcattgaacagggaagggaatagacgatgattgcaatgattggtgccgcggtgactccggtattcgcgcaggcgctcgatatggcgatcgacggcgaggtgtgcgtgaacggtgagtgcaggccgatggccgagcgggatctgtggattccgttcgcgatcgtgggcggcgtgttcgccgtcatcatcctgttcgtcgccgtcatcatcctgctggtacggcgcatgggacgcgcgaaggcgcagggccgcgccgccggcaaggtgagcgtcggcgtcacctacgaatggccggcgaagacggtgaagcgcatagcgggggtggtcggcgcccgctacgagccgtctatcgttcgacggtcaggaacgcctggctggcgatgaggttcatcataggattctggctgtcggatgtggtactccttgcggcgtacctgtatttcaaggatttcgcctttctgttctgcctcattctgatgacgatgatatgcatggtcacgatgatggtgggacggcccgtcgcttggttccgcctcatcgcacaggcgaaggccaacatcgtcgatgatgagacacgcccgtaatcgtcgttttcgctctgttgggggagcacatatgcggttgcgatgacggcgcgtccacggccatgatcattcaccatccttgatgatctcgggggcggaggcgtccgcgctggcggtgaatcctcccgtataccaggagtcccacgcgggcgtctccgtcgaatggcgcatagcgtcccgtgcggccccgatggtgaatccgtcgccgtcgatgcgtgtgatctgcgcgatctcgtagtggacgtccagcccgtctttccgcatggcggtgatgaacgccgatgcgaatgtggcgaaccgctcacggtccgtcacggtttccggggagatgtagatctccatgctgccaacgaaatacgaggcgagatcgtcgacggcggcggacggcgacaaccgccattgggtctcgttcttcggaccggtggggtcgctgatccggtagacgcagtcgagatcgggatgcgccgcgaggaaccggtcgatccgttccgtaagatgaccgttgtagtcgtcccggcgcagcgccgtgaa

SEQ ID NO: 3335 - DNA, 14720 bp, Unknown
  R151_18m  MAG No. k141_14428
actttagaaagctgaggaatagattatggcacgtgtcaagcgcgcagtgaacgcccacaagaagcgtcgcgttgttctcgagagggcttccggctaccgtggccagcgctcccgcctgtaccgcaaggccaaggaacagctgctgcactcctttaactacaacttccgcgaccgcaaggctcgcaagggcgatttccgtaagctgtggatccagcgcagcaacgctgccgtccgcgctgagggcatcacctacaaccgcttcatccagggcctgcgtctcgccggcatcgagctggatcgtcgcgctctggctgagatcgccgtctccgacccggacaccttcaagaccatcgtggccgccgccaaggccgccctgcctgaggacgtcaacgctccggttgaggcctgattgcttgaagtcgtgacttcacacttgaaaccccgcttccgagcggggtttcctattattagcccccctctgacgaggggggctcccgcgcagcgggtggggaagagaacaaacgcatgaccaacggattcaccaaactcaccgagcagttcctcgtccacatcggcgtggagcgaggactcgccacggccaccgtcaccgcctacgaatccgatatcgccaaatacattgattggctcgaaacccgcggcatccacgaaccggacgccataaccaaacaagacgtcgaagactacatcgccgcccttgaccaggcgggggagtccgcccgctccaaagcccgaagactggcctcgatccatgaattccatcgcttcgcgctcggccagcacgcggtgactgccgacgtttctgccgcagtcaaggcacccaaaggtgccagcaccctgcctgacgtactcaccgtggacgaggtaacccgtctgctcgacgcggcggcagccggcggctcaaccgatccggtggtattgcgggacaaggccctgctcgaattcatgtacgccaccggctgccgcgtctcggaagccaccggtgtgaatctggacgacatcgacctggacgagcacatcgcgcgactcatgggcaagggctccaagcagcggcttgtgccattgggcagctacgcatgccgggccatcaccgcatacctcaatgcggggcgtggcgagctggaacggcgctccagcgccaagattcccgagagacgcgcactgtttctcaacaaacgcggcaagcgcatctcgcggcaatcggtatgggaaatcgtcaaagcaaccggggagcgggccggcatcaccaaaccactccatccgcacaccttgcgccattccttcgccacgcacctgatccaaggcggcgcggacgtgcgcaccgtgcaggaactgcttgggcacgccagcgtgaccaccacgcagatctacacgcacgtaagccccgaaaccctgatcgaaacgtatctgacctcacaccccagagcgcggtgagacacaccattttgcgacgcgtccgcccatagcggaatcgcggcgggggggggagcaccaaagtcggccggaaattcaaggcgtgacaatacagtacataacagcgaaccgtcagccaggaagaggtattcatgctgcagatcaaatcgatctcgaagcgctataaaaccggtgatttcgttcaacaggcgcttgacaaagtcagcctgaacctacgcgacagcgaattcgtcgcgattctgggtccctcgggttccggcaagaccaccttgctcaacatcatcggcggcctcgaccggtatgacgacggcgatttggtgatcaacggcatctcgacgcgccaatacaaggatcgcgattgggattcgtaccgcaaccacaccatcggcttcgtgttccagagctacaatctgattcctcatcagacgattctgtcgaacgtcgaactcgcgctgacgatttccggcatcggcaaggccgaccgtcgcgaacgtgcgcgcaaggcgctggagaaggtcggactcggcgaacacatcaataaaaagccgaaccagctgtccggcggccagatgcagcgcgtggcgatcgcccgcgcactggtcaacgacccggacatcgtcctggccgacgagccgaccggcgcgctcgattcggacacgtccgtgcagatcatgaacctgctcaaggacgtggccaaggaccgcctcgtggtcatggtcacccacaaccccgaacttgcggaacaatatgccacgcgcatcgtcaacctgcgcgacggcgtgattcgctccgactccgacccgtttgtcgtggatgagacggccgaacagccggccgtgcacaagacgatgggccgcgcgtcgatgtcgttcgtcacgtcgctggcgttgagcttcaacaatctgaaaaccaagaaggcgcgtaccctgctgacctcgttcgccggctcaatcggcatcatcggcattgcgctgattctatcggtgtcgactggcgtgaacgcatacatcagcgacatccagcgtgacacgatgaccgcctacccgatcaccatcgactcccagaccttcgacctgagcagcatgatgggcggccagatgggcggcgatgacggatacggcggcaagacgcacagaaccgacggcatctacccggacgaccgcagcgtcaagcaggcatccagcctgaccagttcgattaccgaaaacaacctgacccgcttcaagaaatacctggataattccaagagcgagattcaccagtatgtgggttccgccggtatccagtacacgtatgacgtgaaattctccgtgttcgaccacgaccccgatggcacgctggtcaatgcggacggcgtgacgatcggtgccagcgactccacttcaatggcctcgcagatggcgtccacaagctcgtccggcatgtccggcacctcgtcgatcacctcgcagcagatgtcgatgctgaccggcaaaaccgatgagaacgccgcgcccgactcgttcaatgagatcatgcctggagcggacgacagcaagctcgtaggcaaggtcatcaccgacaactaccaagtggtcaacggttcatggccgaagtccaaggacgaggtggtgctggtgctcgacgacaacaacagcgtgccgctgaccacgctgtacgagctcggcctgctgcccgcctccgactaccacgagatgatgtccaagctcaacgccggcgacaaggtcagcactccacaagacaagatcgactatgctaaggcgctcgaccagacgctgtacatgattccggcatccgaccagtacgtcaagggcgatgacggccactaccgattcatcggcaacgacaaggatgtaatcgagcagcgcctcgaaacggccaccaaactcaaggtggtgggcgtcgtcaaggcgaagaaggatgcttcggccacaccgttggccgctggcgtgggatacacgcgcgctctgaccaatgatctgatcgaccgtgcggcctccagcgccatcgtcaccgatcagaaggccaacccgaacacgaacgtgctcaacggcatgacgttctcgccctcggacgacgccaccaaggcggccgacgcgcgcacctacgtggtttcgctgggcgtgacgcagaaggcgaacatggccaagtcgatgatgagtgccgggcagcggtccggtacgggcgatcaggccgacgcgatggccgcgatgagcgaacagcagctcgccgacagtttcgactcgtatatcgccacggcttcgaacgacgtgcttgtcgcgatctacgaccagtacgtgtcgaccggcacctacgacgacaacctcgccgcattcggtgtggtgagtcgtgacgcgcccagctcgatcaacgtctacgccgacagcttcgaagacaaggaccacatcgccgacgcgattaccgactacaacaacaccgtctcgaagaaagacaagatcacctacacggattatgtggggctcatgatgagctcggtgaccaccatcgtcaacgtgatttcctacgtgcttatcgcgttcgtgtccgtctcgttgattgtttcctcgatcatgatcggcatcatcacctacatttcggtgctggagcgcaccaaggaaatcggcatcctacgcgcaatgggtgcctcgaagcacaacgtgtcccaggtgttcaatgcggagaccggcatcatcggcctatgctccggcctgttgggcgtgggcttgaccgtgctgctcgatattccgatcaacgccgtgttgcatcacttcatcggcaatgcggacgtcaatgccgccctgccggtgaccggcggcgtggtgctggtgatcctaagcgtggtgctcacgctgatcggcggcctgattccctcgcgcaaggcagccaagcaagacccggccaccgcactgcgcaccgagtaagcgcatcgacatagtacgagacgagatccataaacctcggaacactggaatgcccgctgcaaaacggtgttccgaggcgagcccggcgagtacattaggataggcgagcaggtattcccggcaaagggggcgagggcaacgatggacgactggcgagacatccgcgataaagacagcgcattccgtcaaggaacgctgcctatggcgggaacgtatgtcgttgcacccccagcgaacccggatgttgataaggtagacagtatgcctaccgatttgcttggacgtgaatacgaaaccttccccgcacccgaaccgctgcaacagcacggtccggcgcgtgtcattgccatgtgcaaccagaagggcggcgtaggtaagaccaccagctccatcaatatcgccggtgcgttggcccagtatggccgccgcgtgcttatcgtcgatttcgatccgcagggcgccgccactgtgggactgggcgtcaacgcgaataccgtggagaacacgatttacaccgcgctgttcgatatttccgtggacccacatgatgtggtgcagcacaccgcattcgagaacatcgatgtgattccggcgaacatcgatttgtccgccgccgaggtccaactggtcacagaagtgggccgggagcagatcctgaacagtgtgctgcgcaagctcaagtcggaatacgatctcatcatcgtcgactgccagccatcgctcggcctgctcaccgtgaacgcgcttgccgcagctgatggcgtgatcattcccgtggccgccgaattcttcgccttgcgtggcgtggccctacttatgcagtccatcgaaaaagtgcagtcccgcatcaatcccgcattggaagtggatggcgtgctcatcaccatgtacaccaagacactgcactgcgaagaggtctgccagcgcatttacgaggcgttcagcgaaaaggtgttccacacgttcatctcccgctccatcaaactgcccgattccacggttgccgccgcgcccgtggtggtttatgcccctgagcacaagacatcaaaggaataccgtgaggtggcacgtgagctcattgctcgcggcatcgtggcgtaacgattgtttcgataaacgatgaatgagacttccctttctcggctcccctctctgagggaagctggctcgcgtagcgagattgaggggaactccgcggaagccgaaatcagcacggaggaatcctccacctccggcttccaagtcaacctcgaagtctattccggtccgttcgatgccttgctcggcatgatcgccaacaacaaactcgagctgaccgaagtttccctctcctcgatcaccgaggaattcctgacatacgtgcgcgggctcgacttcacgaaaaacatggatgaggccagcgcctttctcgacatcgcctctattttggtcgaggccaaaagcgtggcgattctgcccggcggcgaaggcagccagcacgacgagcaaagtctcgaggcgctgcgcgaacgcgatttgctgttcgcccgactcctccaataccgcgcctacaagcaggccgccggtgatttccgggcgcgtatcgccgccaatgccggccgattcccgcatccggcggccatggacgagggcattgccgccatgttgcctgagctggtatggacgctgaccccgctcgaactcgcccaactggccgcccaggtcatcgccaacgcgcccgcctccgaagtatcgatccaccagctgcacgtgccgctggtcgatctgcgggcccaatcgctggtggtgcgcgaccggctgattgcagcactggaatccaagggcgaccagtcgatgtcgttcagcgaattgacccgggactgcacttctcgtattgaggtggtggctcggttcatggccgtgctcgtgttcttcaaacaaggtgtgctgcagtatcagcaagatggtccgtttgccgaactgcacctgaggtgggtatccggcgtagacgaaacgatgaacgacgtgaacatttccgaaggcgattttgcgtaaggacggcgactggtgactgaacggattgacgcaacgaatgcaaccgagcacatggcggatgccgaatcgacggctgaatccgcaaaggccgaggtgaggggagtggaggagacgcgccccgaatacgtggatttcacggtagacgattttcccggcgggctgcccgcatgtctggaagcgattctgatggtcgccgaccagccgcagaccgccaccgagctggcccgcattttggcattggaccgcaacacagtcgaaggggcattgcaagccctgcacgatgactatgagggcgatgaatcccgtggcatccgcccgcgcggcttcgaactacgccgcaccgctcgtggctggcagttcgccagtcgcgccgcgttcgagccggtcgtctcatcattcgtcaccgacggccagactgcgagactcagtcaggccgcactggaggcgcttgccatcgtggcctatcgccagcccgtcacccgagcccaagtggccgcgatccgcggtgtcaactccgatggcgtgattcgctcgctcacggtacgcggccttatcaaggaagacggcgtggaccccgaatcccgcgcagcccttttggtcacctccgaatccttcctcgaccaaatgggcctgaagagtctcgacgaactaccctccctagcgccgttcctcccgtccgtcgccgaaatgacacagtcgaaatcgggggatacggacgtgatttcgtagcgattggggcccgctacctgaccaatattcgtgcgctagaccatccaatatgtgatttatggtcattgtgactataagtagtgctatgctctcaatgcggggagaacaaccggtatggaaagaggcatggcatgggattcggcaatgtgtccgagcgccgcagcgcaccgccacaggtcggcgtgtcagtggtgattctggcactcggcccgaaaggcgataccggcgacagtgccgccgattccggcaacgccgcgaactcggcccattcccgtctctggctgcccctggtcaagcgcgtccgtcagccgttcctgggctgctgggcgttgcccggcggcgacctgcgctccgatcggtcgttggaacagtccgcctacgcggccctcgaatcgaccacagacctgcacccgcgatacctcgaacagctgtacacctttggaggcccgacccggtcccatggcggattgcccatggtatccgtcgtgtactgggcgctcgtcggccagaccgaggccgcgggcttcgaggacggtgacaacgtacgatggttccccgaagacgaactgcccgagctggcgttcgaccatcgccagatcatcgactacgcgctgctccgcctgcgctccaaaatcgaatactccgacgtggccacccgactgctcggccccacgttcaccctgcgccaactgcacggcgtctatgaggcgattggcggcgaaaccctcgacttggcgaacttccgccgcaaaatgcttgcctcgggcgatcttgaagacaccggggagaaggtgcgcgaaggccgccaacgaccggccaccgtctaccgctacatccccaaacgacctgtcgagaatggcacgccccacgaatccgatggcgacgacatcgtggaactgtccagacaaggcgagcgtgaagacgctctcgacgcgctgatcccatccgcgcgcatctgatttttcccgccgacccgcttcgggccggcatcacagacgtatatagggaaaggaaccactatgaccgcactattcactgcgccgtccgttgacgagatcatcgccaagctgggcgcgcaaagcacctgcgatgcaggactgacccaggacccatggcacttcgacaccaccacacccagctacggtcccggtgcctcgatgctcgaccgtctgcccgccaacgcgccgcgccagcaggtgctgccggacgaataccgcaaggcctccgacgaggagctgcagcagcgcatcaccgacgccaagcagcgtcttggctccaaactgttgattctgggccacttctaccagcgtgacgagatcatcaagcacgccgatttcgtgggcgactccttccagctggccaagaacgccaccgaacgcccggacgccgaccacatcgtgttctgcggcgtgcacttcatggccgaaaccgccgacatcctctccacgcccgaacagagcgtgaccctgcccaacctgtccgcaggctgctcgatggccgatatggccaacatcgaccaggtccaggaatgctgggaccagctcggcgagatctgcggcacccagccggactccgatggcttgcagcagatcatcccggtcacctacatgaactcatccgccgcgctgaaggcgttctgcggacgcaacggcggcatcgtatgcacctcgtccaatgcgcacgccgtgctggaatgggcgttcgcccgcggcaagcgcgtgctgttcttcccggaccagcatctgggccgcaacaccgcccgcgcgatgggcattccgctgagcgagatgccgctgtgggacccgttcaaggcacagggcggcgccgccgatccggccgactacgtccgcgccaagatgattctgtggaagggcttctgctccgtgcaccagcgcttcaccgtcgaacaggtcgaacgtgcccgcaaggcatacccgggcgtcaaggtgatcgtgcaccccgagtgctcgatgcaggtggtcgacgccgccgacggcactggctccaccgcgtacatcgtcaaggagatcgccaacgcacccgccggatccgccatcgccgtgggcaccgaaatcaacctggtgaaccgtctggccgctcagtacccggacaagaccgtgttctgcctggacccggtggtctgcccctgctccacgatgtaccgcatccacccggcttacctggcttgggctttggagaacctcgaagccggcaacgtggtcaatcgcatcaccgtggacgaagaccccgcccgcgaagccaaggtggccctggagcgcatgctgcgcgttcacccgtgacatgcttctagctcccctccctgaggggagctgtcaccgtaggtgactgaggggagcagatgacgcaaaaacagaggaaagcaacacaatgagcaacactgaaatcgtcgtcgtgggcgcaggcgtcgccggactgtccgcggcactggccgtggccggcaccggacacgacgtgaccttggtaaccaaggccgaactggtggaatcgaacacctatcatgcgcagggcggcatcgccgcggccattttctccgacgacgacccgaagctgcacgccgccgacaccatggccgcgggccatggcctgtgcgacccgaaggccgtggacatcctcacccgtgagggtgcggagcgcgtccgcgagttcgccgcggccggcgtccacttcgaccgcgacgcgcagggacgcatgctgcgcggcctggaagcggctcattcgcgcgcccgcgtggtgcatgccgggggagacgccaccggcaaagtgctcgaactggacgtctccgccatggtgcgcaagaacccgcgcatccacatcatcgagaacgcattcctcaaagacctcatcgtgcgggacggccacatcgccggcgtccgcctgctgatcgacgggcaggacaaggatctggccgccgaccgggtgatcttggccgccggtggagcaggccgtatgtacccatacaccaccaatccgccggtcgccaccgcggacggcctcgccgccgcatggcgtgcgggcgcccaggtcgccgatctggagttctaccagttccatcccaccgccatggccgtgggcgagcacttcctcgtctccgaagccgtgcgcggcgaaggcgcggtgctgctggacgaacacggccaccggtacatgaaggacatcgatccgcgcgccgaactcgcaccgcgcgacgtcgtggcccgcgagaacttccgcgtgatgcaggcgcaaggcggcaagcccgtgatgctcgacgtgtcgccgatgacccgcgagaaccccgacctggccagcttcctggcccaccgattcccgaccatcgacgcctatacgcgttcgcttggcttcgactggagcaaggagccgatcccggtggcgcccgccgcgcactactacatgggaggcattcgcaccgatctgaacgcccggacctccatccccggcctgtacgcggccggcgaatgcgcccgcaccggtgtcatgggctccaaccgccttgcctccaactcgctgctcgaaggacttgtctacggacgccgcgccggtcttgccgccgtcgcggacggtgacgacgcggtctgggcacccgaaccgttcctgaactccgccaccggtgccgtgttcgaccatgcgccgatcgcgctggccgctcctgccgctacggctgctgctgacgataccgccgccgacaaggtgtgggaccgtacccgcatccagaacaccatgtggcatggcgtcggcgtgctgcgcgacgaggccggactgaaaaccgccatcgccgaactcggtcaaggcctcgccgccgcaaacgcccaggctgatataaacgccgatggcgctgcaagtagcgttgaggctttggagaaccgcaacatgctcaccgtaggctatgtggccgccaccgccgcgctcgcccgcaccgagtcgagaggcgcccacgcccgcaccgactacagcgagccagtcgacaactgggcccactccgtcgcctacatcaaggactgacccatgctcacatcacacatcatccgcaccgccgtcgaagcggcgctcgccgaagacgcgccctacggcgacatcacctgcgagaccaccatccccgcggacgaaaccggctcggcccacctcaccgcgcgcgaaaacggcgtgatgagcggcatcgacgtgttcgccgcagccttcgccgcgcagaacccggccgtcaccgtcaccgccgccatcaaggacggcgaacgattccagcgtggccaggtactcgtcaccgtggaaggtccggtacgcgacctgctcaccgccgagcgcatcgccctcaacttcacccagcgcatgagcggcatcgccaccatgaccgccgccttcgtggacgcggtgaacgccatctacggcgacgactatgacggacccgtcacccggccacgccgctatgagcgcacccgcatcgtcgatacgcgcaaaaccacgcccggcctgcgcccgttcgagaaatacgccgtggtctgtggcggtggccacaaccatcgctacggactgtccgacgcggtcatgatgaaggacaaccatctggcggcgctcgccgcgcgcggcatcgacctggccggcgcgatccgccacgtgcgcgaacaggtgggccacaccacgcatatcgaagtggaagtcgaccgccttgaccagattcccgccgtgctcgccggcggagcggacaccatcatgctggacaatttctcgctcgacgacacccgtcgcggcgtggagctcatcgacggcaaggccatcgtggaagccagtggcaacatgagcctggagcgagtgccagccgtggccgccaccggcgtggacgtgatctccgtgggcgcgctcacccactcggtgcgcagcatcgaccttggattggattggaactagtcatggccgatacccccaacgcatccggtgaacccggtgaactgtacctggacgccgccgccaccgaaccagtgagcccggcagtcatcgaggccatgaccccgttcctgactgaggcctacgccaatccggccagtgtgcaccagcccggtaaaaccgcggcccgcgcgctggacgcggcccgcgcatcattcgccgcggcgttgggcgcccggccggatgacgtgatcttcacctcaggcggcaccgaatcggacaatctggccatcaaaggcatcgccatggcgcgcatgcgcaagctgggcttgcggccggtctacggactcgacgaaaccgatggcgaacagctggcaagcagccgcccgcgcattatcatttccgctatcgagcacccggccgtggcccaatcggcggcatggctgcacgaatggttcggtttcgaagtcgtgcgcattcccgtggatgcgcaagcacatctcgatctcgacgcacttgaacgcgagcttgacggcgaggccggcgaacgtaccacgctggtctccaccatgctggccaacaacgaggtcggcaccgtggaacccgtggaggaactggtccgcatcgcccacgcgcacggcgtgcccatccatgtggacgccgtacaggccgccggccagattccgattcgttttcgtgactgggatgtggacgccctgtccgtatccggacacaaattcggcacgcccaaaggactgggcgcactgctggtacgcggccgcacacccatcgaaccggtgctgtccggcggagggcaggaacgcggcctgcgctccggcacacagaacgtggccggcgccgtggcgcttgccatcggactcaacgaatcgaatgcgcgcatgcaggcgcagtgccgtgagttggtcgcgtcccgagacatgctcatcgatgcggttcgccgggtcgtgccccgcgtcgacctgaccggcgaccccgtgcgccgtctgcccggtcacgcctccttcatcttccccggcgtcaccggggaagcgctgctcgtcgacctggacgcgcgtggcatcgctgcctcatccggctcggcctgcgccatcgggcgccacgagattcctgccacgttgctggcgatgggcctcgaaccgtccatcgccaaatcggcattacgcatgaccttccgcaagccgctgacccgcgaacaagtcgaacgcatcagcttggccatcgaagagtcctacaccgacctgacccgacactaaatctgacgccacttaccagaaaggaaacgacgtgagcaccaccactccagcgcaacccgcgcagctcacccgcaacgagcgcctcgaccggctgcccttcaacaaggcgcaccgtaaactcctcgtcgcctccggcatcggctgggcattcgacgccatggacgtcggcctcgtttccttcgtggtcgccgccatcgcagccgacccgcacttcaacctcaccccgaccgaaaagtcgtgggtgctgtccatcggcttcgtcggcatggccatcggcgcggcggtgggcggcttcatcgccgaccgcgtgggccgcaaaaccgtgttcaccgccacgctgatcatcttcggcatcgccaacggcgccatggcgctgtcctggtcgctcggcatgctgctcggcgcccgactgatcatcggactgggcttgggcgcggaactaccggtcgcctccacgctggtctccgagttttcgccgaccaaacagcgcggccgcatgaccgtgctgctggaatcgttctgggccgtcggctggatcatcgccgccataatcggctacttcgtgatcccgaacaccggtgactggggctggcgctgggcgctggccatcggcgcgctgccactgctctacgcgattgtcacccgtgtgcacatcccagaatccgtgcgattcctcgaagccaagggtcgcgaagacgaagccgaaaaggccgtgcgctacttcgaggaagccgggggagtggccccggtaacctctcccaagggcaagccgctgccgaagatcaagacgcgcgagctgttcggctccaagtacctggcccgcaccatcgccatctgggccacgtggttcttcgtgaacttctcctactacggcgcgttcacatggatgccgtcgctgctcgccgaccagttcggctccctgaccaagtcattcggctacacgctcgccatctccatcgcccagctgcccggttacttcctggccgcatggctcgtggaggtctggggccgccgcaagacgctgagcatcttcctggccgtctccgccgtggccgccttcgcgttttcgcaggccggatcagcggccctcgtgctcgtgttcggcatgctgctgtccgcctccaacctcggtgcgtggggcgtgttgtacgccgtgaccccggaaatctacccgacccgcctgcgtggcgcggccgccggtgccgccgccgcggtgggccgcatcgccgccatcatcgcgccgctcctcatgccgtggttcctgaccctgtccggcggcaacaaggccgtggccttcatcatcttcgccgccgccttcatcctcgcctgcatagcagccctctgcttgcccgagcgcaaaggcctcaatctcgaagactgattacacttcagccttcgctactaaagtggcccacac

SEQ ID NO: 3336 - DNA, 13172 bp, Unknown
  R151_18m  MAG No. k141_14498
ctcgtctacgcggacggcagcagcactgtagaactcgatgaacatggcgacttcaccgtctatatcgaagccgccgccaacccattcgtcgaaggccccaccccgttctcacccaccgaactcggcgaagaggccaccggcacctgtgacttcccatacacactgagtcgcatggatatcaccatcttcaacgaagacgtgttcgcctactacatggatctggaaaccgtatcttccctgattcgcgaactcaaggacgacgacccgcgctactggcagctcgccaaagcactgcaacgctccctgaacatctacgatgaacgcgacttggaaaccgtgtcggcagcccgtgcggcgctcgccggcgtactcgccgaaccggccgcctccagcgcaatcaaacacatcgccatcggccacgcgcatatcgactccgcatggctgtggccggtgcgcgagacccgccgcaaggtggcccgtaccgtatccaacgtgctggctttgatggacgaagacccggacttcacgtatgcgatgagttccgcccaacagtacgcatggctggaagaggagcatcccgacctgttcgcacgaatgaagcggcgcatcgaagagggccgcttcatcccggtcggcggcatgtgggtggaatccgacaacatgattccttccggcgaatcattggtgcggcagatcacgttcggccgccgatatttcaaggagcatctcggcgtcgcgccgcgcggcgtctggctaccggacagtttcggctacaccggctcttggccgcagatcgcccgccgtgcaggattcgactggttccttacgcagaagatctcgtggaacgacaccaccaagttcccgcaccactcgttcatgtgggagggcatcgatggcacgcgtattctcacgcacttcccgccctcggatacctactgctcgtggatgagcatgcacgagctgatgtattcgcagcgcaacttcctggacaaggacctctcccgtaacgcgattctgctgtacggcttcggcgatggcggtggcggccccacccgtgagatgaccgcgcgcatccgccgcgaccatgatctcgccggcgcgccgaagatcgaattcggtactcccgaccaactgttcgaccgtgtgcgtaaggatatcgtcgacgatgcgcaaggggagaccccggtgttcaagggcgaactgtaccttgaactgcaccgcgccaccttcaccgcccagcaggacatgaagcgcggctgccgccaggaggagtcgatgctgcgcgtcaccgaatacctgtgcgccgcggcccgcatcaagaacccggactatgtctatccgcgcgaagagctggaccgtatttggaagacgctgctcctgaaccagttccacgacattctgcccggttcggccatcgcatgggtacaccgtcaggcgcggaccgaatacgcgcgtgacatcgctcggctgaacgagatcgcccttgaagccgggcgcgcgatcgcagccgtggaacccgatgacgcaaccataaccgacgccgtaatcgccccatattcccgccaagcctgtgagacgtgggtggtacgcccggcttcgagccgagccgaagcgggaaccgcatccatggctcgggtcgccgttacccatgacggcgatacgattgtgctcgacaacggccaactgcacgtgcgcattgaagccgacggcaccgtttcgtcaatcgtcgatcagcgaaccaatcgtgaactggtgcccgccggcacccgactgggccgctacgaaatgctcaaagacgaacccttccactgggacgcctgggatattcaacgcgatgcgttcctcaccgccaacgcgctcagcgaggcatcgattgcaagcgtggacgaaaccgccaacggtggggccgtcgtgcatgctgtcactcgcgcgaagggcgttgaaattcgtacgggcattgccttaaggccgggctccgccacactggacttcaccgccgatgtggactggcatgccgtcgaacagttcctcaaagtggatatgccggtcaccgtgcaagcggtgaacgcgcaatacgaatgccaatacggtctggtcgaacgccccatcaacaagaacacgcgcagcgatgatgccaaattcgaaagctgcacgcaccgcttcgtgcggatcgccgacgccgactatgccgccgctgtggtcaacgcctccacctacggctccgacgtcagccccatccacgccgatgcggcacatggcaccggccgcggcaccatggtgcggctctcgctgctgtccgcaccgctgtaccccgacccacgcaccgaccaaggcgcacactccttcgcgtggtctctggtcgctgacgccgatatgaatgcggtgctggacgaagcggcgcgactcaacagccccgtaataggggagttgcctgatatggcgccgctggtctcgctcgccgacgccaccggcgtcatcgtattggactggatcaagctcgccgatgacggttccagcgatctgatcgtgcgcctgtacgaggccgccggcggcaatgccacggccacactgcgccttgacgccgctctctccgatgccaaggccagcgtgcaggaggtgaatctcatggaggagccggagctggatgccgaactgccgcgcgcgctcgccggtgacgaaccaatgcctgccgacggtgcggtcgtttcgttggcgccattccagctcgccacgctgcgtattcgccgataagggatattgggcctaggctcgatattttgggtcgcgcccaaccgtaacggaaccggaacagaccggctctgccatacggttgggcgcggcccattattgtatgagaagagggagagcgatcccgttgggcaaatatcaatgcgacacgcgacgatgaattcgttgcgtgcatgtttcgattgtgttatgtttttactaaaccgatttagttaacaggttcgcgactggccggaagctaaaacggtttagtctcagcgatgagaactgaataaaggttgtgataccacgtcaatcaccgcgacgggtgactgtgctggagcacaacgattaggtttctccgtccacagcagggcgggatgaaaaaggaatcaaaaggaaaggaaaacatcatgttttctatgaagaagatcctcgccatcgccggtgccggtgcgatgctcgtatcggtggctgcctgtggtagcggaactgcgggggatgacggcggcaagaaggagatctccttccagacctggaacctcaagaacgacaagtacaccccgtatttcgaggcgctgatcaaggcctatgagaaggaccacccggacgtcaccgtcaagtggcttgacgccccgtccgatggttacgaagacaagctgtccagccaggctgcggccggcgaactgccggacatcgtcgacggcggcaactccatcctgtacggtcttgccaaggccggcgcgctgctcgatgtctccaagcaggctccggatgcggaaaaggactactacgaaggcgcatggaagtccgtgaccatgcagggcaatggcatcgagaagggtgcctacggcctgccgtggtatgtcaacgatggcccgacctactggaacaccgagctgatgcagaagtgcggccttgatccgaacaagattccgaccacatgggatgagtacttcgccgccggcgacaccatcgtgcagaactgcaaggatgtctacctgggcaccacgatgggttacaacaccgaagatctgatgaccgcaggcgtcaagtccttcatgaacgatgaccacagcaagtacaccttcaatgatgaggccggtgtcaagcagatcagccgcttcgttgagctgtacaagaagggcggcatcccgccggaggccctcgactcctcctggagccaggccgccgatctcttccagcgtggcaacctggtctccatggccggctccgcctactccgctgacggcttcaagcagaacgctccggacctttacaagaacctcgcagtcggcccgcgtatcagcaacgacggcaagtccgcttccgtggcctacgagatgctcggcatcagcgccaactcgaagcaccccgacgttgccattgacttcgcccgattcgtgaccaacgagaagaaccagatcgagttcgacaagaaggcctccgtgttcccgtccgccaaggggggtctggatgacgactactacaagagcatcgacgaaagcacccttgagggcaaggctctgaagatcacgctcgaccaggtcaaggacggctacggctctcgtccgtccgagttcaccgacaacaacggctccaagaacttccagcagcagatcgccctcgctatgcagggcaagcagaccgccaaggaagcccttgacaagtccgtcgagttcgcaaacgagaagctcgcacagtgagcaacgcggcactcgccgctgacaggtcggaggcccgcacggcctccgaccggcctgaaccgatgaacctcaaccacggcaagaagcagaatcgtagcttcggcaccatcattgccccctacctgtttgttctgccagcgttcgcgattgtgtttgtattcatcgtccttgcggcactcaacactttcaggcttgctttcaccaactccacactgctccgtccgggaaccttcgtcggactcgaaaacttcatcaaactgttccatgacgagtacttcctcacggcactgctgaactccacactctacgtgatctgcgtagtgccgttcatggtgatcctcccgttgatcctggcctatctggtcaagggcaactcccgcatcatgggcttcttccgcaccgccttctacatgccggtggttatgtccgccgttgtggtgggtatgatctggaccaacctgctggattccgccggtctggtcaactccgtgctcaaggcattgaagatcatctccaagccggttccattcctcaccgatcgatggggcgtgctcttcagctcgatgttcgtgacaatctggctgggcctcggctactacatggtcatctacctgaccgccctcgccaacatcgatgaatccctttacgaagccgcctccctcgacggcgctggccctgtccgccagttcatctacgtgacaatgcccggcgtgcgctccacgatgatgctcatcatgatgctgtccaccatcgccgcattccgagtcttcaacgaaatctacgtgttgaccaacggctccgcaggccccggcggcatggatatgacgatgtcgatgcttatcaagcgcgaaggcaccggtatccaggcccgcactggttacgcgagcgccatctccatcgtcgtgctcgtcatcgtcggcgtcatgctcatcgtgcagcagatcgtacaaaaacgaggtgaggactgatgaataccaacacgcataaggtcaccgtcggcaaagtcgtccagtatctgattctgattctgatgttcctgctgctcgtcggcccgttcgtctgggaactgtccctgtcgttcaagggcaagggcgacaacgtctacgccgtgcctccctacctgatgccgaagaccccgacgctggacaactacatttccgtgttcaagcaggtcccggtattccactacatgctcaacacgctggtggtctgcctgatctccatcttcggcaacgtggtcttctccacgatggccggctatgcactgggacgcctgaagtggcgtggccgcggactggtgttcaccatgttcatgggcaccatggtcatcccgatcgaaggcgtgatgatctcccagttcctgatcattcgctccatccacctgcagaacacactgctggcagtcgcactgcctggcctgtgcggcgccatcaacatcctgctcatgaccaacgccttcaaatccattccaatggaactcgaagaggcggccatggtggacggtgccaacctatggcagcggttcttccatatctgtgtaccgcaggtcaaaggcacgatgaccgttgtcggcatcttcgcattcgtcggtgcctggaacgacttcctgtggccgttgatcgcgatctccgatgaaagcaagtacaccttgaccctcggcatgaaccgactcaagggcatgttcatccaagatccgcgactgatcgccgccggtgcgctcgtctcgcttatcccgatcatcgtcttcttctgctgcttccagcgctacttcttccgtggcttggaacagggtggactcaagggctgagcggactggaaaaaggaggtactccaatgaaattcggagtcaactacacgccgtcgcatggctggttccacgcatggctcgacccggactgggacggcatcgacaatgatctcaagcagatcggcgaactgggtatggaccatgtgcgcatcttcccgatctggccgtatctgcaacctaatcgcacctggatcaacaagaagggcgtggcggatgtgcgccgcatggtgcacatcgccggcgagcacggtttggatgcctatgtggacgtgttccaagggcatctgtccagcttcgacttcctgccttcatggctggtcacctggcatgcgggcaacatgttcaccgatgcggacgccgttgcggccgagcgtgaactggtcaagaccatgaccgatgagctgtccaaggaacccgcgttcaagggtctgaccttgggcaacgaggtcaatcagctgtctgacaggccgcatcccacgaagatgagcgccacggaccggcagatcgacgcatggctggacgcgctgcttccgaccgccgccggtgaagggcacaacgcgctgtacagcgtcaacgatggcacctggttcatcgatgggcacccgttcactccggtgcagtccgccaccaagggtgatatgacagtgattcactcctgggtgttcaacggcatcgcgcaaggatacggcgccaccagtgaggagtgctcgtcgtacgcactgtacctggccgagctggccaaggcgttcggcaaggattccgagcgcccggtgtggctccaggaagtcggtgcgccggagaatgtgctggaaaccgactacacgccggaattctgccgcaagaccgttgaacgtgccatggattgccggaacctgtggggtgtgacgtggtggtgctcgcacgatgtgcccgccagcatggaagacttcccgttcttcgagcactctctgggcttgttcgacgagcaaggccagctgaagccgatcggccgtacgttcggggaactcgccgcacagtaccgttccgcattgccggctcagccgaagaccgtcgccgtggtgattgatgtggatgaggccggaaacccggtgaaccgcagtgcgctcggcccgggaggctcggtgtgcgacctgtggatgaagctgcaggtggcgggccagcgcccgaccatcatcacctcgcaggtggcggccaatcaagaggcgctcgcgcagcgtggcattctggaattgcacgctgacgaacacccctatgccgcccgttactacactgcggtttcggacccatcgttcgaaacggctgattaaaccgatatccggttgtggaatcatctactccttgttccacaaccggatattttcaattgcagtgcgcacaattgcagtgcgcagggcaaaacataagatccggtactcgccgaagagcgagaagaacgagaagacaatatacgagaagggggagcgctcaatgagcatcaactgcgccgcagtggaccgactcattgattcgatgagcttcacgcagaaagttggccagttgaaccagcgtctgctcggttggaagtccgtggaacgcaatgctgcgggacggctggtggcctcggacgagctcaagcaggagattgaccgatggggtggactcggcaccctgtacggtctattgcgagccgacccatggtctggtcaacattggggtaacggcatacgccctgaggagcggactgaggcgattgccgtggtgcagcaaactgtgctggaacgtggcgcgcacggcatcggcgtattacttagcgaagaggcgcctcacgggcatcaggcgctgggcggcacggtgctgcccaccaatctgggtttgggcgctacgtttgacccgcagggggtgcaggaagcggaagccgcggttgccgcagaactggccgccagcggcattcatatcgcattggtatccggtttggacatcgcccgtgacccacgctggggccgttgcgaggaatgcttcggcgaggatccgctgatggctgcccgcatgtgcgaggccatcgttaccggcatgcagggtgagcatcgcagcaaggtcggccacgggggagtggccgtggtgctcaagcatctggcggcgcaaggcgaggccgtgggcggccgcaacggacagtccgccgtactgggcccgcacgatcttcatgaaattcatctgccgccggtggccgccggtgtgcgcgccggtgccttgggctttatggcagcctacaacgatatcgattctgtaccttgctgcgccaacccgtggctgctcaaggattatctgcgcgaccagctcggtttcgacggcatcgtgatggccgatggcctggccgtggatcggctcgaagacatggccggctccattcccgcggcagggcgcgccgcactgctcgccggcgtggacgtctccctgtgggatgaaggattcacccgcctcgaagaatatgcggatgacgaacaggtagtggccgctgtcgacacggccttgcgccgggtgctggaactcaaagccatgttcggtctcttgcccgaagacggtgccgataccgccgcaattgccatgccgagcgccgacgccatcgcgcaggccactgcggatgggcgtgagcaggccaagcgcatggcccgcgaggcgataacgctgatcaatgatggccagtctgccgccacgctcgacgatatccgcagcgtcatagctgatgctcaagccggccctgtgattgtcgccggcccgttcgccgacgatttcggctgcttcctgggcgattacaccgcccctctgcccgccgatgaacagtcaagcgtctaccggcaattggtggcacgtctcggggaggaccgggttctcttggccgccaagccgagcgatgcgccggccgatcaatgggcgcgtgcgtcgaccgtggtattcatatgcggcagcaccagcgaacgcagctatgacagtgaattcgacgacaatggcgcggcgaaggccgtaaccgaatacggtgccacctgcggcgaaggcgtggacttgtctgacatccgcctgccctggcgtcaggatgacatgctaggtgaagtcgcggcattgaccaccgctccaattgtttcggtggcggtgtgcggtcgcgcgcatgtactgaccgatgtgctggaacgctccgccgtgacgatctgggccggatatgccggccaatatgggccgcaggccgtggctgatgtgctgattgacggtgccggtttgccgggctgccttcctgtaacgctgcctgcgcatcccgcagccattccggttcgatacaacgaccggcaaagtgccgcccatgtatacaaggatgcggcggaaccggtattgcgcgagtttggctacggagccggttctttggctggagtgacgtttagtgggatgcatgccgatgccgaatcccgcacgaatgaggtgttggtgcaggtgacagcatatgccggcgaccataagacggccggttcggtgaacctcttcgcacacgtcagtggcggtcgtcgtatcccacgtttgtcagtgctggtcgattccgttgctctgacgcttgaggcgggcgaaagccacgcggtatcgttctcggtaccctttgaacggctgatggacgaagctgatgacaatgtgcgtgtgacgtttgccctgacagccgctttgaatagcgatgatacccgacatacagacgactgcgataccagcgtaagcatcgtgatacatcgctgacgatgtgcatgagacaagtcggagaggggtatgttccgtaagtctcatgacctactcattgcggccgatatggtcggcgggtgagagaaaaagagaatgtgggatatggcgttggtgagatatcgccgtatcccgtggctcaaaccgtcctaccggtttgagccaccgtctacgcaagccgcatagacggttgatttccggcgtgagtcggaggaaatcaaaggagattatagatgagattgtcatcaggcgatcccgctgggcgtgcttctgcttggactcaacacaggaaatggctgcggactggcttggccgcggtgctgtcgatggccacgctggcggcactggctgcaccggcaagcgctaccgacaccatgccgtggggaggccagtatgccgataccagtcatccggagcaggctgcgggagccaaccagccgtatcagcatggttacaccggtctagatattctgaactggaatccggcagtggataaggattcggagtacctgcgttcccgcgtgccgttgcagacccgcatcgccgccaacgccgcgacgcagaaggacccgaaccttccggccgatacggagatgttcaaccttgccggcgactatggcaacgcgttctttgagtcgttccatgacaacaatgtgttctcgcagtacctgttcaactactggcagtacacggattattacggcacctggcatggccagccgaccgcgaacgtgccgaagagcctctacgatgagaaggcccagtctgattggactcagaaatggtttgaattcggtacgctgaacttgccaaatgcagcgtacacgaacgccgcgcataagaatggcgcgaagtcgattgcgacgattttctactcgggcaacgaccgtggtgaacagacctataaggatttgcttcaaggcaagcgtgccgatggcacctatccggtggccgacaagttggtggaaattgccaagtactacggctttgatggttacttcgtcaatcaggaatccaatgtaaactccgatgatgttccagcctatcgggatttcatgaagcagatcgtcaatcagggcatttacatccagtggtatgactctgcaacatacccgggtggtaatatcggctaccagaacagatttaacgagaaaaactcaccgtgggtgcaagatggggccgagggcaaaatctccgattcgatcttcctgaactactggttcagcggaaacatgctgaaagattcggccgaccacgctaagagccttggcattgatccgaagtatgcggtgttcgcaggcatcgaggccggacagcagaaattcggcagtatcggtagcaacgcggattatatgaacgtcaaccttgatgctgacggtaaaccgtatgtgagccttgccgcgctcggcaccgacttcgtctcccatgagctgggtgacgacaagaaggtctatccgaagtatcaaaaccaggtgttcgaccgtgaacgtcgcttgtggactggttcatccaccggagagaagggcacgacggatatctctgatccgtatatcgatgatggtacgagcagcgacggctggaagggcttcgcctcacagatcgccgaacgctccgtcatcggtggcccggtcttctccacggcattcaacaccggtcacggtcttgaatggcgggacaatggcgaacagaccagcaaccagcagtggggcaacatcaacctgcaagacattctgccgacttggcagtggtggattgatgccgattccgacccgctgcaagccgacttcgactatggcaaggactatgagacggcaccgcgcttcaactacaccaaggtcggcggctacgaaggcggcgattcgctggtgctgagcggcaagctctccagcgacaacaccgtccgtctctacaagaccgacttgagcgtcactgccggctccaagatcgaattgacctacaacaagctcaacagtgacgattccaagctgcaactcggcctcatcttcgccgacgacaccaataccgtagtgccggtggacgtggcggatggcgcggcgagcaacggctggaagaccgcaaccgtagacctctcccagtacgcgggcaagaaaatcgctacgctgggcctgatcgtcaaggccggagcgaacccgatcgacaactaccaggtgaacatcggcaagattaccgtcaccgacggtgctgcctacacgccggccgccccgaccggcttcaaggtcgagcgcgcctacgcggattccgacgaattgaccgtcaagtgggatctcgccgactacgccaccaccaagaactacctgctgtacttggacaacaccttcctcggtggccgctacgacgacaccctgtacgtcaagcacctgcctgccaagaccggcacgctgaagttgtacgccgtgggcgcggacggttcgcgctcgatggctgccgaagcgccgctgaacgaagcggcggccgtgtccagcgtgaaggttgagcccggcaaggacggtaacgtcaaggtctcctggaccaacccgcaggtctccggcgagaaaaccgtaaccgttaagtccgacaccggttcgtggcgttacgccggtcagccatactcccagaccgtcaaggtcgctgccgacaagagcgacgtgacgattccgaatgcgccggttgacggttcccgttatgtggtgactgtcgacaacgcaggtggcgctaccaccacggcagcaggtgcattcgccgatgccaccatcgagccatacccggcttgctcagtgacgtggaatggcgacaatgtgtcgctgattcgccccgagactcaggattggcgttacctctacatgaccgagaagtggaccgacgagaacggtaaaaagcaggagaagcagctgggtgccaagtacacctattcgcagaacactccgccgattaccggcattattcgtggccgcaccactccggagtcgtacaccaagtccattcccgacggccatgaactgcgggtgcaggtcgaggattacagcggcaacaagaccgatccggtcaagattccgaccgccgacgaactggccaagtgcacggtcgccgaccccacccagccggatgccaagaagtccacgctgaccgcggtcgacggttcggccgtggccgacggcaaggccatccgcacggtgcaggcaacggtc

SEQ ID NO: 3337 - DNA, 5543 bp, Unknown
  R151_18m  MAG No. k141_14499
ccggaaggacgttcttctccttgagcagctcgccgccacgcttggcttcggcttcaccctgctcggtcagcggtacgtcgacccagccggtgaactggttggttttattccatgcgctctgtccatgacggagcagtactagtttataagtcatacggttcagtctacagccgcgtgcgcccaaacacgagtattcgtcttattatttcgctctcatagcgccacggcaaccgccagcaccaccgcaaacagcaaggtctggaagctggcggcgggcagagccgggcggaattgacgtttattcacgctggagaccatgcgcacaggtattccggtgcccgagagcaacagcaccgcaccccacggccaccataatgtaccgcacatcagcagggcgatgatccatgcgatgacgcagcacacaatcagcaacgtacgcgcgccggactcccccagccgtacggccagcgtgtgtttgccatgctcacgatcctcgtcgatgtcacggatattgttcaccatcatgatcaggcaggagaacaggccagccgccacagcacccaatagtccgccgacgtccaccgtgccgcacagcgcgtattcggtgcccaataccgcagccaagccgaagaacaggaacacgccgacttctcccagcccgacgtatccatacggatgcttgccaccggtgtagaaccagccggccagcaaggaggccgcgcccacggccagcaaccaccatgcttgggcgagcacgaccgccacaacaccgcatatgcaggcgatggcggcgcaaatcatcgccgcgaacagtacatgcttggccggcaccagtccggatgcggtcagtcgctggggtttgcctgatttcgattcgtccgtgtcacgcccggcgtcagtgccgcggatgccgtcggaatagtcgttcgcatagttgacggcgatttgcaggaacagcgcgactagcaggcacaggatggtcaccggccagaatcggtccatcagcagggtctgctgttcacgggccgtggcgcaggaggccggttctggatatattgcgatgcaggtgcccgaccgctcgatatgcacgtacgccatcaccgccccaaccatcaccgacgcgatggaagtgaccaaggtcttgggacgcgcgccccgaacccataagccgatagacataagcaatccctttcatatataactctggctcccctctctgaggggagccagagtatgcctaatcagccaacgagcggcttgaccagcgggaaggtgatggtctcgcgaatcgtggcaccggtcaaggcgataagcagtcgatcaatgcccatacccataccgccggccggaggcatgcccacgccgagagcctcgaggaagtcctcatcgatgtcgcaggcctcttcgtcgccggcgagtgcgtccttggcctgggccacgaaacgctcacgctgcacgatcgggtcgttgagctcggagtagccggtagccagctcgaagccgcgcacgtagagatcccacttctccaccacgccgggcttggtgcggtggcccttgaccagcggggaggtttcgaccgggaagtcacgcacgaaggtgggctcgtaaagcttgtcctcgtagaagtgctcccacaggtgttcgacgagcttgccgtggttctccacgtcgtcgcgctccacgccgagcttgtcggcgatggcgcccaaatgctcaacggaggtgccgggatgctcagggccgccgttcggcacgatttcctcgcccaatgcctcggacagcgaatcgtacatgctgatggtcttccattcgccgccgaagtcgtattcggtgccgtcgagcagggtgaccttgtgcgagccgtagacgtccatggcggtcttctgcacgagctccttgaccagctggccgatggaatcataggtgccataggcctggtaggcctcgaccatggtgaattcgggggcgtgcgtggcgtcgacgccctcattgcggaagtcgcggttgatttcgaacacgcgatcgatgccgccgaccaggcagcgcttgaggaacagttccggggcgatgcgaaggtacaggtcaaggtcgaaggcgttcatgtgcgtggtgaacgggcgggcggccgcgccaccgtgcagggtctgcagcatcggggtttcgacctcgaggaagtcgtggtcgtcaaaggtgcggcgcagggaggccacggcctgggagcggttgcgcaccatgttgcggatgttctcgtccgcgatcatgccgatgtacggcttgcgggtgcgggtgtcttcgttcaggtccttgtgcagggccggcagcggctgcagggccttggaggcgatagcccactcagtggcgaatacggacagctcgccggtcttggaggcgatgacgcggcccttgaggtacaggtgatcgccaaggtcgacgagctgcttgaactgcttgagcgagtcggcgccaatctccttcttggagatcatgccctgaatcttggtaccgtcaccggcggacagctgcacgaagcacaggccgcccgcgttgcgcaggaacagcacgcggccagcaatgccgaccatgtcttcggtctcttcgccagcctcgagcttgccgtcatacttggcgcggaccgcctcgatggtgtcggtgacgtccaagtgcaccgggtagggggcgatgccggcctcaagcatcatcgcgcgcttggccacgcgcatctgcacctgctcggggtgagccagcgggccgaactccttgttggaggggtccacggcttcgtccagcgtggcaccggacttgatcttctcgcggatggtggcgtcctgctcgagcagcatttccgcacgttcgacggtgctcatctgcgggacggccggggtttcattctcagtgttttcggtattttcgacaacttcagccatgattcatcagtgtacgcaaggccggcgattatgagcccggcagaccgtacggccatctgaacacccgctcacatgacgcaaaaccggctctgcacaaggcttgagagacctgtacacacggcgaatccaccatcacgcaacactcgcgacatgccgatttgcattgtccaccaccacaatgtaatatctacgtctgttgccaaacgggctgtagcgcagcttggtagcgcgcttcgttcgggacgaagaggccgcgggttcaaatcccgccagcccgacaactggaccggattgttgagaaatcagcaatccggtttttcgtttcctaacccaacaatcagaccaagcgatcggacagcggtaaacaacccgccgcgcacagcgacaaaccgcgtcgcggcaaggcccgtatttgttggcggaccaccgtaatatatcgctcgaatcaatcgattgccgcactgtttttgtaagtaatactgaagtaattagaggaaccatgaagaagagtctgcttgcactggcttcgggcgcgttcattctcggtgccgccgagttcgtgatgatgggtattctgccgcaggccgcggccgccaccggcgtggacatccccaccgcaggccattacatttccgcgtatgcgatcggcgtgtgcttcggcacactgattctggtgttcggccgcaaggtgccgccgaagaacctcatcatattgtttatggcgattgcgcttatcggtaatctggcctccgcgttctcggtcaatgccgccacgctgattgtcgcgcgcttcattgccggcctgccgcacggcgcatttttcggcaccgccacactcatcgccaaaaccttggccgacaagggcaaagaagcacaagccgtatcggtaatggtcaccggccaaaccgtagccaatatgctcggcgtaccggcgggcaccttgatggctgagttcctatcctggcgcctcgcattcggtattctggctgcatgggcggcaatgaccatcgtgctagttctggcatggatccccttcgttgcgccgattaaggacgccggcatcgccggtcagttcaaattccttactcgtcgtggaccgtgggtgattctggccgccgtattcaccggcaacgcaggcgtgttctgctggtggagctacgtctccccttggctgcagaagaccggtggctggtcgtctaacctggtaccgctattgatgatgcttgccggcttcggcatggtgataggcggtcttatcggtggtcgcatcacagataaatggcgccacgccggcactgccgcgctgggtcagacgatttcctgcatcggcttgctgatggttttgctactgccgggaaaccagggcactactgctttgctgaccttctggatcgccttcggcctgttcttcatctccgctccgcaacagctgttgatgaccgaagccggccaaggcggcggcgagctcatcgccggcgcagccgtgcaggtggccttcaacttcggcaatgccatcggctcgattgtcggcggcgcgatgctcaccaccttctcgatgaactatcgctataccggtctgggcggtatgccgctggccctgcttgccgtagggctgctggccttctactcgtggcgctgcgaaaccgataccgacgccattcaccgcatgcgcgaaatcaaggtggactgagaccaagctcacagcaaactccctgacgcgtttgttcacagtattaatagactgaaatcagacacgattcagggaggtctggcggtatggacgaggaagcactgctcaaacaattcgccgcacaattcgcgcatggtccagacgatgccgacgacaccgatgcggcggccgcagcgcaaggtgccgattctactgcgaaccaggccacggacgatgccgatcaatcgcccgcaacctttgatacccaacaattcctgaacggactggacgcgattttcgatcgccacgcggcagccaccgaagccggtccgtacttggaacaggcgatggtggacgcggaaaacgccggcgacgaggccggactgctcaccgtactcaacgaaacgatgggcttctatcgctcgcagggccggcacaaggagaatcagtggatcgtgcagcgagcgctggaactggccgctcgtatgggcttgaccaccggcacatccgaggcgtgggccaccacgctaatcaattgcgccaccgcgatgcgcgcggcccaacaatacgatcaggccgaggatttgtatcatcaggcgcagagtgtctgccggcattcgctggcacccaccgaccgtaggctcgcagcactgcacaacaatctgtcgatgctctacagcgagacgaatcggcccgacaaggcggaactggagttgcgtgaagcgctgcgcattatcgaagcctcgagcgtgaacccggacgcggatatcgacgtggccagctcgcacacgaatctggcgttgaccctgctgaccgaacacaagttggagggcgcgcattggcatgcagccaaggcactggaaatctatcgcaccggccatctggaacattccgcgcattatgcctccgcactggcgggcttcgcgcaggtgtgctttgccgagagacgg

SEQ ID NO: 3338 - DNA, 22771 bp, Unknown
  R151_18m  MAG No. k141_14641
aacttcgaaggccgcatcagcccggacgtcaagatgaactacctggcctccccgccgctggtcatcgcctacgcgctcgccggcacgatggacttcgacttcgagacccagccgctcggcaccgacgcggacggcaacgacgtgtacttgaaggacatctggcccaccaactccgaagtcgccgccgtggtcgacggcagcgtgagccgcgagatgttcctcaaggactacgcctccgtgttcgacggcgaccaccgctggaagggcctcgacgtgccggaaggcgaggtgttcgcgtggaacgacaagtccacctatgtgcgcaagcagaccttcttcgacggcatgaaggccacgccggacccggtcgccgatatccacggcgcccgtgtgctggccctcctgggcgactcggtcaccaccgaccacatctccccggcaggcgcgttcaaggcctccagcccggccggcaagtacctgaccgagcgcggcgtggagccgaagaacttcaactcttacggttctcgccgaggcaaccacgagatcatggtgcgcggcacgttcggcaacatccgtctgcgcaaccagctgctcgcctccgtgggcgaggaggtgacgcctggcggcttcacctacgacttcctcgccaagaagccgaccacgatcttcgaagcctcccgcgactacatcgacaacaaggtgccgctcgtggtgctcgccggcaaggaatacggcaccggctcctcgcgtgactgggccgccaagggcacggtgatgctcggcgtcaaggccgtgatcaccgaaagcttcgagcgcatccaccgctccaacctgatcggcatgggcgtgctgccgctgcagttcccggcaggcgaatcctatgagtctctgggcctcaacggcaccgagacctacgatatcgccggcgtcgagaagctcaacgagggcgtgacccccaagacggtccacgtcaccgccacccacgaggacggctccaagaccgagttcgacgcggtggtccgcatcgacacgcccggtgaggccgactactaccgtaatggcggcatcctccagtacgtgctgcgcaacctcatgaagtaaccaccttcttggctcccctctcttgaggagagctgtcagcgaagctgactgaggggagcaaggccggtatccgccaacggataccggccttttccacgcatgccaaaatgctatactgtatagcatctttggaatggaggttgccatgaccatggtccaaatgaacgttcgcattgatgcgaaactgaagaacgaggtcgaagaagtcctcaagggcaaaggcgtatcggtgagtgacgtaatccggtcgctgtggttgtacatcgccgaccgcaaggaagtgccggcattggaaacgaccgccgaagagcaagcccgcgaggaggaaaagcagcgcaagctgaaactgattcgagaaggtgccggatacgtacacaaggaactggtcaaggccggactgatctcagaagacaccgacctcatggaaggccttacctacaagcagttccgcgacaaaatgtacgacgagcaacttgatgcgtattacaacatgaagagggccgattgatgaccgacgtttccatgcagcgtattttgctcgataccaacgtactgttggactatttgctccatcgtgatgatcacgccaagatggcggaagcggttatggaacttggcgcgaagaacaacgttacgttgttgtgcgcgtcattgtcgctgaaggatatcgcatacctatcatcatcggcgattcgtagggaattcaaaccgaatgaatcggaagtggagaatttcactcgcggctttctgtcgtcacgggtgccatggcgttgtatcgagcaggtgaaggagatgtgtgacatcgtcgctgtcgatgagtcgacatgtgataaggctttttccctgcaaaaacggcatcgggattttgaagatgatctgatcatcgttgccgcgcaacaatccggtgccaactgtgtggtcacatcggatgccgaattaatcagtcattttcccgaatattgcaaaacaccggctgaaatcgtggcggcactggaataaatgagcgtgtggctcccctcatggaggggagccaccaatgatgtgccggctactgtagcctacttcgcctgtagacggaactgcttccagatgtcgctgagcttctgaccgttgcgtgtgcgcttccacacgtccagaccgccgccgcgacgtcctccggcggcggcacgggccgcggcggtcggagtcggatattcggagccgtcatccagacggagacgaccgttttcggtgaccgtggcaaaccagcgctcgcccttgcgcggccgctcccacaccagacgctcgcccggcactagcagaccagcgtcaatcacctgccggatcgtgacgcgccgcgaactatgagacggccgtggagaggtcttcgacaactcatcgacattctgcttggtcagatcacgggcgtccttgtcataccggatgccccagtattccacgatgagtcggaccgactcttcctgccgcgcctccagcagggcaggtgtgcagtcagcgaaatccttcaactgattggtcagcgggaaacgacgtgaatccgcgcgcaacagcatgcggtcgcgacgtgccggatattcactcaacctgtccaactgatcctcagggccctgcaccagcgccatattgccgagtcggtacatccagaaatcatgctgatcctgcggccagtccgcaaacgatttcgaccgttcgatatccaacggcataatcggcagcgcactgaaccggcgtggtcgatccaactgcatgccggccttctgctcgttggcgcgaatcagcagcagacggaccaaatcgccgtcaccctgcatctcgccatgcaaacggaccaatgcgccttcacggtcgccgtccgagacatgcaacccgttcacgcgttggaccaaatagcccttgtcaagatcacggatggcggcgttcgcataaccgcgccgctccaacgctccagcgcgattcagcgtgcggatgccggtcacctgttccaatgcggtcagaatttccagcagccgacgctcgtcatgggcacccaacgattccaacgtggccgtggttctggcgatacgcgaggcacgaaccacgaacggcgacaaatcggcgtcgcccagcccgcgatacgaattgaccaacgcccacatggccacgggcttccactcgtggctgcggtaatcgtccaatccctcaagccggctacgcacctcggcgggcagtacggtatcgctggggcgtgcgatgatccgccacgccatcgcgtagggtgccagcacctggttgatgaacgtgggcaccgtgcctttgtcgatgtacggttgcagcacgtcggctaggaaatcctcgatgagcttgtcggtggccggcttgtgcgtgagcacgagatgcagataggcgaagaattcctcacagtcatgcggatcgtcgccaagcgggtcaatgatgtcatcccaacgggctgcgtacacgtcaagttcggcggtcgacaggctggccgtggcgcgcgccttgaacacgtcggacggggtgagcggcaggccgcgcatgttcatcacgtcgaagatgcgatgcgcgccgtcgagatcgtcggtggtcacgatgacgagcgtcacctcgttgaccagatactgcgcgaattgctggcgttcggatgccgaccaattggagatctcgtcgtatgtcttgcggatgttggcgacgatgttgcgttgcgcagcggtcgccagatcgtcgtcgttcatgtcgaacacggattcgaggttgtcctcctgcacgtgttcgcggaagaacgccgcgtcgcgctcgcgcaacgtgaggcgaggctcggtgacgatgccgcgcagcttgtcgccgggctccaccagcagcgcgtcgagttggcacatgaggtccgggtctcgctccagatcgcgcaacacggcgatgatgatcgacagggataccagccgctgctgcccgtcgatcacgtcataacggttgtcgccctcgcgtaccagaatcagcgagccgaggaagtacggggtaccgggtgacttgcaggcgtcgtccaagtcgcttaccagttgcaggatgttctcggccttccatatgtaggcccgctggaatgaggggattgtgaaccggaaatccggggtgaacactttcccgagtggtagttccttcgcgctgattgccatgtcaatcccttcgtcgccggcctttggacggtatgccgacgtgccgactgtgctcaagcctaccagtgttcgcccggcggcgggtgcatcacgccggctcgggcaccgacccctcgtacaagtagaacgaagatgggttttctcccggcacggatgcgggcagtgactgctcgcacacctgcgtcaggccgcgatgtacatagaatccgacatcgcacgtggtatccgtgaataggaagtattgacgtatgccggctgcgtggaatgcgctcatcatcgtctcgaacatgcgccggcccagaccgtgaccgcgcgccgccggatcaagtacgaacagcaccacttcagccgaatactcatggccaatgttcgccgcctgcttacgcagttgcctatcgacatgaagagtcccgagaatctcgctcgcagctgccatgccgtcgtgggcaaacgccagttgcaatagcttgcgcaacgaatgacgccggtgcatgttcagcgggctgcgatggtcgagctcgtcgatacgccccacaatcaatgcgacgggtttatcttccagctccgcgacaaaggccgtggtcacacgtgccagacagttctcccaatcggcctcggctgccagcaagccggtccgctcatcatattcggcgtaccaagtgcggcgcaccagatcgatcagcgccggataatcgtctttacgtaacgttcgaataatcgcttcactcatgttctccattatgactgatatggctcgataacccgacgtgttacagtcgcgccggcaaatcggcccgctccaccagcctcgccatctgtacgcggcccatattgagcttgtccgccgcggaggagagatgcgccttggccgtacgctccgagataaacatacgggaggcgatttcggcgttgggctatgtgctgcaagacgattcgccgattacggtgtatgtcactgcgttcctatcaacggatcaagacaccaaggtgacgcatgccttcacgttgcagtgaatcgcgcggcggtccaagctgcggtcgaatgccaatcgaatctcaagtgcatgccacgcgcatggtggaaacgcccgttacgctttgcgatgagcagaacgagccgatcgatcctattcatggaatgttcagctttgttcctctaagattggtgctggaacaaacgctaaaggagcgattatgacattcggtcagcagccccagaacaacgggcaatacaacccgcaatacaacacgcctgattacaacgccgcccaacagtctggatatggccagcaatacgcacagtccggttacggccagaactactatgcccagccgcagggcgcccccacctaccagtacgcgccgcaggatgcggccggtgccggcgcgggtgccgccaccatcaacacgacgatgacctacaactacgaggaggcccgccgcgtctccgtagccaaggtgtacggcgagatgaccattggcatcctcgtcaccgccgtggtcgccgtgctcggccagatcaccggagcctactacagcttcctcatggccaccggcatggtgggcctcatcggcctgtgcgtggtgcagattgccctggccgtggtgctcggcatgcgcgtcaccaagatgaagtcggccactgcgcgcgtcatgttctatgtgtacgccgcattgatgggcttcaccttgagctcgatcttcatggtctacgacctcggctcgatcggcgtggcgctcggtgtcaccgccgcgttcttcttcgcgctgaccatgttcggcatgactaccaagttcgacatgctcaaggccggcccgatcctgatgatcggcctgatcgtgctcatcatctcgcagatcgtgctcgccttcgtgcaggtcgacggcatgaccaagatcgtctgcgccatcggcctgatcctgttcgccggcatggccatctacgacgcgcagtccacgcgcgcgctgctgaccgaatacgaggcccagggcccggaaatggtcaagaagatctccatcctgtgtgccctgaacctgtacctcgacttcgtgaacatgttcctgtacatcctgcagctgctcggcaacagggactagcctcgccagccgattggtgggcggcatgtagcctgctcgtcaaacgtcacagcccgaccacattgtggccgggctttttcatgtctgtcacattcgcacgttaggctgtctccccgtgaaaagacaagaactcgtaggcatgctgagcctgttgttgaccgcgctgatctggggttttgcgttcgtggcgcaggtccagggcatggatttgatgtcgccgatgttcttcaacgccacgcgcttcacgctgggagcactgtctttggtgccgattctgctgtggcagcgtggccgggggagcgcggataagggcgatacagccggggtcgatgtcgttgggaccgaggcccccagggccgtctccacagatgccgcatcgaacggtgcatccgacgtcgttaccatcaccggtgccaagctgaatgcgaacaagcccgattcggccgtggcgcgattgctcgccaacccggtggtcatttccgtgatctgcggcatcgtgctgttcaccgccagcaccctgcagcagtatggcattctgtacggcaaatcggccggccgcgcgggattcctgaccgccatgtacatcgtgatggtgccgttgctggcctgcgtgttcctgcgccggcgcatcggcatgctggtgttcgtggccgtggtgctgtccatcgccggcttctatctgctgtgcatcaccgatggtttcggttcgatcggcctggcggatatcctgctcgtgttcacggccgtgctgttcgccgtgcatattctggtgatcgatactttgggcggcaccgtggacgccatcaagctttcattcggccagttctgcaccaccgccgtgctgagctgggcgggttcgctgatcgaaggctcggtcgactgggccggcgctgctcattcctggattccgatcctgtacgccggcatcggctcggtgggcatcgcgtacaccttgcaggtggtcggccagcaatgggtgccaccgacgcgagccagcctgctgatgagcctcgaatcgttcttctcggcggtaggcggtgcgttgcttctcggtgaagtgatgaccccgcgcggctacctcggctgcgccctcatcttcctcggcaccctgctggcccaagcgccggccaggctgccgaagtggctgcaacggtgaatgaatcggccgcaggccgattccatagcacctcagtccgaggtcttaggcgcttcacccacttgcggcgcgccgttgatgtcgcggtggatgttctgcatttgcacttcgatgttctgcagcgaacgggcgcagtcgagcagtgtctgtgaatgctcgctgagcttgttgtccggcaaatcggtcttgtagcgcagcgcatgctccagcgacgcccaataatccatggcgatggtacggaactgcacctccaccggcgtgtaatgcgcgcccgaggagagaaacacgggcaccgcgtagattacgtgcaatgaacgatacccgttctgtttcgggttcttgatgtaatccttgacgcgcagcacctgaatatcggactgcgacgacagatagttggacacggaatacacgtcgtcgcggtaattacagatcacgcggatgccggccacatcgaacagattgtccttaatcgaattgacactgattggcagattcttgcgctccagcttgccaatgatcgaactcaccgacttcagacggcgttccatatgatgtatcgggtcatggctgaaccgcacctggaactcgtcgtcgagaatctccagcttggtgctgatctcgtacatcgcgccttcatacacctgcatgaggtcaacgaatttaacgacctgttcgggagtgaaggtgcctcccggaagatccaacgctttgagacgggcctgtagatcggaggttttgagtcggctatgtcggtcaagtatcacgtccaccaatatactcggcggattccagacaatctggatgttcgcggggaatctttccaagaacccatatttaagatcgtgacaaccaatggcatacgtgaccggagcatgacgaaccccgccgatagaatcggtcgttatgaatgaagacatgatgaccgaggcggagcgtgcctcgattgcagccgatggaaccgatagcttgctgggggagcgcggcaagggcgtattccatatccacacgctcggctgccagatgaacgtgcacgattccgagcgcatcgccggcgtgctggaggccaatggctacgtccctgcaaccgaggaccagatcaatgacaatgacctcgatctgctggtgctcaatacctgtgcggtacgcgagaacgcagccgaacgcatgtatggcaccatcggccgattcaatcgcgtcaaactggttcggccgaacctgcagatcgccgttggcggctgcatggcccagcttgaccgcaagaagatcgcggatactgcgccatgggtttccgcggtgttcggtaccaagaacatcgaagatctgcccaagctgttggatcagaatcgtgcgaccggcaaggcgcaggtccaggtcactgaacaattgcggcagttcccgagccagcttcccgccgcccgcgcctcccgcatcagctcgtgggtggcgatttccgtgggctgcaataacacctgcacgttctgcatcgtgcccaccacgcgaggcaaggaaaaggaccgccgccccggtgacattcttgatgagatccgccaatgcgtggccgacggcgccaaggaggtcacgctcctcggccagaacgtgaactcgttcggttatggtattggcgatcgatacgctttcagcaagctgttgcgtgcctgtggcaccatcgacggtctcgaacgtgtgcgcttcacttcgccgcacccggccgccttcaccgatgatgtgattgcagccatggccgaaacgccgaatatcatgcatcaactgcacttcccgctgcagtccggttccgatcggattctacgcgcgatgcgccgctcctacaggtccgccaagttcctcgatatcctcggtcgtatccgcgaggccatgcccgacgcacagatttccaccgatatcatcgttggattccccggcgaaaccgaggaggacttccagcagaccatggacgtggtgcgccaggcgcgcttctcctcggcgttcacgttcatctactcgccacgccccggcacgccggccgccgcaatggaacagattccgcgcgacgtggtgcaggaccggttcgaccgtctggtggcgttgcaggagcagatcaccgaagagaacctcgccacattcgagggccgcgacgtcgaagtgatgatcaccggcaaactcggcaagaaggacaccgacacccaccgtgtcaccggccgcgagaaaaccggcgtgctggtgcacatcggcgtgcctgaaggcgaaccggtacctgaaatcggcgatttcgtcacggtcaccgtcacacacgccggccgccataatctgcttgccgaccccgatgtggccgctggacagacctattccgtgcgacactgagggggcgtatatgacgcaacgagtcgtctccatcgtcggtcccaccgcgtcaggcaagacggggttgggcatcgccatcgcccggcgtcttgccgaagcgggggagcgggccgaaatcgtgaacgcggacgcctaccagatgtaccgtggcatggatatcggcaccgccaaacccaccgccgaagaacaggcggccgtgccgcatcatctcatcgacatcatcgaccccgaagacacgatgagcgtggcccgattccagcagcttgcgcgcgagaccatcgccgacctgcaatcacgtggcatccggccgattctcgtcggcggctccggcttgtacgccagagcggccatcgatgacatcacctttcccggcaccgatcccgacgtgcgcacacgtcttgaggaacgcgagaaaaccgagggtgccggtgctttgttcgacgagctgcgggccaaagaccccgaagccgccgcgcgcatggacccacgcaacccacgccgcaccatccgtgcgctggaagtcatcgagcttaccggcaaaccgtattcggccagcctgccgcgctaccggtacgtgattccgtccgtacagatcggactcgacctggaccgcccggatttggaccatcgcatcgacctgcgcaccaagcagatgtatgacgatggattcatcgaagaagtcgaacggctgcgcccgcatctgggtgccaccgccgtacgcgcgctcggctatcagcagatcatcgacctgctggacggcatctgggatgtgaacgacgccttcgcggacatcgcacagaaaaccaagcgactcgcccgcaaacagatgggatggttcggccgtgacccgcgcatccactggctgcaggccctgaacccgaaactggtcgacaacgcgatggccattatcgcgcacgccgacgccggcgactacgacccgatcgacgcccgagccgacgaatacacccagcatcatctgggcgatatcacggcgtaggaatcagccaaaggccggtgcaatcacccgcaatcagtgtgcaggcccatgattccagccggcgatcaagaacacgcgcgtcggattcgccgggcgtagtatcgcgtcgaacatcgtctccagtgcagacgtgtcgccccgatatgccgagtgcttggcggcgcgatactcctcgcgcgtcactgagccccagtcgagatcccagccggcgtcatgcgccaagcgtgaaccgaatatacgcagcaccatcgcattgccgccacggaacggatgcagataaccgagctcatcataaatagaagcgaacgcgtgaacgaacacgtcgcgatccaacgcatgcaggttgcgcttgtccgccaactccatcgcgatgttgtgcgcgccggtctcaatgagcccagccgggaagaacgcctccggattcgcggcccgagcccggtcgttcgtcacctcgcgtgtggtgtttgaggtacgcaacttgcccgcatcctcgaacacgccttcgaacagccccttatgaatggcggtcaactcgtccaagtcgccagacggattccaccgacgttccgccaacaatacggtacgtgcgaacaccgcatccgcgcgatccgtggcatgatcatccagactgccggcagccagacgatcctttccggcagggtcggcggcggcgcgcagacgcatggcggtctgctcgtccgccacgtcgatgagatgggtcacgggctccaagccacgttcgtaggcaaccgcggcgcgcatcgttgcctcgcccggcgtcatcgcttccagtgcgcagttcttgagtgcaaatgcgactgcgctcgcacgctctgcgggtgtcatgcaacccatgataaggcatattcgcgctccagcggggaatcgactcggacgaacctcgacgaaccgcggcgaatcggctgtcgggattcgtcaatcgaccatatcgtcacggtgtcgtcaccaaccatgcacccccgtactagtagaatcagacccgatatggcacgaacagcatcctccaacagcaccaaaccccgtaaatccaaagacaacgggtctacccatgatggcgaaaccaaggtccagcccgagcttgacctcgaacctgagccgttgtggaagaagatcctgctcgcgattccgcgcgcgttcggctccggcgtacgcgccgtcaccggcgtcggcgaatacgacccagcctaccgtcgtgacggtttgtgcttcctgctgctcgtgctcgccgtactgttctgcgcgtccgaatggttccgtgtcagcggtccattcggccagctgcttcacgccatcgcggccggtgtgcttggtctgatgagcgtcgtgctgccggtgttgctcgccgccgtggccttccgactcatgcgcaattccggtaaagggtccaataacccgcgtgtggtcaccggttgggtgctgttcatgtggtcgatttgttcgatcatcgacgtggcgatcgccgccgaccacaccggattcgacatcacgattctgcaatccgccggcggcctgttcggcttcttcctcggctcaccgctcgcctggggcctttccaacgtgttcgccatcatcattttcgtggtcgtcggcctgttctccttgctgatgattaccggcacccacgtcaccgatttgccggaggatgcgcgcaaaatcgcagctaaaatccaacgcaaaccgtatgtgccgatgggccaggaggccgacggaagcgccagccagttccccaacgaggtccgtgtgggagataccacactcgcctttgccgacggtgttccctcgcatgacggcaacgacgacggcaacgacaacgatcaggccggcgatgcacggcccagcctgttcgcacgactgttcggccgcaaatccaagaccgaagacgacaaaacccttgacaagtatgctgccgacgatccgttcgaccgtgccgccagccagcatggtgccaccgccgaaaccccggtggtcgatccgatgaccggcgagattaccggtgcgcgaaccattgcatcgtcttcgtacgacggtcgtccgcacctatccagccctgcgcctgctgccgatgcggatgatggcgacgcttcccgaacccgcgtcatcaccagtggccagaccatcgccatgcccggtgggggagcggtagacgatccgtgggcacccagtgccgcccaggccggtactgtcgcgctcgcaggggcagccggggcgatgggagcggccggggccgccggtgccgcggccgcggcagccgcgaccggagcctacgcaggcgccgatgcggatggcagcggagtcggccagggcgtgcccaatacggacggacagccgaatgccgccgccggcaacggtacagacgacgacgccaataggccgtatcagttgcccgacctgaacctgctgaccaaaggtcagccccatgcgatgcgcaccccggccaacgatcgcgtgatccgggcactgacttccaccttcgaacagttcaacgtggacgccaaagtcgtcggcttcctgcgtggcccttcggtcacccaatatgaggtcgagcttggccccggcgtcaaggtggagaaagtcaccaacctgcagcgcaacatcgcctacgcggtggccagttcggatgtgcgcatcctttcaccgattcccggcaagtccgctatcggcatcgaaatcccgaacgaggatcgcgaaatcgtgcacttgggcgacgtattgcgctccgacaaggccgtgggcgacccgaacccgatgctctccggcatcggcaaggacgtcgaaggccacttcgtgaccgctgacctgaccaagatgccgcacctgctggtggcaggtgccaccggttccggtaagtcgagttttatcaactcgatgctcacttcgatcatcatgcgtgccacgcccgaacaggtgcgtctgatcatggtggatcccaagcgcgtggaactgtccgcctacgcaggcatcccgcacctgctgaccccgatcatcaccgatccgaagaaggccgcacaggccctcgaatgggtggtcaaggagatggatgcacgctactccgacctcgaattcttcggattccgccacgtcaaggacttcaacgaggccgtgcgcgccggcaaggtacatgcgcccgccggctcccagcgcaaggtggccccctatccgtacatcctcgtggtggtcgacgagatggccgaccttatgatggtggccaagaacgatgtggaaagctccatccagcgcatcacccagctggcacgagccgccggtgtgcatctggtgctcgccacccagcgtccgtccgtggacgtggtcaccggtctgatcaaggccaacattccatcccgactggcgttcgccacctcgtccgccaccgattcgcgagtcattctcgacacggtcggtgccgagaccctgattggtcagggcgatgcgttgttcctgccgatgggttccgccaagccgattcgtgtgcagggctcgtgggtgtccgaatccgagattcgcaaggccgtggagttcgtacgcacccagcgcaagccgaagtaccgcgaagacatcgaacagatggccaaggaagctgagaagaaagacagtatggagcctgacgaggagatcggcgacgacatggacgtgctgctgcaggccgccgaactcgtggtcactagccagttcggttccacctccatgctgcagcgcaagctcagggtcggcttcgccaaggccggccgactcatggacctgctcgaatcgcgcggcgtggtcgggccgtccgaaggctcgaaggcccgcgaggtgcttgttcagccgcaggacctgccgcaggtgctcgccttcatccgaggcgaaaccagctcgctcgaagccagcgccccgcaacaacccgaactcggcgaataattcacccatcgacctccctctgatgagggaggtgcccgaaggggcggagggagagaagcgcggacagcatcagcacgaaacctgattcccgaataatagcagtcaatatccagccaccactcactcaaggtaggagtatgggggtaacgtgaacactatggatgagaacacaatggacaagcagtcatcgcccaaatcatcgctgttcgacggatggaacgcgccgccgaacctggtcacctactcgcgcatcgtactcgtggtgattttcctgacgctcgacattctcgccggggcctggggtgagaacaacctgatcatgcgttgggtcgccgcggtactgttcatcatcgccgcgtccaccgataaaatcgacggttggatggcccgcaaatacaatcaggtcaccgaaatgggcaagctcatggatccgatcgcggacaagctgctcacttgcggcgcaatgattgtatgctccgcgttcggcgagctcggctggtgggtgaccatcctgttcctgattcgcgaaatcggcatcaccgttatgcgcttcttcgtcatggagcgtccgggcggcaaggtcatcgccgccgcatggcccggcaagctcaagaccgtattccagtgcgtgggtctgtccatgctgctgctgccgttctggtcattgggtaacggacaggccacgccgttctggatgaccgcttactacttcctgacctacgccatcatctacgtggcattggtcctgtgcctctactcgggtgccgtgtacctgtacaacacgttcgtcgccccgaagcggaagtgacggatattccaatgcaggaattgtgcgacagtctcgcggccggcatcctcaagatctgcgaggcgaacaatacgaaaatctcctgcgctgaatccctgaccggtggcctgctcgccgatgcgttcgtgcgtattcccggtgcctccaacgtgttgctgggctccgctgtcacctacgacatcaatgccaaggcctcgatcctacacgtggacaaggccctattggatcgagaaggcgccgtacaccccgaagtcgcccggcagatggccatcggtgccgctcgcctatacagccagccggaatacggcgaccgaatcatcggcctttccaccaccggcgtggccggccccggtccggacggtgataagccagccggactggtgtatgtgggcctgcgcatccccgcaagcctcaccgcggaccatgccgaagtgctcaaagccgtcgaactccatcttgatggcatgcgcgaagaggttcgtcgcctcaccgtattccacgttctgcaaaacttgagtctattcacagcaagttttaaggaataaaaccgcgggaccgtcgtgttgtacatagtggaaacactgaaccgaccttggaaggggcgatggcgatggaaacgatgacccgagtgaacgaacagatggatgtggccgccaagaagccgatggctgtgcagccgggtgtcgcccgtatgcgtgaactgactccggcccagcgccgtgcggtgatgttcgcccagcagcaggtgctcaaggcgcaggctgccaagaaggccaaggatcagcgtcaagccgttcgtgaacgtatgtgggatgaggattcgccgtcgtacaagccgactgccgccgccgagcccgtggtggttgaggaggagcctcgcgaggtttcgctgcgtggtgctatcggctacgtgctgcgcgaactgcgtacgcgcgatcgccgcacgttgcgtgaggtctccgagaaggcgggcgtttcgctgggctatctttccgaagtcgaacgtgggcagaaggaagccagctccgaactgctgagctccatcgccgatgcgctcggagtctccacttcgcgcatgctgcgcatggtggccgattatctcgacacagtcgagggctgatcggttggcggtgtgaagccgcatcccgtaatctatgtctagctgtgaacccgtatcgcttgtggcgatgcgggtttttgctgtcctgcgggtggtggcacactggcgtgtatgcgtgaacgggaattctgggaattacttgaagaggtgttcggtcggacctacggtcgttcgctgtcgcgtgatcaacggatgtccaaattggcgaatatgaccgtggtcgaggcgctggacgcgggggaggagccacgcgtggtctggaatgtgctctgtgaccaaatggaggttccggactccaagcgttggggccacgatcataacgcgccgcccatgcccgccgtctgacactgcgggattacggagtcgctgaatcgtgaaattggcgatttcggcgtgttgcacgccaaattcgaacaaatgttcgtgtgtgtggttatagttattcacagtgacaagaagccgcatacgtgtgcacagggtgcttgtcatccgccataagccttaccgcagtaggtcttagggaggtcagatggccgagctcgggcaagctggaaccacaatggttggtttggattgcctcacatggcatgtccgtcatacggtggaggcatccaattcgcgcacgacttcgacaaggagaagatcatggcacttgagaccaagccggccaaggacccggcagccgaggacaagcacgagctcgatcccaagcgcaaggcggcgctggacaccgcgctggcgcaggttgagaagagctttggcaaaggttccgcaatgcgactgggcgaccagcccgagcagaacgtcgaggtgattcccaccggttcgttggccctcgatatggcgctcggcatcggcggcctgcccaagggccgcatcgtggagatctacggccccgaatcatccggtaagaccacgctcgcattgcatgtggtggccaatgcccagaagaagggcggcgtggcggcctacatcgatgccgaacacgcactcgacccggcctacgcccgcaagctcggcgtggacaccgactcactcatcgtctcccagccggataacggcgagcaggccctcgaaatcgccgacatgctgattcgctccggtgcacttgacgtcatcgtcatcgactcggtcgccgccctagtgccgaaggccgaaatcgaaggcgaaatgggagacagccatgttggtttgcaggcccgactcatgagccaggcgctgcgcaagatgaccggcgcgttggctcaggccggcaccaccgccatcttcatcaaccagctgcgtgaaaagatcggcgtgttcttcggcaatcccgaaaccaccaccggcggcaaggccctgaagttctatgcctccgtgcgtctcgacattcgtcgtattcaaaccctgaagaatggcgacgaagcggtgggcaaccgcacgcgcgtcaaggtggtcaagaacaagatggccccgcctttcaagtccgccgaattcgacatgctctacggtgaaggcatttcccgtgagggctcggtaatcgacatggctcagcaggttggcgtggtcaagaagtccggttcgtggttcacctatgagggtgatcagctcggtcagggacgcgagaaggttcgtcagttccttaaggacaacccggccatcaccgaggagattgagaataaggtcaaggccgagttcggtctgatcggttccgccgaccagttcgcggaagatggcgaagccgcagcagcggccgctgtcagcgaggccgccgctgccgacgtggccaaggacagcaaggccgcagcggcgcctgctgccaaaacgacccgtgccaaggccggcgcagctaaggcctgaacatgattagtgccgaagcattcttgcggcgcaatcctgttgcgtcgcaagacatgcccattgccgagcagcgtgttcagtcgaaaccgccgggacgtttttctcgacgggggagagacgctgccgttgtcgaagatcccaatgatttggacgcttgccgcgaggctgcattgcgtttgctggacgcggccccacgtgcatccggcgcgttgcgcgaacgattgctcagcaaaggctatggcgaggcgattgtggacgaggtcatcgaacggctgattcgcgtgcaactgattgacgaccgcgcttatgccgaatcggccgtacgctattgtgccggtcgcatgatgggtcgtcgtggtgcggtcctggaacttgctcgcaaaggcgtggaccgcaaactggctgaacaggtgtgtgacgaagctgagcaagatggcatctttgaggatgccgcatgggaattgggccgccaaatagcccgcaaaacccatggcctcgatcgtcaggtccgtcagcgtcggttttggtccgcaggcggccgcaaaggacacagccccgaaaccctccgccgagtcgccgccgaattgttggtgtagccaagaaaaaaatgagacctcttataccccgggttctgtcgtgccgtgcgcgaacgcacggcacggatggccatccatctcgacctgacgttgccgccaggctctagcagcctacccgatgacacgggcgagcagcccttaccgccatctgcttggccttgctcccgatgaggcttgccatgcgacctactgttaccagaggcccggtggtctcttacaccgccgtttcacccttacccgtcgaggacgggcggtctgttctctgttgcgctatctctcaggtcaccctgggcggacgttatccgccatcgtgctctatggagcccggaagttcctcagccgatcccaatgaagatcacggccgcggccatcaagaggtctcaagcctgcaattatacataaggtgcggaaaaggcggcatcccgccctgcggtgaggccatgacgttgcccagttatcctgttttctccatagttgggcatagttgggcgattcgtgaacgacgcgccgaatatcggatggggcgtgtcgggcgtgttgtggcgtgtcgtatggagacgaatcaaatctgtaagagcttggtatgtgcgagaaagagcaagaaaacgttgcctatccattgcagtatttgccatgacgaacaaacgagccagactgataaaccggtatcaaatcttcttataggagactgctgccaaaaccccagtatatacatcgtttcattgcagagaaaagcccgggaataaacatatattctctgggcgagtttccggccgttcacccattgttcgtctacaatgaaacatacccggtcggtgatgatgccgttcggaacacatatagcgggttacaccgcttgagttagaggaggtcaacatggaaatcgtcgttaccggacgccacacgcaggtcaagcaaaggttccgtgatgtggtcgagaccaagatgaatcgtgtgaccgctatcgccccggatgctcagcgcgcgcagattgtgctgacccatgagggcaacccgcgtcaggccgataccgccaagcgcgtggaaatcaccgttatcgccggacgtaccgtggtgcgtgcggaggcttccagcaccgatgaattcagcgcgctggacatggcgctggataagttgacgctgcgtctgcgtcgtactcgtgaccgtcgcaaggatcaccgtcgtggttacgcaaacccggtcccggtggatctgggtgttatcgccccggagcccgagccggaggtgtcggaggaagagccgaacaacagcccgcaggctgcggtcgcctccgatcttggccctggcgaatccgtggaggtccaggttggggatacgccgattgtcatccgtcgcaagttgcacatcgccgagcctatgagcatcgacgaggcgctgtacgagatggaactgatcggacacgatttcttcctgttcgtgaacaaggagaccggacgcccgtccgtcgtctatcaccgtcacggttggagctacggcgtgttcgaaatcgacactccggagaatgtcaagaaagcctgagggtaagggctgctgacatgatcagctgataccgcatggatcgcttccaatatggaagcggtccattttttcgtaaaaaggtcgaaaaattcgattgctgacggtgcgaggcgctattctggtacgcggacaccaccacttatcagtcaagggagaacccagtggtcgatattgttgacaaagccctgcgaatgggtgaaggccaccagctcaagaagctggagaacgtggccaaggccgtgaacgccctggaggacgagatttccgccctctccgacgaggacctgaaggcccaaaccccgaagttcaagcaggaaatcgaaaacggcaagagtctggacgagatcatgcccgaggcgttcgccaccgtgcgcgaggtctccaagcgcaccctcggccagcgtcacttcgacgtgcagctcatgggcggtgccgccctgcactggggcaacatcgccgaaatgaagaccggtgaaggcaagaccctggtcgccaccctgcctacctacctgaacgctctcgaaggcaagggcgtgcacgtggtcaccgtcaacgactacctcgccagctaccagagcgagctgatgggccgtatctaccgcttcctcggcatgaacgtcggctgcatcatcaccgagcagaagccgccggagcgccgcaagcagtacaacgccgacatcacctacggcaccaacaacgagttcggcttcgactacctgcgtgacaacatggcctgggagaaggccgacctcgtgcaacgcggccaccactacgccatcgtcgatgaggtcgactccatcctcatcgatgaggcccgtaccccgcttatcatctccggcccggccgaaggcgacgtgacccgctggtaccgtcagttcgccaagctggtgctgaagctcacccgcgacgaggactacgacgtcgacgagaagaagaaggtcgtcggcatcctcgacccgggcatcaccaaggtcgaggacttcctcggcatcgacaacctgtacgagccggccaacaccgccctgatcggctatctcaacaacgccatcaaggccaaggaactgttcctgcgcgacaaggactacgtcgtcacccaaggcgaggtgctcatcgtcgacgagcacaccggccgtatcctgccgggccgccggtacaacgagggtctgcaccaggccatcgaagccaaggaaggcgtggaggtcaaggccgagaaccagaccttcgccaccatcaccttgcaaaactacttccgtatgtacgacaagctcgcgggcatgaccggtacggccgaaaccgaagccgccgaattcatgaacacctacaagctgggcgtgctgccgatcaagaccaacaagccgatgatccgcaaggaccaggacgacctcatctaccgcaccaagaaggagaagctggccgccatcgtcaaggacgtggccaagcgacacgccgagggccagccggtgctgctcggcaccgcctccgtggaaagctccgaagtggtctccgccctgctcgacgtggcgaagatcccgcaccaggtcctgaacgccaagcagcacgagaaggaagccgccgtggtcgccgtcgccggccgcaagggcgccgtcaccgtggccaccaacatggccggccgtggtaccgacatcatgctcggcggcaacgtcgagttccttgccgacgccaaactgaagtccgaaggttactctccggaagacaccccggaagagtacgagaagcgttggccgggcaccctgaacgagatcaaggcccaggtcaaggacgagcacgaggaagtcaaggagctgggcggcctgtacgtactcggcaccgagcgccacgagtcccgtcgaatcgacaaccagctgcgcggtcgttccggccgtcagggcgatccgggcgagtcccgcttctatctgtcgctggaagacgatctgatgcgtctgttcaacacccagctggtggcccaggtcatggccaagggcatggaggaaggccagccgatcgaggccaagtccgtcaccaagggcgtgcgcaccgcgcagaaggccgtcgaatcccgtaactatgagattcgcaagaac

SEQ ID NO: 3339 - DNA, 10726 bp, Unknown
  R151_18m  MAG No. k141_14875
gctccctcgacgtgctggcggcggtgcagttccgcgaggttcgtttcgcgccacagtcccctatcgctcgtgtcgtcgcatggcagcggcgtggcggcgagcaggttgtatgcgtcgagcacgtggtcgaggttgttccatccggcccctgcgatcaggccgtcgcataggttggtcccggtcagcgcgagcaggctcagacgggtgttggccttgcgcagttggccgccgttgaatccggcggcatgcgttttgacccactcggcgcgcaggccgcgtgccagggcgtcgaagtcctggcgtttgaccaagagcgcccggtcttccgcgttccttcgctcccgctgctcgctgtcggcgtcgcgtttggcgatctcctcgggagacatctgcgagaagcacaatacgttgcgctcggagaatcggatcaccggctcgccgtacgggttcttctcgcgccaccgcccataccattgcttgaactcgtcgggctcgccgctccacgtgttgtaataccggtagcccgccggagtcgtccatatagacggcccgggatccacgaccaggcccaagccgtcaagcacttgacgcatacgcttctgccagtcctcgacgcgcatacggcttcgcagctggccgcgcttccaatcccagttcttggtgcccgccatcgaggccaactcagccatcatgtcgggataagcctcgaactccgcaagatcatccagctgggaaagcgacagctgggcgaacgaattcgacttggcacgcacatcggcggggatacgcgcaatcctcaaacggccacgcacaaacgactcgctacgccccgtcttcgaagccagctcacccacgttcgcaccaaggtcaagcaaaccctgatacccgtcagcctcctccaacggcgtcaaatcggaacgctggcaattctccaccagcatcaactcacgctcggttttcacgtccaactcacgcacaacacacggcacggactccaaaccagccaacttgcacgccgccaaacgacgatgaccaatcaccacacgaaacatgcgctcgccgtgctcctcatggtcgggagttaccacaagcgcctgctgcaggccctgctccctgatgctgtcggcgagttcggtgacatcgcccacgtctttgcgggggttgtccgggttcgggatgaggctctttacgttgatatcgatgatgctgatagccactgaatcgggtcactactccttgatcgatagattctggtgtacgggcaggtgcggcatgcgcttcctgcgccggcgctgacgctcatgctccaattgctggcgtccgtgcttgcgttttgccacggttcagccctccttaatctcgccggtatccggatccacatccccacccgaagtgggcaaatcacgccacggatccaacagactgcgctcgatatccgccttcaccacgcgctcgcgggcctcgaccggatagttgatgaggtcgttgaccgcgttggcggcgtcgaagatgtgctgcgagagatcgcaggcgtcgtacagggcgtcggtgatggggtcgatttccttgtatttttcgatgtattcgtccttggtggccaggtcgagcatcttgctggccgcgatgcggaacgcggccgcggcgtccttcatgcgtgatgccttggctgtcagggcgagcagcatgagcggtgttatttcgtcgggtatcagcgcgtcctgcacgccatcggtctttttctttcgtgacattgaatctccttagaattcggggtcggaatcgtttgatgggaaatcgttggaagcgccgaacgcggcgccgggagaggcgggtgccggctgagcccacggatcgccttccggcatgccggggttctgggccggggagccgttctgccagccttgttgctggttggcgggcttggccggatccccatacgtgctgccgcccgaatagccgcgcccggattgcacgcgcgtcacctgcgcggtcgcgtacctcaatgaggggccgatctcatcgatggtcatgtcgatgacggtgcggttggtgccgtcctgcgcctggtaggaacgctgccgcaacctgcccgtggcgatcacgcgcatgccctgggacagggactgcgcgcaatgattggccagatcacgccacgcgctgcagcgcaggaacaacgcctgcccgtcctcgtactggttggcctgccggttccagattctcggtgtggacgcgatggtgaacccgcagacgacggcgccgctggcgatggtgcgcagctcggggtcggcggtcaggttgccgacgatcgtgatgactgtctcgcccgccatgttcatacctccttcgaatcgttcgacggcttgcgtttccacaggcacaccgccgatatcgtgcgccggccacggtcgaccaccacgtcgccgaaccggggcggcaatatggtcagcggccatgcgtccgcgcgattcagatgctggatgacctcgagcaggctgtccaatagttcgccggcgcccatgcgcatgcccgcggcgtcgagcggccattcgaacaggctttcgccttcctcccgatagtcgtaatcatccggctggctcgtcatcgatgctccttcgctcacgcggcgaccgtctgctgctggagaccgttgcgctccccccatgcgatcacctccctgaccgggtagacgacgcggcgcgtatcgcgttggcggtgctcgcgtttgcagccgagtttcacgaacctcggcccctcgccccggtatctccacacgccgagcgtgcccacggtgggagagcccccgaaataggcgctcaccttgtcggccttccaataggcgacgccgtcccggacgatgtcgggcggaatcatggcgctcatggtgtatcctttctcatgtagctgttttgcttcgcccacgttgccgcgtgggctttttctttcccgcagggggagtggaccgtgccgaatcgaacggcttcccgccgtttgccgcgcgtacatgacaccgcgcgatctccgacgggggcgaacctgccggccccgcacgccgcaccagctggggaagggtgcggcacgatggtgttagcgactgtccttgtcgattgccggggaaggaagaaccccggcaggcctttattcatcggctcccgcctcgcttgccacaagacagagcagacgcagggggactcccaggaacgcgaccagcgagcagacgccgttggccaacgggtaccggcacgcctcgtgggtcatcacccacgccagacatgcggcgaacacgacgccccagaagaccagccggcgcatgaaccgtttcgacgggcctccatccgccgtgcggaaaccgctggcgtgacgcccgtaatccttggcgttcatcgtttttctcttttcgtgtggcccctccgccgataggcttggaactgcgacattcaaaacacagccagcggagggaagaatgattgactgggtcaacgtggccggagccgcgttcggcgggattgccttgggagtggaggcgaaacggttcctcgacgagagtcgtcattggcggcacggaaggtgcgaccttgtctcggcgaaacatgaaaccttggtggaaaccatcgagagcagcgggaagaagaccgtacgcgagaccagatatcgcaggctccgtctcatgaacgtcggcatagcgccgatacgtctcatcggcatcctgtaccgaggcgtcacccctctcaagggcagtcccgaactgttcggcggccgcgagctgctctccccgggcgacgaatattccttaggcgcgattgacatcgaggacgatgcatggatgctcgtcacgtatagggacggttccgacaggcgtttcgtgttcctgcagttcattgatctttcctccgatccggacgacccgctggacgacctcgggcttatagggctgtggtggcgcacaagaccaaggacagtgcacccaaaaacctcggatgacgttcggttggatcgcgctcatccggcactgcggcgaatacgagcaggaagaccgcaatcgcaacgagaattacgatgcgtgtttgacgcggccatacatctaggagccgtagaagggataacgctaagcccatggcagctgaaacgatatcaatgatctcgtttaccggatcgaagtcgaaagcccccatccgatccagttccatcaaggccgcccgttcgacatcctccgccggacaaaactcgacatccatcactccatccgttccgatggtcgaagtgaagcgcgcttacgtcgagcgcgctcgatctcacgaaggtcaagctcgttcttgatggacaacccgatattcagaaggaaaagcgcgattataagaaccgtcggaccgttcatcacgccacctccttgccggcgagcgccggaatggttgcggtgcggatgggacgatgggacgcatgatgcggtagattcatcatgaatgctcctatgagaaagaagtcggtgatggtcacatggttgtggaatctgatacagggggatttcgcgcagaacccgacagcctggatggacttggcgatcacggttctgggaatcgtgctctccccggtggcgtggttcacgtccaaatatctggagggcaaagccgcgaaacgtgaggccaaggatgcgcaggagaagttcgacgcccatctggcggtgctcaaaagccagagggacacagcggataacatggccaaggcacttcgcgcacaggtcgaacaactcaagaatcttgtggaagtgctctccaatgccgacatagacgcggatccctggggcgatgccgaatggatgtccggcgacgggttcaggatcaagaacaccggcaagcggacagtcgaggtgctgtcggtgcatacggatgcgcggggattgccgttcgacagcagacggcatacgccattccgttgcccgcagggcgacagcgtcgagtatctggctcctggcatggaaaatggcagggcggtggaggtaatcgaatggcgattcgagggggacgacaggccgcatgtgacccgtcgcgtgagtttcattcccgggaagcagctcatttcagactcctgatgaattccattgccttggtgttatcgattacacggacctttgaataggtgacaacgcacttgtcgttaccgaactggaacgttgccggtttagcggagattccgccgcgttccgatgaaggctcctcatcgagaagcgcgtcgaaatccttcgcatgttccaatgacgggtggtaaacgaagtcatccatcacgccacctccttatcagcgagcgcggtagcgatggcttttgctgggtcgccgccggtctcgttgagtacggcgaggaacatgctcaggctcatgtcgttgcgtggcgcgccggtgcggaacgattggatggtcattcggttgaccgaggcagcgcgggccacttgggtgtctggcacgttgccgcggcgtagccgggcgcgcgcctgtctggtgagtttgctggcgaccttatccatgccgggtttgaccggcagtgccggctcgcgtccgatgcctgccgccgatgccttgcgtttgattggctcgctcatgtgcctgagtctcctttctgccttgggtcttctgtcagaggttcttgagctggtcgaattcttcgggggtgagggtgatggtcgtgtcggtgattcccatgtccccgattcggacctcgacccggccatcggccagtcgcctgaccttcagcggtctgcccggctcctcgtggttctcgattcggatttcctcactcattctgacctcctctatagcgcctgctctaactgatattcaatatagcgcctgctatattttgtagcaagtgctcggcgtgtctgctatagttgcatatatggcaacgaacaagagagagcggaatctcgtagatgaggtggccgcaaaggcgatgaatcgggtaatcgagcgcgctggcatgaataactccgccgtcgacagggcctcaaaaagttctatcggctataaccgcgtgcgcgatattcgcaatggccttaaagctcctgtcaggctctctgagttcctgcttatctgtgacgtatgcggcgctgaccccgtgcagacggtgagagacatactcgccgaggccagccgcatcgaggcggaacgcgccgccgacgagatggccgaccgcattgccgccaacccagaacagttcgacgtggccgcgaacgacgacccaaacaaggaaaacgaagccaccacaccccgcgaatagaggctttatgggatatgaggatctactcgccgaagcgttgagactcggcgtcaaagtccgggaacgagaactatcgcccggacgctgcggctgctactacgaacccacgcgactcatcatcatcgacgagacgctcccagacttcgcccgacgttgcacgctcgcccacgagcttgctcacgctaggcaccacgatcgaggctgcgacccgaacgggtcaaaagccgagagacgagccagacgcgaaaccgtgctccgactcatcaacccgaccgaatacgcaatcgccgaacaaatgtacgagggagacagtttcctcatcgcacaggcgctcgacgtgaccgtacaggtcgtggaagattacaaagaactgctgcataacggagctgttgcgcagggaaaggataagacatgcacggaaagaaagtaaccgcagttgtagcattgctattaatgttcggattcctcactgcctgtggcgtgagtaaggaatcgacagccgccgacaaagctgaaacccagtcggaagccgaagatgccattaaagggaccaattctgaagacggtcaggaaccattgattgataatggcctgcacggcgaatgttccggctctgatccaagactccaatcggtgaaggtcaacaccaactcatacaaaattcaagttgaaataccgaacaacaatctgatacaaacgagcgacttctacggttatttcatcatgttcacaaatgatgctggagaatcatggcaggcaggcttcaaaaacatagtcaactcccatgaaacctctgtgggcgtgttcgacatggaaacaagcaagcagaataatctcggaacctggaatgatttggtgacgcttcaggacggcaccttctacgcgttgcttcccaaccaggatattcgcggcaccggcatcaagtggaacgcgacgctatccatcgatggccgggatgtggcgacatgtcccgctgatggaagcgatacaactttggaataaaagaatagaggccgggacataccgtgctaattcgcaggtgccttctcagtgctattgggaaatcacagtcaacaatggagccgacatagtacagaacgacattccaggcggtggctacccacaagtgactgtctcggatggccaacagctcaaacttcaggactgcggaacgtggtctaggcaatagcgagaaagaagaagacaatgaccgagtcaacccccatgcaggcacagcagccaccaacaccgcagggcacgcagcccgcaaccatgccgcttacaccacagccgacgccgaagaagaagctcccgataccggccctcatcgccatcgccgcagccataggactggtcgtcggccttgccggcggactcggaggcatgtacctgtacgccacgcccatcatcaaccagcagaagtcggacatccaagacctcaatacatcattggactccgtcaaagcgcagctagccgacgcgaacgaaaaactcaacccccaggaagatcccaacgacacgggatccaacaccgacgcttcgggcacgggggagaccgccgtcagcggcggcgtcgaaatgaaggtcctagaagccggcgaacagcccaccatcagcttcgacacatgcggcgacggatgcagcaacggccaatacgggccaaagacaccggacgcgaacaccaagtactgggtggccaaggtggaggtcacgaacaacaccagcagtccgatggacatcacctgcagctacccctatgagatagtcgcgttgaactcgaagaaccagaaatacacgcccatcaagaatctgtatcaggtcgaaggcaaccccgagtgcaacgcccagctccagccgggattgaccagcacggtcacctatccgttccaggttccattggacgcgaagatggttgccatagcattccgcgacgtcggagacgtgtattccggcaccggcggggaggacaactactcctatatagtcaccgacccgaattacgtggttaatcgatagaaaaagaattgccctgtcgatctggaacatcggcagggcgtgtgaaacatcgaccagcttgcttatcagaaaggaggacgcttcgcctcccatcctacacggggcgaagccatacctgaaatgtcagttcttatcgtcctcgtcaatcatgatgggggagtagaagtagagtctgtccgtggcgagcggttcgaattccttcgaccagatgtcgaattcggggtcgttctcatcccgcccctcgttctcgaagcccgcgccggagaaaaggtgaacgctggcctcgttccgggggtcgatctgtgtaagcacgtacggggtgcgcccgtgtctggcggcgtcgttcgccatccatcgcagcgcgcagtccaacagtatcgcaccgagatgccggccgcgttcgctcaacgcggtggcgatgaacgatatcgcgtaaccactggattccggggcggcggggtcgtatccgaactcgcagaagccgacgatgggagcgttcggggtttccccgtactggagaaccatccggtacatccccggctcgtccttgacgcggagtccgcggatatagcgctgcacgtccatcgcgtactccgggccgttcggctcgcagcagacgaagcgacgcaatgcgagctggtcgccggagtcgcacaggcgactagtgacgatcgctattctcaatcttctgcgccttcttcgcgagtcgtgccggacggttcatcatcgcgcggtgcagtcgcatccatttctcgtccacggcgttgcgtggcttgccgtcctcgggcggcgcgtacgccggtattggcttcacgccggtatccgtcatggtcatggccgcctcctttcgattttggcgtaaggggatagcctacgtgtttcccttccctttgtcaaatcccattaaaacacatcaaaaccggttaaaacacgttaaaaccggaaaaaccgtacaagtgagtgaaaatcatggcgaacatcaccagatacaggacggccaaaggcgaaaacaggtatcgagtccgctaccggaaaccggatggcacgcagaccgacaagaggggcttccgccgtaaaatcgacgccgaaaactgggcggcagaacacgtcaccatcgccaaggcaaccaacagctacgtggatccggaaggcggcaaacggctcgtcggagacctgtatgagcagtggctgaaggaaaaatggccgttttggaaggaaaccacgcgggtcaacgccacggaagcatggcgactctactgcgaggagcgttgggccgatcgtcggatcggcaccatcacccgcgccgaggtccaggcgtggatcagcgacatcatcgcgagcgccggcgcttcatccgtaagccgtccataccagaccatgctcggcatctgccgcatggccgtccgggacaggctcatactcgacaacccctgtgaaaacgtcgaactccccaaaccgccgaggcgcaagagccgccgcgtgtacctgcccatatcccgtctgctcgcattcgccgacgaatgcgccagaggaaagcatctgggagcggagcggcgggcgctcgtgctgacgttggggttctgcgggttgcgttggggcgaggcggcggcgttaaaagcccacgatctggacttcgacaggggagtgctgcatgtgggcggcaacctcgtgtacgtcggggcaagatgggtcgagggcactccgaagaacagcgaggaacgcgacgtgcccatgcctctcatcgtcatggaagcgctgaaaccgatatgcggggaacgcgagccggacgaaagggtgtttcgtgatctgcggggcggcccgatcatgaagcagagcacggcgaagacgaccggctggtggtatcacgcgctggtgcgcctgggctggccgaaggaggaatggcccacgcctcatgacctgcggcacaccgccgcctcgctggccgtgcacgcgggcgcgaacgtcaaggcgctgcagcggatgctgggccacaagaacgcgagcatgacgttggacgtgtacgcggatctgttcgacagcgacctgatggatgttgcccgtctgctcgatgccgccgtgcaggtggagacgggcgtggaagaatgtgggcaaaatgtgggcaaaaacgttttggaacatgcttgaaaccctcagaaacgttggaatcacgccattcctgcaaacggtggttcttcagcaagttaaaggatgccttgagctgattcgttcttggcgcccctctccgaggtggggggaactggccgtgaagctgactgagggggagctcgggtacatccgcaagctccccctcagttgtctagcgacgacagctcccttcagagagggatgccaagtccgctaactatttcagcagtgagcggcacatggagcgatattcgctaacgtagccgccgccgaagaacacacaatggccggcaatgggata

SEQ ID NO: 3340 - DNA, 13742 bp, Unknown
  R151_18m  MAG No. k141_15036
agctgcttcttcgcggccatgtcgagtctgccttccataaggcaagcatcccggaaccccaacgccgccgggcggatttcgcgctcactctttatgaggaacaaaccccgatcacgcgctcaaaaattacgatgaacgtcgatcttgcatcattcgacggattccgatataattgacaaacacgggaaggagctgattcccacgcacgaccacggcatttttgaaaaagtggagatacacggagctgccccgagcttgatcatccagcataccaggccgggaagcaaaattgtcaaaagccattggcatccggaattggagatcaatacagcttttgaaggctcctcacgtttttttatcaacggccgggtggaagatgtgacacctcagcacattgtgctggtcaatagccgggaggtccactcctccatcccccatttcgccacagacggctttgccatcaccggcatcactctgcaaatcagctactccttcttaaaaagcctgatccccaatttcgatacatgctatttcgtcctcacagaggaggctaatacgaaaattcaatccctgatccttgcgcttaacgagtggtatgagcaggaggatactcccttcctgtcagtgcttgtcctccggcagatctgcgagattgtctatatcctgctcacccagtgttgccaggaaagggaccgggccaaagacagcacctctcaggagtcctttcgaaagctggaggggatcttggcttacattcatgaccattacagcgagcccctgaacaccgcccagatggcgcagcagtttttcttctcgaaagagtatttctgccgctttttcaaaaagtatacgggagccactttctcccaatacctagccaaataccgggttcttcaggcagagcagccgctcgctcagacatccaaaaaaatctcggaaatcgctctggaaactggctttgccgatgcaggcagctttatccaatgtttccgaaaatactatggctgtacccctagaaattatcgaaaagaaattatccaaaatccattttttcggaaagattaggtagtgcccgatggtttgcgcactcttggtgttgtctcctgcgcgcgttttcagttcgcttcgttcatggtgtcgtggagtcgggacatgtccaggtagcggcgtgtggaccagtcgttggcggtcacgtagcggattctggcggtgatgagcatcaacgcgctcttgccgtcggggaagctgccgaccacacgggttcgacgccgtatctcgcggttcaatcgttcgatcatgttgttggtgcggattcgtcggcggtgttcgaccggatagtcgtccagcaggtacgtggtggtttcgttaatgccctccctgaggcacttggcggcttctttgagtttcctcgcgtccatctcggccgcgacctgctcggccttggtcaatgccgcttcgcgtgattccatcgcgaaaacggctttcagcgcgtcgacggcccaccgggtgtgccgcgggctgaccttggcgaacacgttcctttcgaagtgcaccatgcaccgctggtagcgggcctgtggcaggagctcgccgaccatcgagacgagtccggcgcaccggtcgcccaccatcaggcgcacgcccgtcagaccacgctccaacagcgaggagacgaacgaatgccaactcgtcgaatcctccttcatgccttcggccacgccgatcacctcccggtgcccgtccatgccgatgccgatcgccacgagcacactcacgttctcgaccgcgccgccccatgagcgtttatgccacacgccatccatgaacgcatatgggtagggctgggatagcgggcgttgacgccattgatcgatctgcgcatacaccttcttcaactgatccgacaaggtttgcgatgacatccgcccgccccagagcgcctggctgatgtcatcgacccgacgggtggagacaccggccagatacatgtcgatcagcgcttcctcgaccgactcctcccgccgccggtagcgttcgatgaccgccgactcgaacaaggcgcctttcaacttcggcaccttcacactcaatttgccggctttcaccgtcagggctcgctcataatggcccgcccgatacgccttcctagaaccggaacgctcataccgggtggtgtcggtgatctcatccgcctccgcatcgagcatcgcgttcaacacctgattgaccttctcacttaccatccggtccagttgggtctcgagcatgggttggttgacctgtaaaatgtgcttgggcatggcccgcacctgctttccaatcggttttcactttcagcgattgaaaatcgtgcacacaggacgggctacgctccactactccaaaaagccccaacaaatttgcgcaaaaaaccgggcgttatcaaagatttgggcggctttgaaggtctcatccacttcgctgttgccgccgttgaacacgttgacgataccgagcttcgctcctttcaatgaggcttgggctagcgatttctcttactgggtgttctatgtagcctgcaacgtcgccacatcaccctcgtcagggccgacaattgcgtcgagtaccaatgcctgatcatcgacagtgttggtgatagctccggtcacatcgaaactgtccgacagcggaattacccctgaccggcttgtctgcccgtaagtgacacgcattccgacagtaccggtcacggatgccgggccgcgtaccgagccggatgtatcgctaccgagaccgaatggtgcgaatccggccgcaacggctgcggcggtaccgctactgggaccggatgggtcacgtttcagattgtacggattcctagtctggcctccatcggaactatatcccagtcaaccgtaggaggcggccagttcggacatattggtcttagctagaacgatggcgctttggtcaatcagtttctgcacgacggttgcattgctgtgcgccttgttggtttccaagactttcgacccggtggtggtgttcatgccttcaacgttgatgttttctttgactacgaatgggatgccgtaaaaaatgctgtgtcgcgcatggtctttgcgcccacggtcactgagatacgcctgccgcatcacatgtggattaatttgcgtgatggcattgatttctggaccgttgtcatcatactcgttgattcggtcgagatagtaggagacaagttgtcggctggtggtttcaccggattccagtgctgcagcaatctgtttgatggttttgccttgtggattgaattccatgctggatatgtcgaccgtattggctgacgctccgcatccggccatcatcatacaagccaccaaagccgcggtaatcgctaccgtctttttccgttgagccgttctgaacctcataccgttctcctatcggggaattgatttgcaagcctgaaattaggcacagccttttgcctcctgacatcgtcgacgtgtctgggcggtttccgccattgcgaggtggttaacgagggctgtcattgacttcatgaccgagtccatcaggataggggtgcatccaggacctttggaagtgagcccattacgttagaatttcagtgcttttgccatgggctgctctcttgcaaggataatatatggaacttagaaaaatgattgcgtactccacaactggctttaatccccgaagagcgtcacccactcgtagaagtcgttcaagtattatcacgataaattcaacgccggcacccttaacctgggtatgaacttcggctggagaatcggccctaggtcgtagctactacacgatgatgggctcattccatgaggagaaaaccgtcgaggacttccatacgccagcaaaccgaatacggcatcaaatggacaaacagtatcgggattacctgctcggacaactgactgtacgccaacgagtcagctgctaactcacacgcagactacgactcctggaacgacacgtgtgcgacacacgagtaaagaacatgcgctgagtctcgtaagacattgttcctgtgatgtttgtcgcttttgcggatagtcatccattccctgtctcgtacctcacgttgataatgcgcgataagcacatgctattgctgactcgtcgtgttccttctcctccgttttttaaactgggttcgcaggctgccagtctaaacagaaggggggcaggatcatggcaatcactacattcaaggctgatgtccatcatgtcgcaggactgaacgtgacggcaacgagcacgcatcacaccatcactgtcgacgagcctgaatcattgggcggaaccgacaaggggccgaacccagtggaactcctcttggatgcgttgggctcctgccaggcaatcgccatcaatgcgttcgcgccaaagttcaaggtcaagatcaagaaactcgacattcacgtcgaaggcgatatcgacttgggtggattcctcggaactaactcagcccgccctggataccagcggctccgctcaacaatcgacttggacgcggatggcgatccggacgccgtaaatcgtctgattgagtatgtggaagcccattgcccggttgggggcactctcgctaacggagttgccatcaccgtcaaccgaaaatagtcgcatccggtcgaatcggtggacaagcctggccgcatcctgatttagtgacaagtcgtcgctaaatcaggatgcggtttcatgttttcggttgaggcctaaagttcttcatcaactagtgtaaacacaccctaataatcaggcgcgggtggaagcgcggcggattaatgttggctcaatcaacgtggtgccgtgcacatgagagaccgggttctcggcatagtcaagcaattgggtcatggctttgcggcccatgtcgatgccaggagcctgcaccacggttagcggcatggggctgatcgcctgaaaccacatatcctcagtgccgataacgctgatgtcatcaggaacacgcaaaacgccgcgttcatgaaggctcgccaacagccccatcgccaatgtatcgttgccggccacaatgccatctggtatcggtatgtccggtactgaggaattatcggaatcctcgcgccgcatctgttcggcacggtcggaaagctccatgcccaattgccgtccatcctcaaccatcaatcctccggaatcgatgagctggaacgtcacgccatctcccgcctgtgccacggctttttccaccccgagctgacgatcctgaatcgcctcatagtcaaaggaatgcgccgcaaatgcgatgcgcttgcactctgtgtgaatcagttcttcggcggcaatgcgtccgacggaaacattgttctccaaaatggagcagacgggagtgcctccatacggattggtgtggtcaatcagaatgatgggaatatttgcggcccgcgcggccgccacatcttcggcggaatcctgcacggtgctcaacaagatgcctgctaccttcatgccaatcaacgtgcgaatcagttcatgctgccgttcgaggtctgaagaggcgttgagaccgataatctgcataccgttttcctcgcacacctcctgcgcgccttcaaaaatgaaggagaacagcgaatgctcgatgtcggtcatcacatagccgataatcggtgtgccagtggttgtttgcgcgggggagggggcggcgcggcgcggcacataaccaagctcctgaatggcggcaccgattttggctttcaacgtttcggagacacgctcagggtaattcagatagttagacacagtgccgatggagacgcctgcatgtttggcgatatccgacacgccgaccttactgttcgttggcatgatgactcctttgcccggtaacgccgataactgctgaaatattgctatttttcactactgtacgtcaaggtaaccgaaatactcaatttaaatttcaatgaaagctttgaaattgatttgaaatattcaaaatagattgatatgatagtgctacgaaatcaccgaggatatcagctggcgatggcggcaggttcgcggggaaatcgcagaaaatcaagtaagcgagcacgctatgggcaatgtattacgcgtgcctgaagcaaattgaaattacttgaaatagtcgaatacagttcaaccggcatgtgaagaatttgcttcacgtgcttcagcagtaagggagagatatgaacgcttcaacaaagcaggatgaaggacttggcaagtacatgccgctcgccttcgccgcaggaatcggttcgatgctcggctccggcattatcgtcggcctatcgtccaccatcaccgtgtggcaggacggcttgggtcttgacgccacgcaggttggactgctttccggcatcctgactttcgccattgccttcggctccctgttcggcggccgcctcgcagacaagattggccgcgtgctgttcttcaactggattaatctgttctacgctatcggcgcggtcatctgcatctttgccggaaatttcaccacgctgcttgtcggcctgattatcgcgggcctcgcatccggtgccgatttgccggtttccatgacggttgtttcccatgatgcgccggatgatgccaccgcagcccgactcgtctccaccacacaggtgttttggcaggtcggcgtgttcatctccttcatctgcgccttccttgtctccacgatgagcggtgccgccggcggtcgcgtcgtgttcgccattctcgctgtattcgccgtcatcgcctgggcttggcgcgtgttctcgccaacattccgtcgcttccacgaagaagccgatgcccgcgatgccgctcgtccggccacttcggacaacaccggcaagacctcggtaatgaaggtgctgttcggtgccgataagaaggcgcttctcacctacttcctcgccattgtcatcttctatgtcggctggaatctgctggccaatacatggggccaatttcagacctacatgttctccaaggccggcgccacccagtcgcttgctacaggcctgggcattatcctgaacttggtcaccctggtactcaatatcgtcttcgcctcgattgctggtggcaagtaccgtaataaggctttcttcgtcggcatcatcatcagcgtcatcgccatgattgccatggccatgggcggtgcgaatctatgggtcatcgtcggtgccaccgccttcatgaacctcggctctccgctcgccggcgaggcactgtacaaggtgtggacccaggaatccttcccgattgagatccgtgcctccgtgcagggctttatcaacggcttctctcgtctgtgctgcggcctgttcgcactgatcaccccggccctggtgctgcctgagaccattcagaccactatgtggtgcttcgcggccatcgtcgtggtcgaaggcatcgccggcacggtgatgattcgtgcccagaagaagtacggtaccgacgaggaacgccagttcgccaaggccaacgcctgatatcccgtaacggctcctctttcgggaggagccgattcccataccacctcaggacaaaggagtcatcaatgactgctgcaaccgtgccgcagattgtgcccggtaccttgaccggcgacctcgatatcaccggcttcactgttgaacactatccgggtgatgcgctcggcatcgcagtccgcgcaccgcgcatgaactggacctattcgcacacagtgccggaagatgcacagattctgctcaccctcacccgccgcgtgcctggcagtaaaccgcgcgaagaaaaaacctatctgcccgccgacgacggtgtgcttgtgccttggcagttcgagccgctcgtctcccgcgaagaagtgtttgccaccgtgcaggctgtctccgccagtcacaagccgctgggcgcagtcagccgcaccttgcattttgaagccggcctttttgaagaattcgaccacgttgccgacttcgtaggcccctcctgggctgagccggaaagcgaccatcgtcatttgccgctcgtgcgaaccgaaatcgaactcaaagaccagcccgtgcgtgcgcggctctatctgactgcgctcggcttggtcgaagcggaaatcaatggtgctaaagtcgacaatgacgcattgattcccggttggaccaattatgagcagcgcgtcgaaatgtggacctacgacgtgaccgaaaacctctctgcaggcacaaatgccatgggtttctggctcggtgacggctggtatcgaggtaggctcggcttcgacggtggctatgcgaattactatggtgaccgtatcggcgtattcgcccagcttgaagtcgaatatgcggacggcagcaccgacgccgtttattccaactcgtgggaccgccgatggaagaccacacttggtcccatcgtctgctctgacctgtgcgaaggcgaacgttacgatgctcgctttgaaatgcccggctggtccaagcctggattcgatgatagtgactggaagcctgtggccgaagtcttctacgaccccgcccgcatcgaaaaccctgacacttcgccggtacgcgcacacgaaagaaaccagcctgcctccatcgaacgcatcggttccactgacgatggtcgtggcatctggttggtcgactttgagcagaactgctcacagcgtatccgtctgaacatgcgcggcctcgaagcaggtcaaagcgtcacattgcgccacgtggaggtgctcgaaccggacggcaccatcgccacccgtaccctacgccgtggccaacagtgcgatatctacacctccaacggcaccgatgcttggtgggagccacgattcgccatgcacggtttccgctatgcgcagatcgaaggctacgcaggcgaactcaccgccgaggacatggactgccgcgtataccattcggtaatgggccgcaccggcgaactcacctgctccaactcgctgctcaaccgtttgcacgccaatgccgtatggtcaatgcgctccaacttcgtctccatccccaccgactgcccgcagcgcgacgaacgtatgggctggaccggcgacatctgcctgttcgcgccgaccgccacctacctgtacgacgtacatggcttcctcaaaagctggctcaaagatgtgcgcgccgaccaagtcaaatggggcaccgtgccgttctacgtgccattcattcctctcggcgtgtgggcacaccctcaatccatctccacatggggcgactccgccgtggaagtgccatggactctctacatggaaagcggcgatccgcaagtgctcgccgactcctatgacctgagccgcgactgggtgaacgaagtcgaacaatacctttcaccagacggtgtctgggatcgcaaacccgacttcccgcttggtcagcttggtgattggctcgacccgaccgcgccaccggaagaccccgcgcaagcgatgaccgccaaggaacttgtggccaccgcgttctacgcccgcagctgcatacaaattacgcgcatcgccgaaattctgggatacgccgatgatgccgcgcgatacgccgcgctacgagatcatgtgattgccggcttcctcgaccgtttcattcgactcgacggcactatgacctccgacacccagtgcgcctatgcgctcgccatcgccttcggcctgctcgatggcgaacccgtgcgcaaggtcaaggccggcaaccgtctggcctgcttggtgcgcgaatccggcggcaaggtgagcaccggtttcgccggcactccattcgtactacccgcgctgacccaaaccggccatgatgatgaggcataccagttgctgacctccaccgaatgccccagctggctgtaccaagtcaccatgggtgccaccaccacatgggagcgctgggattccatgcgtcctgaccactccctgaacccgggaggcatgacctcattcaaccattacgcgctcggttcggtggccgaatggatgcacgcgcatatcggtggcttggaaaccatcgaacctggttggaagaagttccgtgtcgccccgattgtgggcggtggactcaccgaggcctccacctcgcatatcaccccgttcggccgtgcggcagtcacctggcaaataggtacggacggcagcaccgttgatgtgacggtcactgtgccggtcggcaccactgccgttgtggacatcccagaccaagaagtccagaaccttaccgccggcacccatcatctccagttccatatctgattcgctggccgagctccctcccggaatactgagcagggagctcccgaatcctttgcatgaaaggaataatcatggcactcaatgaagagactgccgcagcatccacactggctcccgacacaggccgcccgctgaccacacaggaaagatggcgcttcggtattggctttgcgctgttctccttgatttggatgacagccggcacttccggctcccaggtactcctgccgcaacgcttcaccgaactgggtatcggtgtgcccgaggtgattctcggcaccatgaattcggttggttgtgtattcgcgctcatcgccaacattgtgtttggtgcgatgagcgacatcacgcgctcccgcttcggtaaacgcaccccatggatcgtgtgcggtggctttatcaccgcagccggttatctgctcgccgccaatagcgccgcgctcgcaggcatcgtagcgggctggtccattgtgcaggtcggcgtcaatatgatgattgccccggcagtcgccgtactttctgaccgtatccccgaaagtacgcgaggcactttctccgcgttctacggtggcgcgcagattgttggccaatcggcaggtgcatttatgggcgcacaattcatcaaacatatgggcgcaggcttcctgaccggtgcggtgctctttgccattactggcatcattgcggttctggtctggccgcgcgaacggtcgtccaagaacgatgaggtggcagccaaaacactgagcatcagcgatattctgcgctcgttcatcctgccaacccgcaattgccgcgacttctatctggcgcttgtaggccgactgttgcttatggtcggctggtctatggtcgccacctaccagctgtacattctgcaaaagtatgttggtctgtccgtagacgaatccggtacggtcatctccactatgtccgtgatttcaatgattgtgctcatcgtcacgtccatgatttccggtcccatttccgaccggttgcatcggcgcaagattatcgtcgcggtcggttcggtgattatcgccatcggtatcgcgattcccattatgatgcctacggctcttggcatgatgctgtacgcgggtgtggccggcaccggctacggcatctatattgccgtagaccaggcgctgaacgtggacgtgctgcccagccaggaggaggccggtaaggatctcggcattctgaaccttgccaatacggttggccaagtgcttgccccggttatcgtcggcggcgttgtggccaccagcagctatgcgaccatcttcccgatcgccatcgtctgcgtgcttgtgggtgcagtggttatcatgctgattcgcaaggtgaagtagtttcggcgttggccgtttagcataatgctctccgcgtgaccatattggctgtgcggagagcattgtcatatcagtcggacgtggtgatgtgctccacatcccagcgcacgccgagcacttcgggcgtctggattacggcctcgatgcttttctcgatgtccgcatcgttgcgcttggtggtgtcgagcacggcggtgatggagacgatgtcgtcaggcaggtcggtcgcggcgatagaacgcacggaaaagcccgggcgatgcaccgcatcgaataccagggagcgaatcttcacctcatgttgctgcaaacagcgcacttcaaacgtgtattcatggccgaccgtctcataatcgttgatactgcggcgacgatcgatgaacgagccgatggcgcggaacagcgggttggccagcacgaacagggtggatcccaatgccaccagcgcgttggtgcggatgccggcgcttcgggcgcgcaactggcgttcgagccctatcagtgcgcccaatgccgtgccaagcacgatgcgtacggtgcagtcgagaataacggccagagaaaacgtggtgaacatgagattcacctcctgaaacaataggcgtcaggaactacccgcacaccctacagcgccagcccgcctcccgcaactgcgtcgccgcgttcgggtggttcgggctccgtgcggtgagcgggccgcggccgtatgatggaagcgcgggtggtccaggattttctgcatacggcgggaggcgtcatggttcctattgagaacgtgtacgaacagattcgtacgttcgccgctgatgccggcgctcgcaaggtcgtgctgttcggttctcgcgcaaagggtgtgaaccggcctaaaagcgatatcgatcttgccgtggccggttgccccgatttcaatcgcttggagcagaaccttcaggacaatctgtggtcactgcttaaagttgatgtcatcaatctggatgagccgatttcttcatcgctgagggcggagattgagcgtagcggaaaggtattgtatgaaaaaatatgagaattacgtttccgcgctgaagtcgctgcgcaaggctcccgaacaggatctcagcaatgatttcatccagagcggcatcattgacaagttcgagttgcagtttgagcttggttggaaactgttcaagacgctgctggcttatgagggggaccctgtttccgcttccggttctccgcgagatgtgctcaaaaccgctttccaatattacgatttcatggacgaatcgttgtggctgcgtatgctgtgcgatcgcaatgattctgctcatatctacgatgaggaacgcgcccggcgtcttgtggatgccatcatcgttgattacatccccgaatttgagcgtgtgaatcaggggctggtcgttcgttacggcgaagcattgaacgattagcgcgggtgacattaatggcactgggcacgctgggcattggcgagcagatcaatggggtgaacctcggcaactggctggtactggaaaagtggatgaagccggggatttttgccgccagcggcgaagcggacgagatctggctgcatcgggctacggagtctgctgagttggaggctctgctgacgcggcatcgcgacacgtatatcactgaagctgattttcggaatattgccgcgcatggctgcaatctggtgcgtattcctgtgccgtatttcatcttcggggatgtgtccggtcatccgggctgcatcgagtatttggacagggcgttcgactgggctgagcgtaccggtctcaagattcttatcgacctgcacacggtgcccggctcgcagaacggattcgacaacggcggcctcaccggcgtggtgcgctggcatcatagcccgcgagcggtcgcctatgcgctggatgtgctgactcgtttggccaaacggtaccgtgatcgtgcggcgctgttcggcatcgaagtgctgaatgagccgattgattggctgacgtatgctacgtcgtcatcgagcaggcaggcaaaggatagctttgaagcacggaggagtgggccgattccaatggtgttcctcaagcgtttctaccgtgagtcgtatcgccggttgcgcccgattttggccgagaacc

SEQ ID NO: 3341 - DNA, 2719 bp, Unknown
  R151_18m  MAG No. k141_15153
caccatggtcggctacgagatcacccgccgttacggcgaggaaggtctgccggacgacaccatcgacatgaccctgcacggttccggaggccagtccatcggtgcgttcatcccgcgcggcgagaccatgcgcatctacggtgaagtcaacgactacgccggcaagggcctgtccggcggtcgcatgatcgtgcgcccggaagacaccgtcaccttcgacaagcacagcaacgtcatcgccggcaatgtcaccggtttcggcgccacgtccggccagatgttcgtggccggtcgcgccggcgaacgtttcggcgttcgtaacggcggtgccacgttcgtcgtcgaaggcgtgggcgaccacggttgcgagtacatgaccggcggcactgttgtggtgctcggccccaccggacgcaatttcggtgcaggcttctccggtggtaacacttatgtgcttgacctcgatatgaagaaggtcaacccgagtgccatcaagtccggtgcactgctcttcaagtcgcttgatgccgaaacctccaagctggtgtacgcactggtcaagcagcatgccgaagagaccggttcccagttcgccgcggccctgctggaggactggaacgaaaccgtcaagcggttcacgcacgtggtgccgaagcagttcgtggccatgacgaaggccatggaagaagccaaggccaacaatgtagatttcaatgcgcccggcgcctgggaaaaggtgtacgagcaggttatggaaggagcgcgctgacatgggcgacccgagaggattcctgaaggtccgtacccgccgagagttggctgaacgccccgttgaggagcgtatcaaggactggttcgacgttcacgccgaaaccggcctgcaaccgtggacccaaacgcaggcggcccgctgcatggattgtggcaccccgttctgcatgaccggatgcccgctgggtaacctgattcccgagtggaacgacttggtccgtcagggcaagtgggaagacgcctacaaccgtctgtccatgaccaacaacttccccgaagtcaccggccgcatctgcccggccctgtgcgagcaggcctgcgtgctcggcatccaccagccgccgaccatgatcaagcttgacgagcagaccatcatcgatcaggcatgggatttggactacgtcaagccgctgccgccgcagcgtctgaccgaccagacggtcgccatcgtcggctccggccctgccggcctcgccgccgcacagcagctcacccgcgccggccacaccgtcgtcgtctacgagaaggacgacgccatcggtggtctgatgcgttacggcatcccgaacttcaagcttgagaagggtctgcttgaccgccgtgtcaagcagatggaggccgaaggcacccgcttccgcaccaacgtggaaatcggcaaggacatcacgtgggatgacctgcgtgaccgttacgacgccgtcgtagtggccatcggctcccgcgtgccgcgcgatatgaagattccgggccgcgagctcgacggcatccacttcgccctcgacttcctgcccgacgccacgcgccgtatcttcggcgtcaagccggtgcacgacatcaccgccaaggacaagcacgtcatcgtcatcggcggtggcgacaccggttccgactgcctcggcacctcgatccgtcagggtgcgaaggacgtcaccgtgctacagatcatgccgaaagagccgtcaagccgtccggacaacagcccgtggccgaccttcgcccgcacctaccagaagacctcctccatggaagagggcggcgagtacatctactccaccgactccgtgaacttcgagggcaccgaagaggagaaggccaaggtcaccattgataactcgaccaccgccgaaggcttcgtggccgatgagcgtggtcatgtcaccggcttgaaggtcgtctccgtggctcccggcgaaaatggtccgttcactcgccagcctggcactgagcgcgtgctgcccgccgatctggtcctcatctccgtgggcttcctgcatccggacaccgagaccatcctcgaccagctgcccgtcgaactcgacaagcgtggcaacatcgctcgcaatgacaagttcgccacctcccaggatggcgtgttcgtgtgcggcgatgccggccgtggccagagcctcgtggtctgggccatcgccgaaggccgctcctgcgccgcagccgtggacgagtacctctccaaggaaaagagcgagctgccggccccgatcaaggccagccagcgtccgatgatgctgcctcgctgaatactgttccaaacagaaacatgaaaatcccttcttcatgaggggatttttgcgtttctgggattaattactgccttgagtcttcagtaatgtttatatttcgagaatattgcatacatggttaacatgaagctcctatggtgtctttcgtcgccaaaaagacgacgccagaatatttgggagagattcatgaacacacgtcatgtcacttcactggtcgcggccggtgcggcaatcgtcatgctgctcagcggctgcggatcgaccggtacctccaattccagcaatgcttcagattccaatatcatttccgtgtacggcagtgagccggcacacccactattccccggcaacaccactgaggccggtggcggcaaggttgtagaccagctgttcgcaggtctggtgaccta

SEQ ID NO: 3342 - DNA, 13176 bp, Unknown
  R151_18m  MAG No. k141_15992
ggcataatagccaaggcaatttttgggctttgcctaagctagtttgaatttgaaataggtgaataacgtggcacagactactaacgacatcaagaacggatccgtcctgaacctcgacggacagctgtggaccgtcatgaagttccagcacgtcaagccgggcaagggccccgccttcgtacgcaccaccatcaagaacgtgctctccggcaagatcgtcgacaagaccttcaacgcaggcatgaagatggaattcgagaccgtcgacaaccgcaccctccagtactcctacgaggacggcgacaacttcgtgttcatggacatgaccacctacgaccagatcatggttccgaagaccctcgtgggcgacaaggccaagttcatgctcgaaggcaccgactgcctggtctccttccacgacggcaccccgctgagcgttgacctgccgggctccgtggtcctgaccatcacccacaccgagccgggcctgcagggcaaccgctccaacgccggcaccaagccggccaccgttgagaccggagccgagattcaggtcccgctgttcatcaatgagggcgaccgcgtcaagatcaacaccgaggatggttcctacaccggccgcgagaacaactgatctccgcatcctcaacagacgaccgaccgtataaaggactaggacagcagcagtatggcacgttccaccgcgcgcaaaagggctctgaacaccctgtacgaagccgacgaaaaaagtcaggatattctcgccctgcttgacgagcgcatcgcacatcccggtgcccagaccccgcttcccgactatgccattgaaatcgtcaagggcgtggccgagcaccgtcgtcagatcgacatgaccctggacgaacactccacgggttggaaggtccgccgtatgggcgtggtcgatcgcaacattctgcgtatcgccgcttgggagattctgttcaacgatgatgtgccggacaaggtcgccatcgacgaggctctggcattggccaagaccctgtgcgatgacgattcgcccgctttcatccatggcctgctgtctgcagtgtgcaccgccaagaacgcagcaccggcaccggagtccgcggcagaagaggccgatgaggaatcgtccgattccgatgccgccgcatccgagccgaccgatgagggcgatgtttccgattcgcccgattcgtccggtgcatccgacgagtccgctgccccgtccgctgagattcagccgacggtcgattagtcatttgttgttcagcctccccattcgggaggctttttcatgggcggacacttgtgtcgccacacattctcaagtcggcaccttgccgacagccccgccagcggggtgagactttgcgcccaacggcgtgtgagtctgcgctggccgttaaccttggtacgaatacccgaaaaacataagggggttttggtgagccagaacgagtccgggaccatcgcaattccgatgtatgacaaggatgatgcagtcctcgttttggaagacggacaggtatatgtgggggagccgtacggcgccctcggtgagacgaccggtgagatcgtcttcgccaccggtatgaccggataccaggagacgctcaccgatccgagctacgatcgccagatcgtcgtgcagacgttcccgcacatcggcgataccggcgtcaacagcgaagaccctgagtcctcccgcatctgggttgccggatacattgtgcgtgatccttctccgaacgtgagcaactggcgtgccgaaggcagccttgatgacgacctcgccaagaacggcatcgtcggcttgagccacatcgacacccgcaagctggtgcgtcacctgcgttccgcaggcgtgatgcgcgccggcatcttctccggcgacgccctgaccgaccaggccaccggcgcgctcaagaccatcgagcagctgctcgaagacgtcaagaacacaccgcagatgcagggcctgagcctgtacgacgaagtgtccaccaagcaggcctacaccatcgagccatgcggcgagtacgaaggcaaggagccgctgtacaccgtggccgccgtggacctcggcatcaagggcatgaccccgcaccgcatggccgaacgcggctgccgcgtgcacgtggtgccctccaccatcaccttcgccgaaatcgagaacctgaacccggacggcgtcttcttctccaacggcccgggcgacccggaacaggccggccccgaaatcgagctgctgcgccaggtgctcgacgccggctacccgttcttcggcatctgcttcggcaaccagctgctcggccgcgcgctcggcttcggcacctacaagctcaagttcggccaccgcggcatcaaccagccggtcaaggatctgaccaccggcaaggtcgaggtcaccgcccacaaccacggcttcgcggtcgacgctccgatcggcaggcaggtcgacgcgccgtttgaaaacggcaagtacggcaaggtgttcgtctcccacatcgatctgaacgacgacgtggtcgaaggcctgcagtgcgtggacatccccgcattctccgtgcagtaccacccggaggccgcagcaggcccgcacgatgcggcctacctgttcgaccgtttctgcgaacttatgaagaacaactccaaggaaggtaagtgatatgccgaagcgcaccgacatcaaatccgtgatggtcatcggctccggcccgatcgtgatcggtcaggctgcggagttcgattactcgggcacccaggcatgccgcgtccttcgtgaggaaggcatccgcgtcatcctcgtcaactccaaccctgccaccatcatgaccgacccggagatggccgacgccacctacatcgagccgatcgccactccgatcctcgagcagatcatcgccaaggaacgccccgacgcgctcctgcccaccctgggcggccagaccgcactcaacgccgccatggcgctgggcgaggccggcgtcctgaagaagtacgacgtcgaactgatcggtgcttccctggaagccatcgaccgtggcgaggaccgtgaactgttcaagaaggtcgttgacgaggccggcgccgaatccgcccgctccgacatcgcccacagcatcgaggaagtcgacaagatcgccgagaagttcggctacccgctggtcgtgcgcccgagcttcaccatgggcggcctgggctccggcatcgcccacaacgaggaggagctgcaccgcatcgccggcgccggcatccattactcgcccaccgacgaagtcctgatcgaagagggcatcgagggctggaaggaattcgagctcgagctcatgcgcgaccgcaacgacaacgtcgtggtcgtctgcccgatcgagaacgtcgacccggtcggcgtgcacaccggtgactccatcaccgtggccccctgcttcaccctgaccgaccgcgaataccagaagctgcgtgacatcggcatcgccatcatccgcggcgtgggcgtggacaccggcggctgcaacatccagttcgccgtccacccggccaccggccgcatcatcgtcatcgagatgaacccgcgcgtctcccgttcctccgcactggcctccaaggccaccggcttcccgatcgccaagatcgccaccaagctggccctcggctacacgctcgacgagattcgcaacgacatcacccagtccacgccggcctcattcgagccgaccatcgactatgtggtcaccaaggtgccgcgcttcgccttcgagaagttcccgggcgccgaccccaccctgaccacctccatgaagtccgtgggcgaagccatggccctggccggcaacttccaggagtccctcggcaaggccatgcgttccatcgacaagcgccacatgggcttcaactgggatggcgagaagccgtctgccgaggaagtggccgaactgcttgaggccatccacaccccgaccgaacaccgttacctgcagctcatgcgcgccatctggggtggcgccacgctggagcaggtgttcgcggccaccaagatcgacccgtggttcctgaagcagatcttcctcatcaacgagaccgccatgacggtgcgcgaggccgaaaccctcaccccgaagctgctcaagaaggccaagctcgccggtctgtccgacgtgcaggtggcccacctgcgtggcttgggcgatgaaggcgagaacaccatccgcgagctgcgctggacctacggcctgcgcccggtctacaagaccgtcgacacctgcgccgccgagttcgacgccgccacgccgtactactacagctgctacgccgacgaaaccgagctgcgcccgcgcgagcgcgaggccgtgatcatcctcggctccggcccgaatcgcatcggccagggcatcgagttcgactacacgtgcgtgcacgccgtgcaggagcttggcaaggactatgacaccatcatggtcaactgcaacccggagaccgtctccaccgattacgacatgtccgaccgcctctacttcgagccgctcaccttcgaggatgtgctcgaaatctacgaggccgagaagaggatgggcccggtcaagggcgtcatcgtccagctcggcggccagaccccgctgtccttggccgcgcgtctgaaggccgccggcgtgccgattctcggcaccaccccggaatccatcgatctggccgagaaccgcgagctgttcggcgaggtgctcaagaaggcggagatgaacgccccgcgttacggcaccgccctgagcctcgaagaggccatggacgctgcccaccgcatcggatacccggtgctcgtgcgcccgagctacgtgcttggcggccgcggcatggaaatcgtctacgacgacaagcagctcaccaagtacgtggaccgcgcgcttgccgaggccaaggccgataccgtggtctccggccgcctgccctccccgctgctcatcgacaagttcctgcaggacgccatcgaaatcgacgtcgacgccctgttcgacggcgaggaactgtacatcggcggcattatggagcacgtcgaggaggccggtgtccactccggtgacgccgcctgcaccctgcctccgtccaccctgtccgacgaccagattcgtcgcctgcgtgaaggcacctacgccatcgccaagggctgccacgtgcagggcctgatcaacgtgcagtacgccttcatggccaacacgctgtatgtgatcgaagccaacccgcgtgcctcccgtacagtgccgttcgcctccaaggccaccggcgtggcgctggccaaggccgccgcccgcatcatggccggcgaaaccatcgccgaccagcgcgccaacggtctgctgctgcccaagggcgacggcggcgacatccaccccggccagcaggtcgcggtcaaggaatccgtgctgccgttcaagcgcttccgtaccccggtgggcaagaccgtcgacatcctgctcggacctgagatgcgctccaccggcgaggtcatgggcttcgaccgcgacttcccgcacgccttcgccaagagccagctcgccgcctacgatggtggcctgccgacccacggcaacgtgttcatttccgtgaacgacaccgacaagcgtcagctgccgctgctcgccgtgcgcctcgaagagcttggattcaagctctgggccaccgagggcaccgcctccgtgcttcgccgttacggcatcgagtcgaacatcgtggacaagatcagcacccgcgtggacaccgatccggaagccccggtcgaggtgcatcacgccgccggctccgtgggcaagaacgtggttcagctcattgaggaaggcaagatcgacatgatcctcaacacgccgaactcgcgcggctcccgttccgacggctactccatccgtgctgccgctattgcagccgatctgccgcagtttaccaccatcaccgagttccaagccgcactgctggctatcgaggccgtgaagcataatgattatcagatcatgagcattcaggagcattcgaagcagctgttcgaattggagcgacgggagttctgatgactacacccagcagtgaggaattgcaggcacaacgttcggatttcggtctgcgactgagcaattcaatggccaaatacggaccgctgtgtgtgggcattgacccacatcgcaagctcctcaccgactggggatacaacgtcgacgccgaaggcgccgaactcttctccatgcgtatgctgcaggccgccaacgggcgcgccgcagcagtcaaattccagacgtcgatgttcgagcgctacggagccaaaggtttcgaagcgctcgagcgcgtgctctacgcggcacgacaaatgggcgtcatcaccatcgtggactgcctgcacggcggcctgtccaccacgatttccgccatcgcagacgcctatttcaagcccggtgcaccgttgctggccgacgccatcacgctgctgccgtactatggcgcgcgctcgttgaacggcttgattaccgaagcgttggaaaacggacgcggcgtgttcatcgcctccctgacttccaatccggaaggcatgagtctgcagaccgcgttgcgccagagcggcgattacaagggacgtaccgtggcctacggcatcgcctccaccgcgcagaagcataacgtggatatcgaaggcatgggctcggtgggtctgatcatcggtgccaccatcggccaatggatgcaggattccggcgtggacccctccaagttcaccggtccgattctttcccccggttacggttggcagggtgccgaggccaaggatctgaaaaccgtgttccgcggtacgcgcggcaacgtgctggttaccgtgtcccgctttatcgcctcgcatgggccggatatcgccgcactgagccaagctaccgagtcgattgcgcttgacgtacgtcagtcgctgatggaagccactgccgaaggcgcagaaaaccagtaatcagaacggaatcagatgtcgcggcatgcgtacgtatctatctcattgcatacgtcgcatcacgattcatattcttccctgttcgtcggggctgtaacagttaccggtcatctcgccggtgagccgttaccacattggattcataatcgctgcacaccacatcatctccggaggaacccatgactgaaaacacccatgccggccgtctaatcgtcctgactggccctaccgcagtaggtaagggcaccgtggaagccaagctgcgcgccgaccaccccgaagtgtgggtgtccgtctccgccaccacgcgtgccccgcgccccggcgaggttgatggcgtcaactactggttcctcaccgaagacgagttcctggcccgcgaagcggcgggggagttcctggaaaccgccgtggtgcacggcatggcccactacggtacattgctcaagcctgttgaggagcatctggctgccggcatgccaacgattctggaaatcgatttgcagggtgctcgccgcgtcaagcagcgcgccgccgaactcgacttggaagtggtgtacgtgttcatcgcgccgccgagcttcgaagagctcaagcgccgtctgatcggccgcggcaccgaaaccgccgaacagcaggcccgtcgcctggaaaccgccaaagtggagctcgccgccgaaaacgaattcgacgtcaccatcgtcaacgaaaccgtcgatcaggccgccgccgacctctggtccgtcatcgccaaggaatacgggctgtaacgtgtgcgaataggttctgttcgtactgagatgtccatgcttggcatggcgtgctcatgtgattatgcgtgttcagtccctgccagtcggccctcacaatagggggagagcctgacggcagggactgattcataccgatacaaaggggcatgcgccaccattgttgcgtcaatcgtttgatgcgaaaatggtggcagaggcggcgattgccgtgttgggggatgaaatctcaggattggcggaattccgaggattctgagttgtggttgtgtgtccccatttgtgcgtcaaccgtttgatatgcaaatgggggcacatgcatgtgtgcgccatcttccaaaaacgtcgaattatgcaaatggggggcacgaataggtgtcggcgtgatgtggtgtggtgcgatgctgcaggtgcggtgtgacatggtgtgggatgccagcggatttcgggtgtttttcctctggcgtcccacagaacctgatgtacggtgtcgtcaccggtttgtgggattggcagaattccaatggttctgtggaatggggtgtgggatgccagccgtgtgcatcgtttgacgtgcgtggcgtcccgcacggttgcgggacgccggccccaaattggccgctaaccgtgtggtatcccgaatttctccgatatgcgagaggaatccgtccactataaggtctctagcccagcgactaatagttttcctctatgtgcgaataatacgggctgtaactaccgctttaccactagctgctggtggagaatttcggtgctgtttctggccggcgcctgcttccaacggattgcttcggattcgtgatgctcggtgacataatgccgcatccattcgaagcactgctgggtctggatggcatcgcttaatgcgcggtgttcctcattgtccgcgatgccgaagcgcacgatcaggtcagccagacggtgatgccgctgcgcggggaacagggcgcggctgatttgcatcgtgtcataatccgcgcaggcaaagccgcagccggcgatatgccgggtgttgtaatccaggaatcgcagatcgaagctgacgttatgaccgacaatcggctcaacggtgggaccggcagccggggtagcgagccatgcgatgaatcggggaagcacctcgtcaatcggatcgaggtcggccaccatcgcatcggtgatgccggtcagcgtggtgatctgacgcggaatcggccgcaagggattcaccagctgctggaattgatcgacgatatgcccctcccgcacgcgcacggcaccgatttccgtgatggcgcaactgttcgggtaaaagccggtggtctccagatcaagcgccacataatcggtgggaaagagggcatcgtccatggcgattcgcccgccggcaccatgattgggctgggatggttggccgaaaacggtaatgccggaagtggtcacggaggctcctcatatcagtcggtgttcggtgacttattgtaccggcagcccggtctgacggtaaaatttttccctcccggattttctcggatatattggttaggcggccggcaacatgcggcgcatcgggaagggagcacagctgatgaaacagatagtggcaggcatcgtggcgcatgtggacgcgggcaagaccacgctgtccgaggcgctgctctaccgtaccggtgagatccgtaaattggggcgagtggatcacggcgatgcgtttctggacaccaattccttggagaaggcgcgaggcatcacgattttcgcgcaccaggcattggtagaacacggcgacctgcgcctgaccttgctggatacgccggggcacgtggacttcgcagccgaaaccgaacgtgtgctgcgtgtgcttgactacgcgattcttgtggtctccggcacggatggcgtgcaaggccataccgagacactatggcgtctgctggccagatacggtgtgccgacgttcatcttcgtcaacaagtgcgacgccaccggatttgcccgcgaggccgtgttggctcagttgcgcaggcgtctgaacgatgcgatatatccgttgccggcaatggaacagtccgctgagggcagcgcgctaccgttggacgcgttcgccgaagacatcgccaccctggacgaggaggcgatgaacgactatttggaacatggcgcgctgtccgtgggcagattgcgatcgatgatcgccgtacgcgagctgttccccgtatatttcggctcggcattgaaactcgaaggggtcaaggaattcctggacgggctggagacgttcacccgcgaacgtgaatggccggccgccttcgccgcacgcgtgttcaaaatcgcccacgacggtcagcacaaccgtatgacgtggctgcgcgtcaccggcggtgcgctcaaagccaaggagatcgtctcctcatcctcgtgcgccgcggcgtcgacaccgtcgccagcgcaggaggatgatgacatggcgtggtccgagaaagtcgatcaggtgcgcatctacaatggcgccaaattcgagacggtcaccgaagtgccggccggcttggtatgcgcggtgaccgggctgacgcagaccttccccggcgaagggctgggaacggaaccggacgccgaatcgccgtcgttgcaacccgtgttgacctacacggtgttgcccgtcggagcggaatccgatacggccggcacctcgggagcggccaaacgtgggggagccggccgtgacagcgcgaatcaggacgatgccgagcatgatgccgccaagtcgggaaccggccgcaatgaggagaacgacaccgccggccagaccgcggcggacaatagctcgccggcccgtccccagttcgatgatctgaccttgcacaaggtcatcaccgcattgcgtgagctggaagacgaagacccgttgttgcatgtggtgtgggtggaacggctggccgagattcatgtgcaattgatgggcgcggtccagctggaaatcatccagcagaccctgcacgaccggttcggtctggatgtgtcctttggccccggctccatcctgtaccgtgagaccatcactgcgccgatcgaaggcgcaggtcatttcgagccgctccgtcattatgccgaagcacatatcctgctggaaccaggggagccgggcagcggagtcactgtggcctcggccctgtccgaaaatgatttggaccgcaattggcaacggctgattctgacccacctgaccgagcgtgagcatctcggtgtgctcgttggcgcaccgctcaccgatatcaagatgactttggtggccggccgcgcgcatctgaagcacaccgaaggcggcgacttccgtcaagccacgtaccgggcgattcgccaagggttgatggaagccagggcaggagtcagtggccggcccgagacgccggtcgagagccggccggacaccacaggggagggcaactgccgactgctggaaccgtggtaccggttccggctcgaagtgcccgcagacatgatcggccgtgctatgagcgacatccagcgcatggccggcagcttcgaatccccggtcaccgatgacgaatacgccgtgatcgaaggcgaggcgccggtgtccgaaatgcgcgactatgcgatggacgtgaaccagtacacgcacggccatggccgtttctccgccaccttcggcggctacaagccatgccatgacgccgaacaggtcatcgcagccgccgcctacgatcccgaagccgatctggacaacacccccgactcggtcttctgcgcccacggtgccggctaccccgtcaaatggtacaaagtccccgaattcgcccacgtagactacgtcatgtgaggtggtgactaccaaatctgcggccgaatgaatccgttggcctccaagaaccgttgaatatcgcgcatttccggcatattgatcgaatgggccatgcccggatacacttgttcggtcaacgtgccgtgctcgcgccagaactcacccatcgccgtcacatcggctttcgggaagatgtcgtccgcagcaccatgcccgtagaacacgggcggcttcaacgaagccaattcggcatcgcccgcaacggaccccggtgccagccatccagagcaggagacggctgcggcatatcgcttcggattgaaacgcagcagatgcgcggccaagaggccgccctgcgagaatcccatggcaaccaccggccgagtggcgggaatatgctccgcaacccatgaatcaatggcttgggcggcctcagccgcctgcttgtccaatgattcgccttccggcacaccttcatgcgcccacgccccgaaccatgtatatcccatgccataggcgatgggtgcctgcaaactggcataatcagccgaaccggcaccgcaatagttcagcagatcgggcagatcgtattcattggaaccccagccgtgcaacagcacgaacaccggggcggtttcaggaccggtcaaacgggtcaaggccttggcaatcttcatggctcccagtgtagccacgtgaccgccgcgaccgcatttgaacggtccataagcaacccatatagcaacgccgttccattcaagtgtccgatacgttatcgtcgtagacgtgccgcacggggaacggcctcgtgcacagcagccatagagaacaccataaagggggtgcacaatgaccaggttcaatactcagctcgtccacggactgccggttggagacaacaacaccggagccgtgaacccgccgatctacaactcaacgacatatgccttcgagaaggtcgacgcgatgccccgctacgactatgcgcgcagcggcaatcccacacgtgacttcctggaacagcagatcgcccagcttgagcagggaacgcgcggttttgcgttcgcctccggcttggcggcgattcatgccgtgctcagcattttcaagcccggcgaccgtattattgtaggggacaacatttacggtgggtcgtattcgcagctcaatgagttctttacccgttggggcgtcgtggtcgagtcagtcaatacccaggacattgcagcgttggaggccgccgtcaagggcgaccgcgcgaacggcatcgcgcctgcgcaagccgtctactttgaaaccctgaccaatccgctgctcaaggtcaacgacgtgcgcgccatctccacggtggcccaccgttacggggcgctgtcgatcgtggacaacaccttcgtgaccccgtacctgcagcagccgctcaccttgggcgcggacgtggtcatccactccgccaccaagtacctggccggtcactccgacgtcaatgccggtctcgtggtcgtctccggtgaggatttggccaatcgcgtgtacttcgcccagaaccgtcttggaggggtactggcgcccactgaatgcgattcggtgcgccgcggcatccagac

SEQ ID NO: 3343 - DNA, 33203 bp, Unknown
  R151_18m  MAG No. k141_16212
gaaggccatcgacctcggcgccgccaactccctgctggtcaagctgaaccagatcggttccgtcaccgagaccctcgacgccatcgagctggccaccgccaacggctacacctccatggtttcccaccgctccggcgagactccggacaccaccatctccgacctggctgttgctaagaacacccgccagatcaagaccggtgccccggcccgtggcgagcgcgttgccaagtacaaccgcctgctcgagatcgaggaggagctcggctccaccgctcagtacgccggctacagcgccttcaaggcctgcaagaagtacttggccaagtgagctgaaacgcccgtaaaggcgtgagtttccactgaagctcgatacccgtcgtgttcgtcaagtcgaatgcggcgggtattttcatgtgacatgagcaagtcgtcccgtaccggcaaacctggcaaaaccggcaaagcacaagtcaggaaaaaagggtcggcggggcccatagcgttcttcgtctccctgttcatcatcgcacttggcaccatccagctggtctccaccttccacacttatgccctgaacctggccgagctcaatggcctcaagcgtgaggaagcctcgctgatcgcccaaaagcaggagttggagaacgatatcaagcgttgggatgacaaggcctacatcaccgcccaggcccgtgaacgcctcggcttcgtattccccggcgaacaggccgtgcgtgtgctgcatcccgaagccgtgaccggctccgatcgcgaatcccagaaaacggaagattccaataccagcaacaaaaaagtcctgccatggtacagcgaactgtcttactcgctcaaaaaggccgatgagcctgtgaccgatagcgagtccggcaaatccgatacttccggttcctctgactcgtcatccaacgactcatccaagcagtccgataagtcagaccagaacgcccaatccgatcagaacacccagcaaaacacaggggagggaacccaacagtgaccatcgatatcgccgccaaggccaaggcccttgtcgacaccatgcttgccgagcccgccaacgaccatgacatcgacctggtgcagcgtcagctcggccgatacccgcgcggcatggtcgccgtgggggcgcgatgcgtctgcggtaggccacttgccgtaatcacccgcccggtgttgcccggcggaatccctttccccaccacgtgctatctgaccggtccggaagccgtcaaggctgcctcccatgtcgaggccgccggcgtgatgcagcaatacaacgatatgctggccgctgatgaggagctcaaggccgcatatgagcaggcccataatctgtatctggcattccgtcacgaactggcaggccgtcttggcgacagtgaggagcatattgaaggcacttcggccggtggcatgccggtgcgcgtcaagtgcctgcatgccctgctggcccagtccctggttatggggccgggcgtcaaccccattggcgatttggtgctggaacgcgtcaaagacgagttcgatccgaccgtctgccgttgcacactggacgattgatcaacagatgagccaccgcgaacagcccattcatacgcactaagggatacgaggagaaggcaatgagcaaggaatccgtaaccgtcgccggcattgattgcggcacgaactccattcgactgaagatcgcacgtgtcgatgccgatggcatgcatgaggtggtgccgcgcatcctgcgtgtgatccgccttggtcaggatgtggacaagacccatcgttttgccgacgaagcgttggaacgcgcctatgcggctgctcgggaattcgccggtgtgattgccgagcatcccatcgacggcctgcgtttcgttgccacctccgccactcgtgacgcggaaaaccgtgaggagttcgaggatgagatcgaacgtatcctcggcgtgcgccccgaagtcattcccggcactgaagaagccgacctgagcttcctcggcgccacttccgtggtcaatcgcgacgatctacccgccccctatctggtggttgacctcggcggcgggtccaccgagctggtcatcggtggcgacggcgtcagtgcgtccaccacccaggttcagggcgcattctccatgaacatcggttccgtgcgcatgaccgaacgtcatctgaccaacgatccgccgacccaggcgcagatcgatgaggccgttgcggacatcgacgagcatatcgatgaggccttccgcaccgtggacgcaggcaaggcccgtaccatcatcggtgtgtccggcacggtgaccacgatgaccgccttggctatgggattgaaagaatacgatcacaccgtggtcgacgggcatcggttgagccttgaagacgcctatgccgtggacgacaagttccttaggatgacgcgcgccgagcgccgcgaatacaagaccatccaccccggccgtatcgatgtggtcggcggcggcgctgtggtctggagccgtgtgctggcgcgtgtcagcgaagccgccaaggccgatcatggtgaagccatcgattcgttcgtcgccagcgaacacgggctgctggacggcattgtgctcgattatggtcgccggttgctggctcaatagcgtaagtggtaagtgcctccagcgggctgagccgttaagcaaacagccaggtgggctgtttgcgttatatgcgacgccggcgacgctatcgctaccggctgctacaaacagcccactgggctgttggtaggcgaagggagcggctatgccgcgacggctgcacgaagcgcagcaacccgcacgcaatgctcagggcaggagatagcttataatagaaaagttggcctccgtggcgaaatggtatacgcagtcgacttaaaatcgatcgcttcggcttgtgggttcgagtcccaccggaggcaccttaaaatcggcctgtggccgatgccgttttttgcggctgtgccgcggtctctcccccagtcggcttcgccgacagctcccctcgtcagaggggctcgcagcttactatgtggagagcttataaggccgaaacaaaaggccgttaggctatgtggcgttgtgacgatgtacctgatgaaacgaggaatccacatggcttcacgctggaccgatgtcgaacgagtcgaacaaggcgccctgcccaccatgcttgcccaagccgtcattgcgggcactgcactcaccgttggtgccatcgcctgctcgggattctatctgtccatgatcggcaatgtggccgcactcctgccgtgggcgactatcgtgatactgatcgccgtggcgttcacctacatcgtcggcttcgccctgttgtggtgtgccgaagccctgaccctgcgtgccaacgacaaactcaagccatggctgtacggcgtcgtcggattaatcggctacggcgtgtggggcatgttcgtgatgagcacgatgatgaacacgctgaaccagccgctgaacggcgtggtgttgtcgaacagcgatgtgatggccctgaccgtcaactacgcggtgttcggcttcatcgccttcctgttggcacaggcgtacgcgcccaaaatcgccaccaagaagggactgaccatcgggctgatggtggtgcagatcgtattggccatcatcggtatcatcgtactggttatgatgttctccgcactatctcactgactgacttatcgctcgccggcacgacgcgcgcggccatcatcgcgcaaagcgaaagattccgggcgctaggctggaatacgatatcgtgatggcatgacgcctggtgacaccggcatgccgaaccagcaggggagaaggagccaaatgttcagtgtgcttgacatgttcaccatcggcgtcggaccttcatcctcgcacaccgtaggcccgatggtcgcggcacatgcctttgcctcctcgttgctggccgaccatttggtcgatcgcaccgcacgtgtcaaaatcacgctttacggttctctggcgctgaccggtctcggccacggcaccgatcgtgctgcgatggccgggctcgaaggcaatctgccggccaccgtggataccgaccacatgatgcgcatccgcgagacctgcgcgttggacgatactctgaacctcgccggcctcaaacgcatccatttcgactacgaccgcgacgtggtgttcgaacaatggaagcgcatggccgcgcaccccaatggcatgcgattccaggctttcgacgccgccgcaagcttggtcgacgaacaggtctggtattccatcggcggcggattcgtgcgcaaaggcgctcccgaagacccgatgatcggcattcatgaacgtcctccggaaggcacctcctttgccgacgcggacgaatcatcatccactgatttcggcgtcgaggcaccctacccgttctcatcatgcgccgaactggtgtcgttgtgccgggaacatcatctcagcatcgccgaacttgtatgggccaacgaaaccgcttcacgctcaggcatccaggtccgatccgatattgatgccatctggcgtgttatgcgcgcctgcgtggaccacggatgcacctcggcggagcccacattgcccggtggccttgacgtaccccgccgcgcgccgaagatgtatcggcgtctcgcttcgaattccgatgtgctgcgccgcgacagccggcgcaaagacgccgtgctcgagtcttccgacgccgcatgggtggatctcttcgccttggccgtctctgaggagaatgccggaggcgggcgcatcgtaaccgctccgaccaacggttccgccggcatcattcccgccgtgcttcactattactggcatttcgtggacaacgccaatgaacagggcgtggtcacgtttctgctgaccgccggtgccatcggatacctgttcaaacgcaacgcctcaatttccggtgcggaagtcggttgccagggcgaagtcggctcggcctgttcgatggcggcggccggacttgccgcagtcatgggcggcacgccggaacaggtggagaatgctgctgagatcggcatcgaacacaacttgggcctgacttgcgatccggtgggcggactggtgcagattccatgcatcgaacgcaacgccatggccgccaacaccgccatcaacgccgtgcgtatggccatgctcggcgacggctcacacatcgtgaccctcgatcaggccatcgaaaccatgaagcagaccggtgaagacatgatggccaaatacaaggagacctccaagggcgggcttgccgtcaatgtcgtcgaatgctgattgacatgtctggtattcaccagcatgatgaccggaattgacgtatacggccagcgtgtcgtatcgcacagggatgaaggactaccgccgattcgccgatggtgctaaggtagggcgcattgtgtctttgaaggaggactaatggcagatcagatgcctcaggtgaacgccgaattcggcaccacgcccgttatcgagttcccggcgcccgaagccccgaagggcctcaaggttgtggagctgaccgagggcgacggcccgatcgtgcgtcgcggcgacaccgtcaccgtgaactaccacggcgtggtgtggggtaaggacaccccattcgactccagcttcgaccgtcatcagcccgccagcttcggcatcggcgtgggacaggtcatcaagggctgggaccagaccgtgccgggccataacgtgggctcgcgtctggtggtttccattccgccggaatacggctacggttcccgcggcatcccgcaggccggcatcggcggcgaggacacgctggtgttcgtcatcgacatcatttccacccgctgaccataggtcagcacatgacgaacgccggggttatagccggcgttttgtcataaataacgaaaattgtttcagcatcgacaacggttcaggaggacgatatggctgaggacaaggtctacctgctgacgcaggaagcatacaacaagatgaaggaagagctcgcccatcgtgaaggcgagctgcgtgaggaaatcgcgcacaagatcgccgtggcgcgagccgagggcgacttgtccgagaacggcggctaccaggccgcccgtgaggcgcagagcaagaacgagggccgcatcaccgagctcaccgtcaagctgcgcgattccaagatcatcgagaatgccccggaaggcaccgtgggcgagggctctgtggtgaccatcgagctcaacggcaacgagatgacctacgtgctcggcagccgtgacatcgtggccggcaccgactacgacatcatgaccccggattccccgattggcaaggccatcgaaggtgccaaggtgggcgacgtcgtttcctacaccgcaccgaacggccgcgagctgtccgtgacggtcaaggccgccaagccgctggcctgagttataagtgactagtatgcccccgtaggcgggggcatacttatatgtcgtagcgtttattgccacagcgagacgatcaccatgtagatggccaccatatggcaggcatatccggccaccgttccgcagtggaaaatctcatggaagccgaagacgcgaggccaagggtcgggcttgcgcaaggcgtagacgatggcgccgaggatgtagcaggcaccgccggcgcacagcagcaccaccacggctggccccgcatacggcgaattccagaacatcaccatataagccaggccgtagatgccgaagatgatgtacaccaccgtatacagccagcgtggtgcattgatccagatcacatgaatcacgatggcgatggccgtgcacgcccacatcgatatgatgatcacattgcgccagaacggttccagcgcaaacgaaaccggggtatacgtgccggcaatgagcaggaagatgttgacatgatcgatacgccgcagcacatcggtgacgcgcgggctccaatcgcccagatggtagcaggccgaattggtgaacagaatcagcgacgctgtcatgaacacggcacacgcccacttcagactcgcgccatgtgccaggcatataagcacgatgcctgccgccaatgacaggggagcggcaatcgcgtgaatccagccgcgcatcaacggctttggtcgtccgtgcacgtcgagacgaatcttgcgttccacttccgcaggggcaatgccctcgattttcagcgcacggtgctccgctttggcgagcttgtgccgggccttctcctcggctttggctcgaatggcctcggccttgaactgggccttggcccgtacggcatcagccttggcctgcaacgcctgttcgcgcgcctcgatagccgcctgacgcttggatgcgatggtggcatcctctgcaatcgtcgcgctgttatgagcgtcgtgatgcatcgtcttttccgcgtcgtcggttgttgatgccatggtgatgcccccgtttcacgagttgacgatacgcttcttacgctgccgtaacctacgttagcgtaacttttatgcttgtcaataccgactcacacgaacactatcacccaatggtggcgatactatggaatccgaagatgagaacgtcacagcaataaggggttcggtgatggtgtattgcacggagtgtgggtttgccaacgagcaaggaaatgccttctgttcgcagtgcggaagcccattggagcagcccgaggccaatccggcggcccctgcctatgacgataacgcgctgacgctggtgaagcagccggcggcgccgttgcccgccgtcgcgccgccaacggcgccgggttccgcggtgccggggcctatggcaccgggacccatgaccgctggccctgcggcacctgcttctcctgaacctcccgccgggcgtcctggcggcgatcacaccaaagcggtggtgattgtgctcatcgcgctgatttgcgtcgtggcgttggtcatcggcttgttcgtcacccatagcatgggattgtggggagctcagccgcaggcgcaaacatcggtacagtcgaccgggtccgatgcgtcggattccgccgatgatggcacgacggattcctctgacgccaagtccaaggccaagaagaacacgtctgatagcgccaaagacaagaacagcgacgattcgtccaagaaaagctcgacggagaagtcgaagccttccactccggtgatcacatccagccagttgtctgacatcgcggattcatactcgtcctccgatgtggccgtctccgccatggtcatcgatggaacatacgccgattcctcagaggacgccaccatcgcgaccacgtcgcagtccggcaagcaattcgtggctgccggtctctatctgccggtctatcttgcggcccaggacaatggcgatgacaacgccaaagcgcaggcaaacgcgatgatgggttccatggacaacaatgccggcaatatggcggccgcggcggtaggtggctggagcggcgtcaattcgtgggcatcttcgcatgggtataagggcacttcgttcaaccgtgatttcggcgatgtggcggccagcaatgccggttatgagaattacggttcctcccgcgatgcggcccgcatgctcgccgcagtggacgccaagggaggtgcgtcattgatgaacgtggacattgcttccgaaggcgtaaccattccgtccgacatgatcgtgcatgcccaccgaggccaaggcatccaggacacctggaattacttcgccatcgtcgaagccaatggtcataaggccgccgtggccgttgtcacccaatatcaggggcagtcggtggccgcggacctgatgagccgggtgctggccagtgttgacaagacattggggcagtgacggtggctcggcataccaagcatagtagcgacacgcgtgcaacaggcagcgtcgtgggattgatcctgatcgccgccctgatcgccgctttggtaatcggcgtcggtggatggatgtacgcgcataacggtctcggcgcatcgcacgccaaaacatcgcccgtcgcctcggcatcggactcaccggcaacagcgtcggcatcgtcgtcaacggcgtcatcgaaacacgaacaacgccctgtgcatgacaccttggagcgcaaggcggcacctgctcccgacctgaccacggtggcggaagagaagcggatgtcagatgtgtcctcggcggtcacggcagctgtggccggcaatggaggcacctggtcggtgtatgtcgaggatctggccacgggcaaaaccgtgagcgtcggcggccagcccatggtggcggcttcggatatcaaactgtacgtgatgcttgccgtgtacgataagcaacatgccggcaccttggccgcgggcgggcaagataccacctcgctgatcaaccagatgatcaccgtcagctcgaacgctgccaccaatcagctggtattgatggtcggcgatggcgacatggccacaggcatgcaacgggtgactggtacggccgcccgatacggcttcagctcatccaagcagttgcgggtgttgtccgatgccggcacagacgggaccggcaccgagaactggacgtcggcttccgattgcggcagattcctcgctgcattgtaccgaggcaaactggtttccgccgaagccagccgctccatgcttgacgtattgctcgggcagacgcgacgcgccaagatacccgccggagtaccgtctggcattcaggtggccaataaaaccggtgaactggccggcgtggaaaatgatgccgccgtggtgtggggcaaggccgcggacggaacagaacgggattatgtgatggtggttatgacctcgggagtggtctcgggaaccgcgcagcagcagatcgccgcattgtcctctcaggtgtatgaggcgatgaccgcctgaacggcgggcagccgtgcaacgcgattggtgcggtattgaagatgcgatgtcgtaatagtcgtcatacttgcccgtgtggcttgccgcaatggcggcgacgtgtctgcgtatgataggggcatggctgatttttcacacatccttgcaacgcgccccgacttcgacgacgaggaccgcgagtggctgcatcatctcgttgccgattggcaggtgatcgccgatttgagctttgccgacctgctgctgctggtacagaacggtgacggcaaatacgtggtggccgaacaatgccgcccatccaccgtgatgacgctacgggcggaagacgtggtgggaaacgtcatgccggatgacatggtcggcgaattggacgccgccatgctctccagcgtggtgttccgctccacggtattgagaaccgtgggcaaggcgaccgtctgcaacgtgtacgcgccggttcggcacaatggcaagaccttgggcttggtcgtgcgtgagaccaatatggccacacgagaatccaacggtcgatatgagtcggaaagcattaacgcgggcaaacagctgtacgagatgattccgcgaggccagttcccctacaaggattcggtgatgagccagcgccatatcgctcgcgtggcggacggcttcatcatcctgaccatggacggcgtggttcgatacgcagccccgaacgccatcagctgctttaggcgtctcggcctgctgaccaccatgcctggccattacctcagcgaactcggcacacagctgttgaaggagaacgaccccgttccggaaaccctgccgttggtgctggcgggcaaagccgcggtcgactccgaactcaacgccaaccgttccgccgtctcgatacgctcgctgcccttatatgacaacaacggtcgtatcggagcgattctgctatgccgtgacgtcaccgagctgcgccgtcgtgagcaggagctgcagaccaaggacgctacgatttccgagattcaccatcgtgtcaagaacaacctgcaggccgtctccgcattgctgaggcttcaggctcgtaagaccaagtcggatgaggtcaagaaggaattgcaggaggcgcaacgccgcgtgcagaccattgccatggtgcatgagggattgagccagaccgccgacgaggtcgtcgacttcgacaaggtgattgccaacctgctgcgtatggccgtggacctagccacgatgaaagaccagcacatcgatatcaactacatgggcaagttcggcatgatgcccgctcaggatgccacgccgctgtccctcgtgctgaccgagctcatcaccaattcggtggagcatgggttcgaaggccgcaaggatggccatatcacgatttccgtgggccgctccggcccgaacctcaatgtggtggtcgaggatgacggttccggtctcggctccgaagaacagggaggattggctcgttcttccggttctggtttgggcacgcagatcatcaacacctttgtgaccaatgatttcggtggttccgtgcattgggagccgcgccgcgaaggcggcacccgcgtggtgcttgatatgaagctcagggccgctcaggatgagtgatgcgaagcccaaaaataaggaaaccctcccaagtgggagggtttcctagtatgacgaagcgataatcaaaacatcagatttgcatctgcatggcctgagaacggcgggcgcgcatggcgcggcgcttcagcgcacgacgctcatcttcgctcaagccgccccacacgccgtaatcctgattggtgtccagagcgcacttcaggcatgcatcaatcaccttgcaggtgcggcacacggccttggcctcctcaatctgctgataggctgcaccggtgttgcccaccgggaagaagagttccggatccttgtcacgacatgcggccttggctcgccaatcaaaagcgctgctcattgcttgcctcccttaaaagccccgtggctggtgttgttccttaagtccagtaccaaggtaaccacgaaccgtggtgattttcaagaggtttcgccgagaaaaaaccgaagttttcacgaagcgcactgcaccagacatgccgatgtgccctcgatgagcacggcccggcccgcgttgtcggcatcgatatgactcatcgtatccaataggcgagcggggactccggccataaggtcagacgttcgttccccgcacgggaacacgattctggtattgcaatgctctggtatacgtatcgggcgaatcgtgctgacggcgaataccacgctgacggactcatcggccaacgcatgtgtgaaagacagcgcctgctcgtcggtgcggaatgggtcgaacaactcatcggcgtcgtcgacgaaccacacgatatgcggaggcggtggtgcatccgagctggcatacggcgtgcagcggccgttgcgaagccattgcgatccccatacccggcgatgcggggaactgacacgtaccgccaagccatcagccatgctggcgtgtcgagccaatgttttcagcaacgtggttttgccgcgcccctgcgggccgatgacaccgatattgccaccggtgagggataccgtcgcttctcgcaggttgatgccatcgtcggcaagtccaaatcgaatgcgttgcggtgcgtgattggccacagtccggtcttttacgtgccggggaagtggcgcggtaaacagggacggctgcggcgggctcccgacgaaccgcgatgcgaacgcgatctggcggcataccgcatcgatatcgcgcgccgttgcacagcggaatgccgtcacctgttcggaatcgttgcagaacgccgcaccgggcattgccggactgaggtcggcggcacgaccatcaccaagcagctcgcatgattgcagacggtcccgaacccgtaaacaaatgctgacggacatattcgccttcatatcggcactgacctgacccatcggattctgcgtacaggcgatcagatacatgcccagtgacctgccgagcgaggcaatacgcaccagacgattcacataatccgggagctggtccttcagggcatggaattcgtcaatgaccacgatcaggcgcggtggcggattgaccatatcacggatatcggaagcatggacagcggcggacagctgttcacggcgtgtcagttcggcttccagcgcacgcaacgcgcgtacggcatgcgccagatccagatcgcatacgctgcccacggtatgcggcaaccgttcgagtttgcggaacgcggaaccgcctttgaaatccaaaaacacgaaattcagatgctcaggcccgttcatcgaggcgagcgccagacaccagctttgcagcaacacggatttgccggaaccagtggtgccggccaccagagcatgcggcccctgacggttcagatcgagcctcagcggctcgcttccggtcatgccgatcggcaccgcaaggtcaaggggttcaagccaatggcccacaatggtgcgccatggcaggcgtgcgaagtgcagcagcgattctatcggctgcgacggcgcatgacggaggtctgcggcgcgggcatcggcatcgtccgtgataccgatatcgatcgttgcctgttgcggggcgggggtcttctccgggcccggaggtggggggagcgtcagcagcagggacacgagacaggcgaatatgcctggcgtgatcatggcggcgaacagccattgcccgtgcaacagcagtatgaccatcatcagtgcctgcgcgatcatcgggcacgccgcggcaagcatggtcaggcgggcgcgcaatggcggcgcgcccaaacggtgcttcgcccgggatacggcggatgccgtatgggcggaatgtcgcttcgaatcgttctgctgtgatgtcatgcttccagcgtgggggagcgcatgccgaaagcgcaagccgaatcaaggtatgtggttctagcttgccgagttatccacatgacattttgcccgtgcatgattggctgcgtgggcaacggcggcgatcatgcgccgacgatgaagccgatgggctccgggaaagcgtcggtcagccttccgccagattgcccacggcgccggccttatgcgtgccgtcggcaagctgattgaacagttcggtgttcctggcgtcatcgagcagcaccgaggagccaacgccatcaacgtaataatctgggtcggaccagtacacgctgccggagatgccattcgagccggtggcgcttttgaacgccaacgccatggtgagcaacgtgtaagggttggttttttcatccacggtgagtgcgctcatcgcggcattggacactgccacgactttggacggattggtcagggtcccactgctggaagcctttttgacgatggccgagatgacctgccgctggcgttcgttgcgtccgaagtctcctcgcgcgtcggcgtatcgcatacgagagaaggacaatgcagtggaaccatccgtcgtatggcatcccgccttccagttcagtccggaataggaatcctgaacatcctcgtcatagcacagttcgataccgcccaaggcgttcaccacgttctgcagaccgccgaacttgatctgcgccacatggtcgattttctggccggtaatctgctcgacgttgcttaccaaggctttcttgccggcaatctgcgccaccgcattgattttcatgtactggtcatcgacgttcataagcgaatcgcggggaatggaaatcagcgaactcggcccgcttttaggcttgatcagcaccagaatcgtatcggttctgaagcctgagatattgtccacgccgccgtaatcggtggaaccgtctcgctcgtcggagccaagaatcagccaggtcgaggccggcgtgttgggggtgtcggtcagccagtcgctccggttcagtttgctgtccacccattgccaggcaccgaaaacagaaagaatcaacgccgccaccagtaccgcaatcgcgcataagatgatgcgcaaggcgcgcggccggtgtgccgttaccgttttcgccgttgccgccgccggccggccaagatggctgaacttcgtggacacgtttgctgctggcgatgagggccgggaaaccgacatatccgacggattgcgcacggcgttgcgggataagccggaagacatccgcgctcgcgacggcggaatgctgcgcggtgcggcggcatccggagccgtgctgcgggtggcacgtccggttttcggagaaaaactgggcggagtccgcctgccgttgtccgtgacgttggcgcttgccgtggcgttggcgttcggttgaggctcttcgatgtcatttcccgtgacggacggacgggccgatggagcctgacctgactgacgtgaggcgcgggcaggggcgaaggagcgtggcacctgcccggaaggtcgggtgcgtcgatttcccgcaggaatgaagcttggcgggttgatatgcggatccgccccacctgattcctgcgtcataacccctcctgaaactgtcgattgtctgaatgacactttgacacagcatccgccgggtgttcctgcgctatggtgttcctgcgcaggaacggcacaatatcatgtgcaacggcatcagggcatcgtgtccgcgccatagcacacagttccataaaaatgatgtaatgacacgagaaagaatttgacaaaaacgaaattgcatgtgtgtaatttagtccgtatgaaaagctcaataggcaaggagaatcgcatgtggggtgtggtcgacgattcagccgaagagccatggcatgaattgtggggactattccgacctgatggcgatgtatcttggcagcacaaggcgttgtgcgcgcaaaccgatccggaggcgttcttcccggaaaagggaggctcgacccgtgatgccaagcgtgtgtgcgccaaatgcgaagtgcgtgaacaatgcctgaaatgggccatcgaccatgatgagcgattcggtatttggggcggcatgagcgagcgcgaacgccgtcgatataagcgagagcaccgggagcaggcgtagctccacacacacccccttcaagtctggtgcgtacactgggagtttatgagtccgacaggtaatagcgatattcatgaggcgttggccgacgccatgtcttctcgaccgtatacgcataggcaggatgtggataccggcattacggctgtgatcaccgttgaggaggatatgcgtttcctccggtctacattgcgttcggtattgacgcagaatgttcttccgggagtcgtcatcatcgccgacgcgaccgggcgcgccggttcgaggataaccacttcgttcgaggtcattccctcgccatcggggccggtaatggaggtgccgcagtccaagcatgtgaccattcacatcgtttcggccaagggcgcgcgttccttcggcgatgcggtcagccgggcgttggatcgggccgatttggatgacgctccccgcgcattgtggctgctccatgatgattcccgcccctcggatgcctcatgccttgaacgattgcttgaggcgtggcgcaatacgccgggtgccagcgtgctcgggtgcaaacagtgtgattgggaaggatcccacctgcatgatgtcggtatgtatgcaggccgacacgccgtgcattccctggtggtcgatggagaacccgatcaggagcagtatgacgggcgacaggatgtgttcgcggtgtcgctggcgggcgcgctggtgtccatgtcgcaattcacgcgactgcggggcatcaatgcctggctgaccacctacagcgaatcggtcgatttctgccgccgtgtctgcctgagcggcggacgcgtggtggtagtcccgcaagcggagatatcacatcgtcgcgcacggtatgagggcattcgtacgcgaggcggggagccgcttaaggaagatcacacggtcaatcatgcgatgacggtgcatcgctcccaacagcgctatctgtacactgacctggccatgtcgtcctggattatcgtctggctgtggaggctgattcgcagttttggcatggccatagccatgatgttcggcaagaagccgtatgaagcatgggtgcaattgtgcctgccatggttggctttggccgatatcgcgggaaacatgaaatcgcgcaggctggtggccagacagtcgaaggtcgccgcatcgtccctgcaggttttgttcgccgacagtcggcagatcaagcagttccatgatcgtcgggatgcattccaatcccagcagggcagagtgctgctcagtccgctggaacgtgcccatctgcggacacgcaccatatatcgctggagcgcagccgtggtgatggcgctggtgtgctttgcggccatcgtggtgatgtattggccggtgttccgttcgatattctccggtggatcgttgtattccgatgtgttgctttccaccggtgccagcttcactcaactggtgcagtccgccaccacgccatgggtgtttggcagcggcaccggcattcctgcgccgcccacgccgtggctgctggtgctgatgctggcctcgctggtcacgctcggccatgtgaccgccgctctggcgatgatactgtttgtggccgcgccgctgagcgcattgtcgttctgggcgctggcgggcgtattcacccgctcggacgtggttcgtgtgctgggaggactgttgtgggcatccaccggcattatgttcggctggtatgcgcaggccaatatgccgatgctcaccgtaatggtgttcctgccggccgcgttcgcattcgtgttccgtgccgtgggcatgtaccataccgaagacccgctcaagccgcgcacatccgttcaggccgcggccatcgccgcactgtgcttcatccctgtggtggccgccgaaccgcagctgctgttcgcgctgatcgtcgtgttcctgatgttcctgctgttcgtgcgccgcaagcgcgccatgctgttgcttattccggttcctgccgcctttgcggtggcccctacgctcgtcaatgcggtgcgttacgccgatttgggcatgtggcgtcaactgttcggcgacatcacagtgccaacgtcatccgccaacgggtcgccggcgtcgctgagcctgcttgaggccgcacagcgtgcgctgggatggcaaatgggatcgactgagcatgccgatttggcggtcactgtgctgttcggcgtcatcacgctgctcgctcttgcttcgctggtgctgccgttcgcgttgcggacctcgcggctgatgtgggtggtaatcgtttgcggaggcgcgctcgccctgatttccagccgtgtggccatagccgtggatgccgatggcgtcgtggccggttccgcacagcctggcatcgcgatgatgatattgggcttccttgcctgcgtgtgcctcgtcgccggtggggcggtgaagcgattccaaccgttgcatgcgtccggcagcgatcccgcaccgaaaagggaccgtctgcatgcgctcatcgtgtctggccgtgtggtgcttgctctgatactggtgtgctgcatcggcatccaatgcatgtatggcatcgaacgtcataaggatgcgggactgggcgtgtccgaaaacggcctgcccatggtcaccaccgattatctggaggccagtgccgatcatcgtgtgcttgccgtgagcgcggagacccgcaacatcgtcaactatgcggtgatgcgcacctcgcgcggcgatctgatcgacagctctccggtccagcgggcgcgcctgctgtccggcaagcatgatgcggttgacgaacagctggcccaggcctgtgcctcgctgctgtccaatcccgacgaagaggccatcgcggccatcagcgcgcttggattcggcggcatctacgtggttcccgagaccggcgattcctcgaacgacatgccgtatgaacagttgagcgcgaatatcgccgcatcgaacggcacccagtccctggtctccacggatagcggcagctactatcgtctgacgctgcgtagcagcacctcacagcaggtggatacctcatggcagcaacgtgcacagcatagtgtctggaggcacgcctggctgatatgcctaggtgtgatcacggcgttgtactgcttggtcgccatgcctcgcagacgaccgtcctacggattggaggagcaggcatgagcaacacaacttctggtttcaaacgtgcgatcggcatcgtgctcggtgtgatcaccatgctggtgttgattgcgctgttcgtcgttctcgtcatggcccccatccccaatatctgggtggacaaggtggccgcttccgataatgccatcgaccagacagttagtccgacccagtccgaaacctactgcccggcacctataggattggccgataccggcacgtacggcgacagcgccttccaggccactgtcggcaatctgagcacacaggcgcgctacgcggcgttcggctccgtctacagcgccactgtctcggcgatcgggcaaaagtccagttcagatgacgtgactttgaaagacgccgatccgaccgacgattcctcggtgaaaaccggtgctcagaagatcgatcagggagctcgcctgatcaatacccgtatgttgcaggccgcagctggcaccggcaccgtcggcaccatcgcatcatgggccgatgacggcgatgtgagaggcgtatcggcggcatcctgcgtatcgacctcgctcagccagtcgttcttgctctccggcggcacgaccggtaccacacagcagctcatcgtctcgaatccctccaccaagccgaccaccgtcgacattgccgtctggggttccgagacagccgggaaaatggcattgtccacacaatccacgctgtctgtgccggccgagggggagtcctcgatggaactgtccgccgcggtcgatgggcagcatggtctgttcgtgaccgtttccagcaaggagactcctatcgcgtccgtggtacgtacggtgaccatggatggtctgacaccgaagggttctgatttcgcgctgccgctgccgaccgcctccaatgcgtcggtggcgccgtccatcactgccggcgatgcggtcaccgcttatctgttcgccaaggcagacaccagcaccgggctgtcatggattaccgacaaaggattggttcccgccaaagatgccaccgtcactgccgataaggtgacggcgatcgacttgggagaggctcctgatggggcgttgggcgtgatgtccaccgcagaggatgccgtgtcgttctccgtcaaggccacacgctccggtgactccggccaagccgatttcgcattggtcaatgccggcgagccatccgaattctcggggttggcccttcccgacggagtaaaggcctccatcacgctggccaatacgtccaatgcgcgcaggacggtcaccttgcacgcctacgatgatgccggtgcttcggtgacctccgaggaaatcacgctggatgcgaacgcggcgcaaacgattgagaccggcaaactttccggcgatcatggcaccgcggtcgtgctgatgttggaggactcatccaagaaagtgagctggggagcgcgtttcagtcacgattcgttgcaagacaaggacatcgccggattgtccgccatcgacgcttcaacgctgatgcccgccacggtccatgtctgggctcggaacgattcctccatcgtcaagtagagcgcgctcgccgaagcatcggtctgatgatgtttcggcgccgatatagctgcgggggccgtgccactgtcttacttgaagtggcacggcccccgcaatactgtcacaggccccaatcggggtcgatttcctcgggcctgcgcccatacaattccgctatgcgagccaccagctcatccctgacggccaactgcaattcgagcttggtaggtgcctcggtctgcaacggcatacggtagagcacgactcgtgcgggaatgccgtggctggcggggaagcactgggacgtcatattcggctcggtctgccaaggcgtcggatccgaaggcggcacatcctccaccgcgaactggagcggacgtatcagttccggccacgcttggccgagcctgcgaacctgggccgccaccatatcgtcgaacatgccggtgcgagtgcggtaacggggcagacgggtgccgaacatcggggttcgtgtgccgcgaccgtggcggttgcggtagattcgtgcgttccaaggtggctgaagcatggttcccaccataggacatggcggaggcaacatgcgttaggattggttcattggctgtgaacattcgtcaacgagggaggcgcgacaaatggtggtacgttcgtggtccgaacttgatttcgataatgtctgctccaacgccaaggtgttcggtttcgatttggacaacacgctggccagctcaaaacagccgatgaggcccgcgatgatcgaacggttctgtgcgctgctcgaccatacggtggtggccctgatctcagggggcggcatggcggtggtcacctcacaggtgctggatgtactcaccccgaatgccaggcgcggcaatctgcatgtcatgcctgcctccggctcccggtattaccggtgggatggcacgcaatgggccttggtgtatgcgcatgatctgtccgaagccaccgtggccgctgtctcggaaagtcttgagcgacatgcccgggaactgggattgtgggaacagcaggtatgggggcctcgaatcgagaacaggggcagccagatcaccttctccgctctgggacagttcgcacccgtagcggccaaacaggcatgggatcgcgataacacgaagaaacaggcgctggtcgaagcggtcaaggccgatctgccgcacatgcgggtcagggccggcggctacaccagtgtggatgtcagcgaatgcggcatcgataaggcctatgccgtgcgcaagctgacgcagacacttggcatacaggccgatgaaatggtgttcgtgggcgatcgcatgacgcctacgggtaatgactatcctgcggttgaggccggtgcgatcggtgttcgtgtggagaatccgcaagacacggtacaactgctggatgcactgcttgcgcgattcgatactccagcttgatggtgacgcgttatggacaggccgagcgtatacaagtggtggcatgcgatgtgggcacaggcctgcaatctgctgtttccacgcggctgcgctgggtgtgacgcgccggatgaggtattgtgtgcggcatgtcgggccttgttcgcacaatgccgggagcgggatacagacggtggtggcggagcccgtatatggtccgcatcgatttaccagggagcggcgcgtcgtgccattctcgactggaaggaccacgacgataccgagcttgacggccctttcggccgcatcatggtgtcgctgctgaacaagacgccaatatcatcatcatgcttggggcatcgcgtattggtggttccggtgccgtcatcgcgggcgtcaatgcgccgaagagggcgtgcccatacggcaccgttggccaaatcggtggcaggggcattgcgtgggtacggtgtcaatgcgcgaccatgcaatgccctgagctcctccaccaaggcacgctccgtgcagcagacctcttcggtacagcgtgcccgtcgtatcaccggtcatgtcagggtgaagcgtgatctcataggccatggcgacgcggtgcttctcattgatgacatcgtcaccacaggtgccaccgtgcggcaatgcgttcaggtgtttcagcaggccggcaccaaggtggtgggcgtgctggtattggcggatgccgtggcgcgacggtccgatgacgatatcaacgggtgaatgacatcggtgacgatgccccagatagcaggcgaagcgccgttgctcggcatgtaatcgggatatcgaggattctcggcgtgcaatatggtgatgccggcccgtgaaaccagccgcttgatggcgatttcatcgtccatgacagccgcaaccacatctccggggactggtgccaacgaacgatcgacaatcagcagatcgccgttatgaataccggcattgatcatggaatcgccggccatctgcatgacaaacagcgtggtgtcgtgcggcatggttcgtgacttggattgctgtgtcatgctgtgcctcccaccctgtattcgaacatctgttcgaatacagtatacggtaggacggcggacaatatcagcgttcggcgacgtgatatttaggcaggatgatttcgaaatcggcgcctcgcgtgtcatcgaccactttgacggtgccgccgtgcaattgggccgcccaacgtgcgatggacaggccaaggccggtgccgcccgactcggtgccgggacccgtcttgcctttgacaaagcgccggaagatatccgaacggtcggacggtgcaatctgggagccgaaattcaccacattggtcacgatggtgccttggctgtcatcctcatgggcatcgaccagcacggtggtgccgtcggccgaatgcttcagtgcattggcgatgatgttggtgaacagctggcgcaggcggtcctgatcgccttccatcgagatgtcggccggcacggtgacgcggatgtcgtgggcgtggccgccatcggcgatttccaacggctcgatggtctcgtcaagaaagtcggcgaagttgaacttttcgatattcagactcgccgcaccggcctccatacggctcaaatccaacaggaaggcgatgaggtcggagagacgctgcgtttgggtgaggatgctctccagattggcgggagtgggctcggtgacgccgtcggccatgttctcgaccatcgcctgcaaagcggaaacgggcgtacgcagctcatggctcacattggctatcatgtcgcggcgcattttatcggcatgttcgagttcgccggccatctcgttgaacgagcgagccagctggccgacctcgtcatgacgatcctgatcgatatccacgcggaccgtgtaatcgccatccgccatggcttcggccacatcgcgcatctggcgtaagggagcggtgatgccgcgggagaagaaataggtgatgcccaaggccaccaccaaagtcagcggcatggcgatccaaccggaccagccgaatttcaggaggaaccagcacatggcaaacgcgatggcagtggcgataacgatcagtacgctgagttccagcttcagagaggagaacaaatcaaccggcttgacgcgaggtttcatcgcatcaagccgggattgctgttgttttttggatgccatcacgcggtcggcggctcgaaagcgtagcctacgccgtgcacggtgcggatggtatcggcgccgagcttatggcgcagcgccttgacgtggctgtcgacggtgcgggtgccggatgcgtcgacccagtcccagacctcttcgagcagcttttcgcgggtgagcaccgacttcgggcggcgggccagcgtggccagcagatcgaactcggtgggggtcagatgcacctgctcgccgttcacggtgacgatgcgctgggccgggtctatgaccatcgaaccgaagtcgagcagcttctcgttctccgaattcttggcgatgaccttcgcacgctccacgcggcgtagcagcgccttgcagcgggcgatgagctcgcgcatggagaacggtttggtcatgtaatcatcggcgcccgctcccagaccgatgaccttgtcggcctcgtcatcacgtgcggtgaggatcagcaccggcaccggacgttcggcgacgatgcgtttggtggcctcaagaccatccatgaccggcagcatgatgtccatgattaccagatcggggcgtagctgggacgcggcctggacggcggaagcgccgtccccggccacgcgagcggtccatccttcagcggtgatgcgctgggcaatggccgtggcgagtgtgggctcgtcctcgaccaccagcaccatgcgcggtgtcgtattctgacgcgctgtggtattgagcataaataaaccggttacctttcagcctgttgaccagttcagtcttccggcttcaagaatacaactcccagagccggaacggtgatcttcgccgagaacggacgcgaatgatattcgccctcgaccgcttcgaaggtgccgttgtggatgtcggagccgccgtacttggcgtcatcggtggtgaacacttcggtccacttgccgccggtgggcagcgccacctggtaatcgggccaggcttcaccggagaagttgaccaccacggccaaggtctcgcccttggtgccgatgcgcaggaagctcagcgtgttgtggtcggcatcgtcgctggtcagccactggaagccggccggatcgaagtcctggctccaaagtgccggatgcgccttgtagaaggcgttgaggtcggcgaccatggtctggacctgacggtgctcctgccagttcaggcaatcccaatcgatggaggcgtcgtgatcccactcgccccactgggccagctcgttgcccatgaaggagagcttcttgcccgggtgagcccactgataggcgaacatcgaacgcacgccggctagcttctgccagccatcgcccggcatcttgccgtacagggagcccttgccgtacacgacttcgtcgtggctgatgggcaatacgtagtgttcggagtaggcgtacaccatggagaaggtgatttcgttgtggtgccacttgcgattgatgggctcctcgtgcagatactcgagggtgtcgtgcatccatcccatgttccacttcataccgaagccgatgccgccggcggaggtgggggcggtgatgcccggccatgcggtggactcctcggcgatcatcatgacgccggggttgttcttgtacgcggtggcggtggcttccttgaggaagtcgatggcctccaggttttcgcgtccgccgtagatgttcggacgccaatggccgggttcgcggctgtagtcgaggtagagcatggagctgacggcatccacgcgcagcgcatcgacatgcaggtcctcgagccagaacagggcgttggccaccaggaagttgcgtacttcgcggcgtccgaagttgaacacataggtgccccattcggggtgttcgccgcgcagcgggtccgggtcctcgtacagcggggtgccgtcgaaacggccgagtgcgaaggcatccttcgggaagtgggcgggcacccagtccatgatcacgccgatgccggcctgatggaaccgatcgaccaggtaacggaagtcgtcgggggagccgaggcgggaatccaccgcatagtagccggtgacctgatagccccaggagccggagaacgggtgctgtgccagtggcatgaactccacgtgggtgaagccttcctgcttgacatagtccacgagctgcttggccaggtcgcggtaggtcagtccctgcttccagctgccggcgtgaacctcatagatggagaccgggccatcatgcgggttggtggtgcggcggtgctgcatccaggcgtcatcgttccactcgtaggtggattcggtgacgatggaggcggtgtgcggcggaacctcgtgctgacgctccatcgggtcagccttcatctcccacgtgtaattggcgttcaggatctggaacttgtaggtctcgcccgcgccgatgccgggaatgaagatctcccacacgccggaggagccgagctcgcgcatggcatgacgacggccatcccaggcgttgaagttaccgaccacgcgcacggcatgggcgttcggggcccacacggagaacgcggtgcctaccacctgttcgccaggcgtgccgtccacgccgcccatcggatcgtcatagcgcagcacgtgcgcgccaagcgcctcccagagcttctcgtgacggccctcgccgaacagataggtgtccatgtcaccgactgtgggcatataacggtatgggtcgtcctcaatgagcactgcgccgctttcccactcggtcctgacgcggtagtcgggaatcgtgggctgcttcttggtgccggaggccggcacggtagccacgaacacgccgttgtattcgtgggtcatcgggtattcgccatcctgggtgaggatggtcacggacttggcaagcggacgcagcacacggattgtggcggtgtcggcatgcttgccgatgccgagatgcccgccgagaactccgtgggggttgtagaattcagcattgctcaccgcatcgaggtcgccttgggcgacaggcacggtgacggtatcttccttgatcttcgtttctttagccatgacccaaagtctacgtgcgttggagtcgaaaacgctacattggcgcgtcgaaaatggcgaattcttgcccttttcggtgtgtctccgtggttgtgagcgctctcataggggcggtccagaccgcatggcataattattcgagtttttgtgtgtaagccgtcagttctcggagggtacatgtcttacaaagtcggcgatatggtcgtctatccgcgtcatggtgcagcgaaggtggaggccattaccgagcggacggtcaagggagtgacgcgcgaatatctgcagctgtccgtactctcttccgatggtttggtcatcaacgttcccgtggacaatgccaggaaggtcggcgtgcgtgacatcgtctccgcatccgaagtggccaaggtgttcggcatcctgcggaccccgatcatcgagaaagagatgaactggtctcgccgttacaagctgaacgtcgaaaagatcgccaccggtgacgtcaacaagatcgccgaagtggttcgcgatctcgcccagcgcgatgtcgacgagcacggcctgtccgcaggcgagaagcgtatgctcaccaaggcccgcgccattctgacttctgagatcgccttgtccgagaagatcgacgaggcggaagcccagcgtctgctcgacgtgaacctgggctacgagcccgctcaacccggtgacgacaagcatcacaccgccgagcccgaagaggccgcggccgatactttggctcgtgtcgaagccgagaagaagtccaagaagaagtgatttgattgttgaggccccggtcgtgtccttatgcgatacgccggggcttcgtgattcataatcgtttgctgccgttcatctgggcaatgccatcgaagggaactgcatggggtctgcaggagtgctgatagggcaaggttttgacgctcaccgttttgcgcctgccggttcaggccgtgaactgtggattgccgggctctactggccggtgcctgattcatgcagcgaggccgatgccgccaaatacgagggtatcgaaggcgattccgatggcgatgtggccgcgcacgccctgattgacgcgttgcttgccgccgcccgattgggagacattggttcactgttcggtgtcggtgcggacgcgcatggtgccggaaggcatggcatcgatatgctgcaagaagttgtggcgcatctggcatccaacgggtatacgccggcatcggcctcagtggcgatcatcggcaaccgcccgaaaatcggcacacgccgtgctgaagccgaagccgccctgtctgcggcggttggttgcccggtatcggttaccgccaccaccaccgaccatatgggattcactggccgcggcgaaggcatcgccgccatcgccaatgccttggtggagaagatataacaaagcccccgctgtgaatttgccagcgggggcaagaaaaatgaatgagattacttccgcactgtctccacggccttggcggtagcccagaacagggtggaaagcgtcacgataatgaagctcgggggggcggggaacatcgccgacagcacgagtccggcccaaatcgacaccaggcacagcacgctggcgatcaccatcgccttgaatggggagccggccagaatattggcggtggccgcaggcgtgatcaccagcgcgaaaatcagcaaggtgcccactgccggcacggcaatggtgattacaccggccataatcgccataaacgccacgttcatcagcccgatcggcacacccttggcctgtgccacctgctcatccaacgagctgaacagcagcgggcggtagatgatggccaacaatgccagcagcaatacgtcgaacacggcgaagccgatgatctggccggtggtgatggtcaggatcgagccgaagaggatcgactgcatctgctgggaggcggaactcgacaatcgcgcgaagaacagacccaagccggtggcgaaggccagtacggtgccggttgcgatttcacgctcggaaacgcgcttgcccaaagcaccgatcaccagtgcgccgcccagtgcgaacacgcccatgcccagtgatacgggcaggccgagcaacaccgcgccggtcgcgcccggcagaccgatatgggccagcgcatgggccgcgaaggtggaacgacgggcgatggtgaagtatcccatgacaccggcggccagggcaatgcacaggccggcgatgaaggcgttggtcatgaatggagcggacagtgtgtccagccattcgggatcatacgaaaagttgatggtgctcatgtccctgtattttctccatgcctgagctgcagcccgttgacgggctgtggatcggctagcttgatgttatcgattctcggcgctgttggcggcactgccattggtggcgttgccgtgctcgtgatggtgcaattgcgccacttcggctgccgtgtgcatatcctgcggctggtcctggggctcatccggcgtcggggtcacgaacatgtcaccctgcggagtggtgaccacctgcacctgtgtgccgtagaggtgggtgagtaggtcggagtcgagcactttgtgcatatcggcgtagtgcgggtgcccgtcgagcaagtagacggcaccggtcagaatcggcaagagcatattgagatcgtgcgcaaccacctggatggtcatgttcagttcacggttcagcttggccagcacgtgtacggtggcgcgttgactggccagatcgaggttggccaacggctcgtcaagcatcagcagttgtggatcgcacaccaacgcctgggcgatggccacacgctggcgcaaaccgccggatagttcggacagacggtactgcgccttgtcggcgatgccggtgaactccatcgcctcgagcgctttggctttctggaccttggtgatggggtggatgccgaatcgggtgccggtcaggcccagcaacacggattgttcggcggtgagattggaatcgacattcgccacatagctctgcggcacatatccgatgcgtttgttcatctcgcccgcaggcttgcccagtacggtcaggctgccatggcaaagcggcaaaagtcccagctcggccctcatcatcgtggttttgccggtgccgttggtgccgacgatggccgtgaccgaaccggtgggaatggcaaaggtgccatgttgccagatgatatggtcaccacgcttgatggcggcatcgctgaacacgatgcaatcggaagtttcactcataacgcccgattgtggcaaacgatgctgacaatcgttctcaatatcgtgtacggatggtggcaaccaaagaaaagggttgtgcggccatctcgacaatggtcgcacaacccttctcgtgcaaggcgtctatcggcattgcatgaatccgatgccgttgtcctttgcttctaactatttgccggagtcggtctggtcgttgccggaggcatcgccggaatcgccattggaggcatcggcctttgccgaatcctgagacgaatcactggatgtggccgccttgcactgacggatgtacttgggctccgtgctggaaccggtgctggccttggaatcgtgcgcattggcatcatccgtggcggcgccgtcggcgctggaatcatcggaattcgcgttgccgtccgtggcgtcttcgcagccatagctcggatccaccgcgtcgatgatggtgttgatgagctggttgatccaggcgttcagcgtgtcggtatccttgggcatttgttcggagacgtcgactaccggcacatcggcacgaccggcagcgccagtgatcatattggtcgcgtcactggcttcctgcgtgttgttaaccagcacatccacgcccttgtcttcgatgagtttctggaaagactgcaggtccgcgggggccggttcgccgccggaagcggtcgattgcgtataccccttgggcgtctgattcttgaacccgagatcggccatcagataatagaccacgggttcggtggctgcataggtgaggtcggagtgggatctggtgaactcggacgcccatgtttccagcgatttctcatccgcctgccatgccttgagccgcttctggaaggccttcttcttgctggggagcgcctttacatatgcatcggtgatggccgtggccatgctggatcgagcgtctttggagaaccacagatgcgggttatcgccttccatggcacccatgacggaagcggcggatacgatattcgtggtcttggtcatcgatttggtggcccaggaatcgtagcccgcaccgttggccacgatgatctgggccttggacagcttggcgacgtccgaggtctttggctcgaaatcgtgggcatccacattggtggagttcacgatggacgtgacttccacatcatcgccgcccagctcggcggccagcgagccccattgattgagggaggcgaccacattgatcggcccggtcggtgcgggaacactggtcttgttgtccggctcggtttcagtgggggaggtggctgcgcatgcggcggtcgcgaacaacaggacggcgctcaggccggctgcggcgagtcgcgtaagtcgtgtgatttgagtccccatggcacgccttcttcgtgagagcgaacgatatataatcctgacttgttccaacgatagcctatcgtttcgatagaatgcaccgaaaccacaggggagggcgttgatgtccacaaaaatcgacggcaaacgaatcgcggccgaaatcaagaccaaccttgccgagcgagtgaacaagctcaaggcgcagggcatccaaccagggctgggcacgctgctggtgggcgaggaccccgggtcgatgaagtacgtggccggcaagcacgccgattgtcaggaagtgggcattacctcagtcaagaaggaactgccggcggacgccagcttcgacgacatcgccgctgccgtacgcgaactcaacgaagatccggcctgcaccgggttcatcgtccagttgccgttgcccaagggcatcaacgagaacgcgatcatcgacatgatcgacccggccaaggatgccgacggcatgcacccgtacaacctcggcgaactggtgctgcatgtgcgcggcgacatttcgacaccgctgccttgcactccgcgcggggtgctcgagctgctcgacgcctatgacattgatctgaacggcaaggaagtgtgcgtgcttggccgcggcatcaccattggccgcacgattggcctgatgctcacgcgcaacgccgtcaacgccaccgtcaccctgtgccacaccggtacccgggatgtggccgaccacatgcgccgcgccgacgtgatcgtcgccgcaatgggttcggccggattcgtgacgcccgacaagatcaaggacggcgccgtgctggtcgacgtgggcgtcagccgcgtctacgacgaagaagccggtcgctaccgcatcaagggcgacgtggacaaggcctgctacgacaaggcctccgcctacacccccaaccccggaggcgtgggccccatgacccgagccatgctcctggccaacgtcgtggaaatggccgaacgacacgcctagagtttcctaggaaatttgggcagagttgcttgtattgtgaatatctgtatgcctgtaagggtgtgcgtataactgaatatcgagaaattatccatccactattagaaaccatatatttacatggcagagaacaacactgaagtcaccaaggtcgccatcaacgacatcggcaccgaagaggacttcatcaaggcagtcgattccaccatcaagaacttcgatgatggtgatctggttgagggcaccgtcgtcaagatcgatcacgacgaagtcctcctggacatcggctacaagaccgagggtgtcatcccctcccgcgagctgtccatcaagaaggacgttgatcctgacgaagtcgtcgaggtcggcgacacc

SEQ ID NO: 3344 - DNA, 18478 bp, Unknown
  R151_18m  MAG No. k141_16482
cgagcccggcaccggcgacgtgattcaggccgtgcgccacatgcgcaccatgaacaagcagatccgcgagctcgtggccttgcgcgacgacgaggtctacgaggccgccaagcagctggccgtgccctacgacctggccaagtacgtgcacgacaacggccgtctgcccgtcgtgaacttcgccgccggtggcgtggccaccccggccgacgccgccctgatgatggaactcggtgccgaaggcgtgttcgtgggctccggcatcttcaagtccggcgacccggccaagcgcgccgccgccatcgtcaaggccaccgccaactggcaggacgccgatctgctcgccaagctgtccgaaaacctcggcgaagccatggtcggcatcaacgaggacgagattcagaccatcatggccgctcgcggcgagtgacgggagtcgaagccggagaggacaacatggttgtagctgttgaatatatttccaaagaagagtccgcggacgtcgaaaacgtcaagcacggcgtgaccggcatcctggccgtacaaggcgcattcgccgaacatgcggcggtgctggacaagctcggtgcgccgtggaaactgctgcgcgcggccgaggatttcgatgaatccatcgaccgcgtgattctgcctggcggcgaatccactacacagggcaagctcctgcattcgaccggactgttcgagccgatcgccgcccacatcaaggcaggcaaaccggtattcggcacttgcgccggcatgattctgctggctaaaaagctcgacaatgacgacaatgtctactttggcgcgctcgacgccgtcgtacgccgcaacgcctatggtcgtcagctcggtagtttccaggccaccgccgattttggtgcagcggatgatccgcagcgtatcacggacttcccactggtatttatccgcggaccgtacgtggtgtcggtcggccctgaggccacggtcgaaaccgaagtcgatggccacgtggtgggcttgcgtcaaggcaatatcctggccaccgccttccacccggaactcacggacgatacccgcatccacgagctcttcctgtcgctgtagtcgattcgtctgccgctagactggtatccgactgacgaatcaaggagacgatctgctatgcagcttgagctgaatcgacgcagcaaggtgccgatgtaccggcagctggccgccgggctgcgtgaacagatcgtctccggcgcgatggccgagggctaccgcctgcctcccgaacgcgagctgtcctcgcgtctcgaagtcaatcgcaccacggtgttgcaggcgtatcagcagctcaaggacgaaggtcttatcgcctccaaagtcggcaaaggcacgttcgtgctgccggctgcctccgcaagccgaacaccgcacacgtcaaacagtgacttcgggaatgcgataacgcgaacaacacgatcgtcggcagaaatgggaacatcgcaagcctcctcttccggcgacgtagaacgtgctacctccactggtttcttgacgacggaccagggcagcagctctgcggcggtccatacgattcgtgaaagccgttcggttcagggcccggagccaaccgtcgtgcgtccgccatggtcggtgttgttctctgattattccaaccggtttacctaccatgacatcgcctcggccgagcgggcgcagcgcggcgacaccattattgacttcgccaccggttcgccgaacccggcggatatcccggacgatctgctgcgcaaggtgagcatcgaggcgttcgaatcgcgggaattcgacggccaaccggaatcacctatcgagggattcgaagagttgcgtgcgctgcttgccgaacatatgcgcacacgaggcgtacaatgcggcgtccgcaacgtgatggtgctctccggctccgagcagggcatcgacctcatcgtgcgcgcgttcatcaaccccggcgactgcgtgctggtcgaacaatccacgttcttcccggcattgcagaccttccgttcggcggatgcgcgcatcatcggcgttccagtggacgagcacggtatgcgtacagacctgttggacggctattgcgcgcgattccggcccaagctcatctacaccgtcccgacgttccaaaaccctaccggtaccacgctgccgcccgaacgacgcagcgaactcatcgacgtggcgcggcgctatcagtgtctgatcgtggaagacgatgcttacggcgatttgtggtacggcgggggatcatccgacgcacatcgccccataccgctcaaaggcatggaaaatgcgggatacgtgatgtatttgtcgacgttctcgaaaaccgtcacttcgggcctgcgcacgggatgggttgtggccgacccgcatgtgattaaccggctggcggctctgcggcgcatggtcgaccagcatacgagcacgtcatcgcagcgcatctgtctggaactgcttaaagaaggccgcatcgccgaacatttgcgcggtttgatcaagacttaccgcattcgacgagatgcagcaatcgcagcattggagcggtatgcgccggatgaagtgtattggaccgtgcctgcaggcggctactatatttgggtttccttaccggacggcgtgcgctctctggatgtattggaatcctgccgttcccaaggcgttacgttcatgccgggcagcgtgttcgacgttgacgaaatggatgattcccatattcgtctcaactttgtgcgcccggatgctgctgacattgataccggcattcgaatcattggcgagacgatagcacagatgtagccaagtgactggctcattgcggttgtcgagttttttgatggctgcatacccacatcgatgggtgcattcgacgaatgaataagcgaggaagccatcatcagttcgctgtggcatgcgcatagcgttgtcgggcgagcggggcagaccacgtggtcgttgcgtgatctggccgatcgagccggcatcgcattgcctctggcgtagtggcgaggtggcgcagtaacgagtcatgccatcgcgagccgatgatgcgaaatacggaaccggtcgcggccatcaacgggtatcatacatgcgggagcaacgatacgttggcgtcagcacatccatctgactccagaaagggacacgatatgaccacatcctccatttcgccggtgactactgaactggcgggcagcgaaaccggcatcacgcttgtcgttcacgccggagcgggcagtcgtggcaagcacagcacgcctgaacgcatcgcccaggccgaacttgatctgcagcgcgccctcgatgccggataccagttgttggaatccggagcaccggcgcatgaggctgtggtcgccgccatccacgtcatggaagacgctcccgaattcaacgccggccgtggtgccgccctgaccagcgatggcatcgcccagatggacgcctgcctgatgaccggcgatggcgaggtcggtgcggtcaccggcgtaagcaccgtgaagaacccgatcgatgcggcgcgtgccgtcaaagagcagaccaagcatgtgctgttcgcggacccgaccgatgccgagatcgccgattggggcgtcgcgaccgaaagcaacgagtacttcatcaccgaacagcgtcgtcagtctttggccgaggctcagtccggtggcgatgagtgggagaagcatggcaccatcggcgccgtggcgcgcgatgccgaaggcaatatcgccgccggcacgtccactggcggcatcaccaaccagatgcacggtcgtgtaggcgattcgccgctgcccggttgcggcacgttcgccaaccagtccacggtggcggtgtcctgcaccggcatcggcgaggcgttcatcaaggtggtcgccgcccatcaggtgtcggatcgtgtgcgtttcgccggcgagaacgtcgaggatgccgcgacggccactttggacgaagtcgccgcgcatcatggcgatggtggcatgatcgttctgccggcggtcggccgtggcgtggtcgcctacaacagcgagatgatgaacttcggataccgtagcgcgcaaggcggtaaggtgcagggctgattgcccccctgtattgcggcatatatcataatggccggtgtgctgcggattcttggtaaggaatccgcagcacaccggccattcatgtatgcggcaagtgccgccgatcagtgcggcagtgcgcgctacttggtgatcgtgttgtacgtgggcatgttcgtgtaatcgaactgcacgttcttcacgttctgtgcagacacggcggcgaaacgtttgaccgggaatactggggtaatacgcaacttcatcgctcctcttcctcgaatgaaactatgttccattggtatgagccagccacgtacggtattcgtgtctggcctgccacacaatgatgcagccgtatatacgggcacagcattgcgcggcagttcattgtatggaaggcatgcaaactcaatgtttccttgtccaaataaaaaaacgagcgcggctgatgtgcggcaccggtccaaaaactcatgtccgccagcgcaacgcgactacgtaccttatgccggtctgcgcgtagaatagaacggctgcgatattgggttattcacggaggaatggatgcgacgctggctgatcaatgtagccaaaaatgagacgattctcatcgtcgccgcaatactcgccctgatttcgtgtttcattgtgccgccggacgccgattacaaaagctacattcacgccagcaccatcagccagctcatctgcctgatgattgtggtgtgcggattccagcgtatcggcgtgttccgcatcgtcggttcgcgattgctggagaaggtcagcaccatgcgcggactggtcattacgcttgtcgctttgacgttcttttccgcgatgttcatcaccaatgacgttgcgctggtcacgtttgtgccgttcgcggtggccgtgctcatcatggctgggcaagaggataagaccatcctcgtggtcacgctgatgaccattggcgcgaacgtgggcagtatgctcaccccgatcggcaacgcgcacaacctgtatctcaaagccctgaccggcatgccgaccatggaattcctcggcatcatggcaccgtattccggcacggcggccgtgttgctggtcatcgtgatttccgtggtgtttggcggcaaaccggtcggcgacctgggcgacctcgaaaccggcgtgctggctcccgagcgcaacaaacaccagcccgacgagattcgtatcaccggctacggcgccggttatggcggctggcgcaccatcgtctactcgctgctgttcatcgtctgcctactggccgtctccgacgtgattcccctgtgggtgatgtgcgtgatcgtggtcgtcgtgttcctgttcaccgatcggcgcgtattcaaatacgtggattggggactgccgctcaccttctgcatgttcttcatcttcatcggcaacatgaagcgcgtgcccgaattctacgaactggcgcgctcgctggtcggcggccatccgctggaagtggcggtcggctccagccaggtcatcagcaacgtgcccaccacgattctgctctccggcttctgcgaccaatggcgcgatctgatcattggcaccaatttgggcggcatgggtacgctcatcgcctcgatggcctcgcttatttcttacaagaacgtcgtgcgccaatacccgcacaagaaaggccggtatctggccgtctactccgccgtcaacgttctgtttttggccgtattgctgaccttgagctggatcatcgagccgagtctctgagccgccgttgtgggttgggccagtctaccgcgcgtatacggtgggggagccggtcagtcggctcatggccgactgcgggatgtcgtggatgcggccgatggtggcatccagcgtggatacgccggctgtggtggctgtgttggctgcagaggtgatgctggatacgccgactgcggacgatgatacggccgcaaccatcggctgacgataggcgttggagttgcgggccagccgggcgagcgcagggcgctgcctgcggaacagattgataaacataccgcatactccttcatcgttggccggcggtcttctggccgccgtggtttccatcctgccctcccgtgcttgtattcgctatgggggatagcccctattattccctgaatctgcacgattccccctcatccttgagggtgattctaacggcaaaggaatcggcctaatggccgatgtcaatcagcgcgaagccaccagcgtgacgctgtacggcttgatcttcatcgccagcaatgaagacggcgacggcaatgtgtaagcccgacgttccggcacaatcgcccccgaagcctcgccgcggtatccgatagtggttttcgccgtcggactggcgcttaacgtcgtcacctccaaacgcaccggtcgcgatggcgaggcgcccagcccggccagtccgcgcgcgatttccaacgtcacatccaccggggaatcggaggtattgacgattttgatgtaacggcaggcgtcatccccgtcatgcccggtggcactgacatacagatgtttggcggggcgtgacgcggtctgctcgatggacacggcatatgtcgtgtcgcccagatgcgtggaaaacagccgctccacctcataattcaccgtggggttcacatgcgccggattgagttcgataagattctgcgcccaccccttagccgggatatgcgcgagcagcggtgcataggaggtcatgcgcaccacgtcggaattgcgctcgcaaccggtcaggaacgcggcctcgccgagtgccgacttccacgtgttcgcgccctgttcggtctgcggttggccggcaaaatagccgttggctgaatattcgccgaaatagacgccggcgccgcaacgcgggtaagcgtcgaatcgtgacgcttggtatgcaaaccattcgggggagtggtaagaatgttcgtcgacgataatcgcgtcaccggtggcggaatcatgtgccccggaatcggttgcggccaacgctcgcgcatggtcccagctgcgtttcatcgtcggctggaaggggaacagtccggcgctcatcacacacagcatatccgggtatcgttcgtgaatggcctcgctgatcatgtcaaacttggccacgtagtcagccccgaagttttcgttgcccacgccgatcatgtccagaccgaacggttctggatggcccatatcacgccggaccgcggcccacgagctggactccggatcgccattcgcgaattcgatgaggtccaggtagtcctgaatcacattgttgcggaaagtggccgaattgatatccatgtggcgcggatcgcggccgggcgactggcatgcgatgccggcgaacagagtgggcagcggcttggccttgaggtcctcgcacaggcagaaatactcgtagaagccgatctgatagctctgcgaatagctggaaccatccggcatcttgaacgaccacatcgaatactgttggcgtcgcgcggccagggagccgacggtatccttccagcgatattcattgccgggcgtcacaccttcgacgatgcagccgccggggaatcgcagaaacgctggatgcaacgcctgaatggtttccaccagatcgcggcgcagcttgccgtaacgccatttcgggtcgcccgcgccccaatagtccgcatccatgaactgcaccagatccagatcgaacgtggtgcgttcgccggcgtcaatggtgatacgcagcttgccgtaatcggtgttcaggccggttacgtcggcgttgaaccggtaccagccgtcacggccgatggcgatggcaccatccgacgaatccggactgatcgaaacgccggaatcctgcgcattggcaccatcgtcctgcctcagaccggtctcttccgtatcgtcaagcggatctgcgtccacgatatacgacaatcgagtggtgctggtgagaggcagaccgtacctatcgaccacgccgacggacagcttggcccgcccatgaaccggacgtaccgcgagactgacggaataggtgtggtcggcgacgatggagaacgcgggctcgcccccgttgtcgccgcctccgttatagccgaggttttccagatatgcagggccggtttcggaaggaacatcggacgtgatgcgagcgtatcggctatgtgcgtgaattggtggggcggggcagtcggtggtcacccgctggccgtgaatcccgcgtatctcactgccgaggctggcggcggaacagttgatgaaatcccagaaacgcagggaatcggcctgtgtacgccatcgttcggcgccggccatacgccacgtgtgatggtcgagatagacgccgtcaaaactgtagttgttcaccatgttggcgttcagcccgccatccgcaccatggttgatgtcctcgaagaacacgccgtacagccgcccgcttgtgtgatgggtggggcttcccacgctaatccgcaccatggttttgattgtagagggaatggagcggaaaggtaaacggaagagttcgctcaccgttcatgttgcggtcaatccaagtcgactgttcgccggtatacagccggtaccctcgaaacaggaatggaaaatacggacgactaggagcgcggctgtgcaatcctcggtgggaatacgtgagcgcatcgaccacgtgtatccgtcgctgcgtccggcggagcgcgccgtggcccagtatattcgggatcatatcgaggaggcggccgacctgaccgtcggccagatggccgacatcgcccacgtcagccagccgacggtgattcgtttcgcccgcaagctcggtttcggcggttaccgtgaactgcggtacgtgttgcgccatccgtccgccgagcacaaagtgaccttcaatccgttggctggattcgatctgaatccgtgggatggcgaagatgagattcccggcaaagcggcctatgtcgcgaaggcgctgatcgatgagctgcacagtgcgttggaccccaaggcctatcgcaaggcggtcgccctactcgccgaatcggagttcatcgatattttcggcgtggagaactcgttgacaccggcgatggatctgttcaccaagctcggctacctgggactgacatgccgtctcaataccgacgcttacctgcagcagatcggtgccgggcacctgccccacggcgctgtggccgtcgccttctcccattcgggcagttcggcggatacggtcaaagcgttgcgattggcgaaatcgcatggcgcgaaaaccatcgccataaccaatgccatcggcgcgccgctggccagctgggccgacgtgacgttgctgacgggtcgtgactcgcacacgatctatggcaatgcgattttctcgcgtgtggccgataccgcgctcgtggacatgctgtacatgggcgtgattctgtccgactacggccgtttctccaccgcgctcgacgaatccggtcgcatgattcgcgatcgcgtattcgagaactgagctgctgctttatcgtgccttgggctgtattgctctggtcgttgccgctttgttgccgctctggtcgttaccgtcctgaggcatgtgccagcgaatacgtagtggacttggcgtgcgtatgacgttcgatcttgccgctcaactccagctggtccaagagctgcgtcatctgatccttgttcaggccaagcgctttctgcatggttttacggctgagcttcacgccgcggaacgcgaggaaattgagcgtgaactgctccaacgtttgaggcgacggttccagcgtcgctgtatcgagcgggcgggtactgacctggtcgtcaccgtccgggcgctcgccgaatccactgccgagaatcagcgtctgcaatggcgcgcagccgatgatgcgtgcgccggccaaagcatctgcggcgttatccgtcatgcgctgaatcgtggggaatgaatacattttggcgcgctgcgcttcgtcagtggtgctgggcgcggcggaagcatcggtatcggtccgatgcaaggatgcggcctcggccgagaccgggatgggcagcaccatcgccaccgaagtggggcctacgcgcagttgcggactgaccgcgctctgcgcgtaggcgtccataatgcgttggataccggtaccgcagttctcgcagagccccaaatcggcgaacaattcagccaaacgcggggtgcgtggctggcatacgccgttgagcagatcgttgatttccaaaccatcggtcaggccgccgagcgacacgatctccaggcgggaatcgaagatattgatcagtgtggggccggagtacgtgtaatcgcgatgttccagtgcgttgaccaatgcttcgcgcagggctatggccgggtattggccggattcgttgataccgttcagcagggcgctggcttggtcgagctggcgcagcaccgagccggtgaatgtgtgacgttcgcgaatggcgtttttgccattgccctcgaaaatggtggccttgataacgaacgggcattggttggacagcagggtggcaagcgacgattcggtggcgctggtgaaggtgttgttggcgccggtgttggtgatgctgccggcgggggcattgccggcatcggcagagacggatgcagccatgttggtcacaaccgggctttcccaatccctgccttcactggcaaaacgaccctgtgcgtatgtgaaagtgagctcaccactatcgcctgcgacggtctggcccgatgcggcgtgatctacgttgctctccgttgtccccatatcgccgatggtaccggtgcaagccgacgttacgccgaggtgttttacacccctacggctagacttacatgagtttggccccgtagctcagctggatagagcatgtgacttctaatctcaaggtcgacggttcgagcccgtccggggtcacgatgcaataaacccttggtccctcatcgtctgtgggggccaggggcttttgagtattatgccggtctgggtccgtctggagcctgaactgtcgaccttgagattagaagtcacatgctcatcatcaccatccgggaacacccttaaggggtgcggctcctgcataacggttatacactgacttgagatgtgctggataataaccagctatcgcgcgtccgccaatggcgacgaacgaaggaagaagggcccgtgccgcgagcaatcatcgaggtaagaaacctacgcaaggaataccccgtcgaggatgagacggtggtggcgcttgatcgtgtcaatctcagtatcccgcaaggccagatctgctgcattttcggcgaatccggctccggcaaatccacgctgctcaaccagttggccggcatggaaaaaccgacgcgcggcggcgtgagaatcggcggcgtacccgtcagcaaactcgacgagcgtgagctggcggccttccgccagaagcatctcggcttcgtattccagtcgtacaacctgctgcccaatctgaccgcgctcgaaaacgtggcaatgccgctgatgttccgcggcgtgcccaaggaacagcgcgaacgtgcggcgcgtggcgtactcaaacgagtcgggctcggccatcgtctcagccattacccgcgccagatgtcgggcggccaacagcagcgcgtcggcatcgcccgggcgtttgtgaccaagcccgaggtggtgttcgccgatgagccgaccggcaaccttgactccaaaaccaaaaccgaggtcatgacgatgatctgcgcattcgcccatgacttcaaccagaccatcgtgctggtcacacacgatccgcagatggcctcatacgccgaccgcattgtcaccttgctcgatggccgcatcaccagcgatcggctcaacaccgacctttcccgcccaactgttccgtccacgccgtccgccccaaccacaccaactacaccgtccacgccgtccgcccatagaacccaaggaactgaccgatgaagcacctctcccaccacaccatcgccatcatcgtcgcgttgctctccacgctgtcactggcacttgccgtcatctcccttccgcatcaggcgtacgcggtcgacggcacagacggcacaagcggcacgaacagtacgtctcagggaaacgacggcgattccgcgccgatcgccggaccggtgcccaacatcatcatcaccaacttcgcgtatggaggtgattccgtggccgccggatccaaattcaatctcgacttcaccttccagaacaaggggcaggtggcggtgacgaacatggtcgtcaccgtggacggcggcgagagcttcgccatcgcgggaggcacgaacacgttctacgtcgacgcgctgtgggccggttacgccatgacgcaaagcgtgccgatgcaggcgctcgcctccgcgaaaagcggtgcccagtccgtgaccgtgaacttccgatacgagtatgtggacgccagcgcccgctcctcaagccagtctgacgtcaagatttccgtgccgatcagtcagcctgaccggttcgaaatcagtgatcccgtagtgcccgaccaggtgatcgccggccaggaaaacacggtcacgatggaatatgtgaacaagggcaaaggcgatatcgccaacgtcgaggccacgatggagggcgaaggtttcgatgccacgatgaaaacccagtacgtgggcaatgtggcttccggcgccaccggcacgattggttacgccttcacaccgcacgcgtcaggcgagctgaagaccacgctcaaagtcacgtacgaggattccgacggacagaccaagaccaaggaattcccgctcaccatacccgtaaccgatatgcagccgatggatgattccggcatggccgatccgaacatggaccagaacgccaatcagggattgccggtgctggtgtatgtggtcatcgtcgtgatcgccgtggtcattatcgtggtgattgtgctgctcgtgcgtcgcaggcgcaagcagaaggccaagaagaacgatattgatgaggactgggatgattggtccgaaggcaaggatgataagaccgataccggcgtgacggatggtgctgcggcagacaccgctcctatcacaccagtcaccccagcctcatcagtcgcaccagccggctcatcccacaaggcctgaaaggcccgaccatgcgattcggcgacatactgcggctctgcagacaaaacctatggcggcgtaaatcccgtacgattctgaccgtgctgggcgttatcgtcggctgctgctcgattgtgctcatggtctctttgggccaaggcattaacgagcagaacgagaagatgctcaaatcgatgggcgatctgtccatcgtcaccgtgtacaccaacggttatgccggtccgatggacgatggcggctcgtccaagatgggcgataccaagctcgacgacaaggccgtggaatccttccgcgcgatgagcggcgtatccggcgtgacgccgatgatgaacttcccttataacgtgacggccagagcaggcgcgggcggccgttacatctatgattacgtgcagatcatgggcatcgacatgacccagctcgaccagatgggctacaagctcgtcggtggcgagaaaccggtcaaaaaagaccaggtgcttgccggcgaatggttcgcctatggtttcatggacactctgaagaacggcgaacaacgcaccagcacacgtggcggtcagtattcctcatgcacgtttaaccaggccaccggccagtgcgaggaagatcaggacgaagatccgttcttcgacccgctcgccacgcaaatcagtctgaccaccggcaccaattatcagggcgaccagtacagcatgaacatgtacggcggcggtggcggcgcgggcggcgcaagcggcagcgccgcgggtcagtcggaaaacgtcaccctcgatgtgcgggcttccggcattgtggcgggcgactacaacaagggctatgccacctccgacggtctggtcatggatttgcaggcgttgaaggaactggccgccaaagtcgatccagccgccgccaaaaaagccaccgcctatgatcaagtgctggtcaaggccgccgacctcaagtccgtgcccgaagtcgaatcacagatcaaagcgttgggctacgagacctcctcctatgaagacatgcgtaagtcgttggaagaacagtcgcgcgcgattcagctgattctgggcggtatcggtgcggtttcgctgttggttgcggccatcggcatcgccaacacaatggttatgtccgtaaccgagcgcacgcgcgagatcggcattatgaaggcgcttggctgctacgttcgtgacattcgcgtcatgtttcttgcggaggccggcgcgatcggattcttcggcggattgatcggctgcgtgctgagcggactgatatcgctgggcatcaacgttgtcggcgcgttgtatgcgggcggcatgagcggcggcatgtctggcggtatggtcagcggtgccggcgggggctccggcgacggtaccggtggcggaacatctatctggaccatactctggcaggcgatagttggtggcgagaatgtgacccgttattcggtgattccgtggtggctgttcctgttcgccgtgctgttttccacgctgatcggcttgctattcggcttcggcccggccaataaagccgttaaaatcccggccctagacgccatcaaaaacaacgagtgatcgcctctgtcacctgctccaccgttagtccataacgttcgttcagttcgcccagcgacacgcggtcggtaaattccttggctgcgccgaagttcagcacacgaggattacggctgccgtccgagacatgatgattcgcatagtatgcggtcactttctcgccccagccgccttcaagctgcccgtcttcaagggtgatgacctgctggtggccatcacgcaacgactccagtacgtctgaatccagcgacgtgcactggcgcgggtcgataaccgttgccgtgatgccataatcgtcagacaatgcggcggccgtctgctccgccaacggatacgcattgcccagtccgatgatcgcgacttgcgagcccgtctgattgacccgccaatccagcatgtgacgcgcaccggcatgctgagccgttacgctaacggtcccgcggactgttgcggcagatatgcccccgctggcggagctggcggaggctggcagcgaagctgactgggggcggtcagcaatctgcccacccgtcaccggcagcagcgtcgcatcccgttccgccgccagaatcgcctcgcccggcacccgaatcaccgccggaccagcaggggcgtccgccgaaccggccggcgcggtagcccatgccaaatcagccagatagtcgcgagccgaagtcggcaccagcatcgtaacccctggaatattggagaacatcgtcacgtcatatgcgccggaatgcgtattgtccgaaccggacaagccgcccagaaaatcaagtaccgtgactcgcgaacggttcaggctcatctcctggaagaactggtcgtacgcgcgctggaagaaggacgccgtggtggccaccacgggggtgccgcccgcccgtgcgatgccggcggcgtacgccacggcatgcgattcggtgatgcccgtgtccacgtaatgcgaacccgcgcgttcgcggaattcgtgggtgatgccgttggagcccggcgtggcgggggagatgaccacgagtcctggctcggtggcgaaacgcggttcgagcgcggccatcgccattttgccgtaatgcttgcgcggatcgtccggcttgccgattgcggcatccggattctgccaatgcgaggcctcgcactggccttcatgcggttcgtgatcggacaggttgcagtgatccgaatgccacggctcgctgtggttcacgttatcggtggggtgcacgccggtgtcggagactgccggatccagctcatggacgttaccggccgaggccgagggtgcgccggccacgtaatcggcgccgtcgtatcccgcgcccttcagcgtgtggatatggaccaccaccggatggtcgatattgcgcacttcctcgaaagccgcgaccagagcggaaacatcgttgccggccgccacataccgataatccaagccaaacgcgttgaacagattcggctgggcggtgccgccggacgcgcgcaggcgggcgagcgggccgtacatgccgccgaaatcgccggcgatcgacatctcgttgtcgttgaacacgatgatgagattgccgccctgctcagccgcgttgttcagtccttcaaacgccacgcccgaactgagcgaaccgtcgccgatcacggcgatcacattgccgatgccgctgttcgggccttccatatcgcgggttttcgccaaaccgcaagccagtgaaatcgaggtaccggtgtggccgagcacgaactggtcgtgttcgctttcatccggattggtgaagccagtcacctcgctgaaacggtccgggtccagataggcgtcggcgcggcccgtgagcatcttatgcacgtagctttggtgggacacgtcgaacacgatacggtcgcacggcgagtcgaatacgcgatgcagggccaccgtggcctccaccatgcccagattggagccgatatgaccgccgtgttggtggccatatgccagcagtgtggcgcgaatctcgcggcacagttcggcgagctcgttgggagcaagggccttgacatcggccgggctggcaatgcggctcagcagatgggagtcgtcgccatgggaaggggtaatgctcggggggatgtcgtgaaggcgcgcggccccctcggcggcaccggagacggcgaaggaatcgcttgaatcaaatccgtttcctgacgcgttgcgcataccctcgaatctcccttcgctagtctttccgaagttgaatgctaacgcccggcattgtccgaggtccacatgacgaatcaatgcccccaacatctccgtaaatgggtgattcgttcgctgcgcgatgtgggacaatgaatgcggtaattccttttgataccaaggagcgcgcaatgaaggccgtatacgcatccaccgtcaaccatgacgatccgcttgccgcgttggcggtgggcgagcagcccgaaccccaggcccgcccgttctggtcgaccgtttcggtgcgcgcggtgaccgtaaaccatcacgacgtctggtcgctacagggtgtgggtctcgccgccgaacagacgccgatgatcctgggcaccgatgccgtgggcattctggacgaggacatccccggcaagcatgggctcaaggccggcagcgaagtggtgctgtacacgttcgtcggcaccgatggggcgggcgtggccccgggcgagcgccgtacgatcctctccgagaaataccccggcacgatggccgagaaaactgccgtgccgtccgccaacgtgttcgccaagcccgcaaacctcaccacggccgaggcggccgcactcggcaccagctggctgaccgcctactcgctgctgttcgatgccgccggcatcaagccgggcgactccgtgctcatccagggcgcgggcggcggcgtgtccactgcggccatccagctcgcccatgccgccggtctggaggtgttcgtcacctcgcgtgacgcggacaagcgcgccaaagcgctgaaacttggcgcgaacgccgcgctggagaccggtgcgcggttgccgcgcaaggtcgatgcggtgatcgagtccgtgggtgcggctacctggagccattcaatgaaatccgtgcgccccggcggcaccatcgccatctgcggcgccaccaccggcgaccagcccggcgccgaactgacccggttgttcttccaggacatccgcgtgcagggctgcacgatgggttcgcgcgaggatttcgcacgattgctgcgcttcgtggagcacgccgacctgcatccggtgatcgattccgtggtcagcgggttggacgccgcccccgaggcgttcgccaggatgatcgccggcgacatgttcggcaagatcgttattgagctgtaagcctcacagaattatgtattgagaacgattcgctgcgtggcttaactccgctatcaggagtacagtgggccttattctcaataactagggagtgaatgataatggcaaatgaatccaagcccgaagtcgcagtggtcatgggatcggccagcgactgggagaccatgaagcgcgcctgcgatattctcgaccagttcggagtcgcctaccacaagcaggtcatctccgcgcaccgcacgcccgagctcatggccgagttcgcgcacaacgcccgcgccaatggcctgaaggtcattatcgccggtgccggcggtgccgcccacctgccgggcatgatcgcc

SEQ ID NO: 3345 - DNA, 18260 bp, Unknown
  R151_18m  MAG No. k141_17531
ccttgtcgatcatgtcgagcgacttgaacaggttgatgatgtggatgccgttgcgctgggtgaggatgaactgcttcatcttcgggttccaacgacgggtctggtggccgaagtgcaggccagccttcagcatatcgctcatagtgatctgagccatggtattactacctttcattgtcggttcttgcctggccatgcgcacctgcgtgcagctactcccccggtttcacgagttgtgcagccgaccgacacaggccgtcgcgagcatgacgcgaatttgttgtgtgccggttgacaatattgggtggttccggacgccagcgactgcgtccgttgccgggtagcacacaagtttcgagaatagcacggagccagtactaagaagacaggttcccctccttgaggggaacctgtcgccataggcgactgaggggagttacgggcggtaccggcagaaccaccctcagtctcactacgttcgacggctcccgccagcgggagccgagtatggactacttcgcctgacgattgcgcatgtagcgcagggcttcgcggcgttcttccttttccaggcgatccaaatacacgtggccgtcgagatggtcgcattcgtgctgaagcatacggcccatcagcccggagccctcgagcacgacctcgttgccgtccaggtcgatgccacgcacgcgagcgtagtcggcccgacgggtcttgtaccacaagccgggcacggacagacaaccttcatcgccatactgctcgccggacttctcctcgagtacggggttcagaacgtagccgaccttgccgtcgatgttgtaggagaaggccctcaggctcacgccgatctggttggcggacaggcccgctcggcccggatcgtccacggtttccagcaggtcgtcaaccaggcggcgcacggccggggtgatttccttgatctcatcgcagggggtgcgcaggactgggtcgggcacgaccctgatctcacggatggccacttctcgttactcctcgttcttctcgtcagccggccggtccggcttgctgctggtgtcagcggcattgtcggcattgtcggcggaatcgccggtctcgccctcttcgggttcggccttcgacttcttgatcttctccgacacgctagcaatcgaatcagacacgctggttttcatctgttccgaggcctgtttgacctgttcggacgcctgcttgaccgattcggaggatttcttgacggtctccagcgtgctgtcgatgatcttggctgtggcaggcagcggtttgttggatggcttgggcgcatacagatcctcttcgatgacggtggcgtagcgctgcaataccttgggacgcaccactttcatgctcggggtgagcgtgccgtgctcctgactgaattcctcatccagcaccgcgaatttgcgcacggactcagcgcgggagacattggcgttggcctggtcgatgtactgctggataaaggcacgcaccgcgtcgttgtcgctggcctcggcgagtgtcatgtcggcattgaggccctgaccttccagccaggaatgcagcatttcagggtcgagctcgataagtgcggacacgaacggcttgccgtcgccgactactactgcatgagccacgatcgggcaggtgtcgatgacatcctccatcggggcggggctgatgttcttgccgccggcggtgatgatgatgtccttcttgcgtccggtaatgaaggtgaagccgcggtcgtcgatacgacccagatcgccggttttgatccagccgtcggcagtcatcgtctgtgcggtaagttcgggctgcttgtagtagccaaggaacacgttcgggccggtcagctcaatttcatcgtcttcgccaagacgcacgcccatgccaggcccaggcttgccgaccgaaccgacctcgttgtcgtcctcccaattgacgagcatcggagcggcggtttcggtcatgccataaccctggatgaaggtgatgtcatccatgccgttgaagaagtgggccaaatccacgttgagcggcgcaccaccgcaggccagccatttgaggttcggtccgagagcggaacgaatggatttgcccaccgtggccatgtagaacgaatggcgcatgcgctcgatgaacgaatggccgcggccggcctgctcatccttgctccacttgacgaagtgcttgaccgactgggcgaagatatgcccctggatgccggcaccagccttctgcgaggccgcgttatacaccttctcgaacacacgtggcacgcccagcaggtaggtgggcttgaagctgcggatatcggcgagcagtcgcttggcgtcgggaatgtatccgaccacgccgcagccaccgatgcacacgtactggatgtagcgggcgaagcagtgcgccagtggcaggaacagcagcagacggttgtcgtcgtacagcatgccacgcagaatctcgtagccgttaagcacgatgtgcgtgtaattgcggttggagagcatcgcgcccttgggcttgccggtggaaccggaggtgtagaccacggtaagcagatcatcggctttgatacgagcgatagccgcatccaacgtctcatcggatacgccatgcccgaagtcagcgacagcgtcaaggccatcggccttgaaattgaacacgtatttcatgcccggatgattgacacggatctgctcaagcgtctgtgcgcgctggaagtcgccggcaaaggcgatggcgggatcgacttcctcgacgatgcccgcggtctgacgggcggaatcggtctcatagacgggcacaaccacagcgccgattgccgcgcaagcgaaatcagccacaccccactcatagcaggtaggcgagtaaatcagcaccatggtgccggctttgacgccaagtcccaacaggcccttggccacctcgcgtacgcgggacagcatttcagtagctgtggcgccgcgccattggtgggtgttgtcatcctgccattccgcgatgatgtcatccggcgtgcgaactgctcgtttggccagcagcgagtagacggtgtcgtcatcggtggtgacatatctgggttcttctacatgttcacgcatggtcactactataggcgaaccagcctatgacacggcagaaccgtcttccgctgccagcgtaggaatcggtgtgagggcggggccgtctggtcagcccagatcggcatagatgcacatccatcgagaaccgatgaacttcagtttgaggttgactcgcagattttcctggccgatggtcatgaataccgccatttccagcgtgtccttgccggtgatcatgccgtcgatcaatgtggggacagtgggcagatagcagaatttcgctttgagctccggatgagtgaccatgtgggtgccgagcaggtattgcatggtttgcagccgttccaggcatggttttgtcatggctctgttgagatgtgcgacgctgagtttgccacgtatcgcgtccgccgatgtgcaggcgatgcggcatgcagccatggccatggaatgacattccttcgcattcagcccgcctatgaatgtgggttggatatgataccgcaccgggcgatccgacagttccacaacgatgaatccgtcataactcggcaacggcccgtactgatatgtgccgtggaaaaatcccgaatactccatgatgaccccttcaagcccccttgcaactcaccatcattggcgagcgtttgtactacaacatcacgaaaggcgcgccaagtcaaacgacttgagcgcgccttagggcaagctaagcctcctgcatggagggcaaacccccattttcaggggggtaatcgggattatcgtgcggaatacgggttgaccaccatgccgcaacgctggaagttcttcacgtcgacgtagccggtggaggccatagcgcgcttgagggcgccgatgaagttggtcttgccgtccgcctggtggctcggtccgaacagcacctgttcgagcgggccgaccgtgccgaccgtggtgcggtagccgcgcggcagcgtctgatggcgggcttcggaaccccagtgggtgcccttgccgggggcctcggtggcgcgggccagcggcgcgccgagcatgaccgcgtcggcgccgagggccagggccttgacgaagctgccggagtcgcccatgccgccgtcggcgatgacctgcacgtagcggccgccggattcgtccatgtagtcgcggcgggcctcggccacgtcggcgatggcggtggccatcggggcctgcacgccgatggtctggcgggtggcggagaccgcgccgccgccgaagccgacgagcacgccggccgcgccggtgcgcatcaggtgcagagcggcggtgtagttggatgcgccgccgacgatgacgggcacgtcaaggtcgtagatgaacttcttgaggttcagcggttcctggccagaggagacgtgctcggcggagaccacagtgccgcggatcacgaacaggtccacgcccgcgtccaccacggtggagtagaactgctgggtgcgctgcggggagagcgcgccggccacggtgacaccggcggcgcgaatctcgcgcagacgctgcgcgatgagctccggcttgaccggctcggcatagatctgctggatacgctcggtggcctgatcggccggcagcccggcgatttcgtccagcagcggggtcgggtcctcgtaacgggtccacagaccttccaaatcgagcacgccgagcgcgcccatcttgcccatggcgatggcggtggccgggctggtcaccgaatccatgggggcgccgatcaccggcacatcgaactcataggcgtcgatctgccaagaggtggagacgtcctcggggtcgcgggtgcgacgggaggggacgatcgccacatcgtcgagtgcgtagccgagacggccctttttgcccaaaccgatttcaatttcctgagacatggtttccagcctattgcccgggtgggacgccaacaaggccgtttcccacggaccggacgattgcttcaagtcgttacaaacatgcgctatgactaaatcatcttcacaccatctatcaggaggaaacatggccaaaatcaaggtcgaaggcactgtcgtcgaactcgacggcgacgagatgacccgcgtgatctggaaggacatcaaggatcgcctgatcctgccgtacctcgacgtgaacctcgactactacgatctgggcatcgagcaccgcgacgagaccgatgaccaggtgaccatcgacgccgcccacgccatccagaagcaccatgtcggcgtcaagtgcgccaccatcacccccgatgaggcccgagtcaaggaattcggtctcaagaagatgtggaagtcccccaacggcaccatccgcaacatcctgggcggcacgatcttccgcgagccgattgtgatgagcaacgtgcctcgtctggtacccggctggaccaagccgatcgtcgtggcccgtcacgcattcggcgaccagtacaaggccaccgatttcaaggttccgggcgccggccagctgaccgtcaccttcactccggacgatggctccgagccgattcagcacgtggtctacaactacggcgaagacggcggcgtggcccaggtgcagtacaacgtcaacgattcgatccgcggtttcgctcgtgcctgcttcaactacggcctgatgcgtcattacccggtgtacctgtccaccaagaacacgattttgaaggcctacgacggccagttcaaggacatcttcgctgaggtgttcgagaccgaatacaaggacaagtacgccgaggccggcctgacttacgagcaccgcctgatcgacgacatggtggccagctccctgaagtggcacggcggttacatctgggcctgcaagaactacgatggcgatgtgcagtccgactccgtggcccagggcttcggttcgctgggcctcatgacctccgtgctcatgaccccggacggccagaccgtcgaggccgaagcggcgcacggcaccgtgacccgtcactaccgccgctggaagaagggcgagaagacctccaccaacccgatcgcctccatcttcgcgtggaccggcggcctcaagcaccgcgccgatctggacggcacgcccgaagtccgtcacttcgccgagacgctggaaaaggtcatcgtcgacaccgttgaaggtggtcagatgaccaaggatctggccatgctcatcggcccggacgaaccgtggctcgacaccgacggcttcatgaacgcgctggacgagaacctggccaaggctctggccgagtaaatcatcgaacacatcgtgcggacctacatgggtcatgtcatgtcgccaactgtcatgattgtcgtgcttcatctggaatgttcctcagcacgacaatcatgacagttgttcgatacacgcgcgaaatacccctaattgttcccggatatgtggcgatttgtccactggtccgggactttttcgtatacggcctactagaatcgtgattcagtttgttttcacgcccgcttgaggaggtttcgccgcttatggtgttcgcacgccgctcaaccaccctgctcgccgccattgtcgcatcctgcgcgatggtgctgtcactgaccgcgtgcacctcagacaataagaccgttgtagatggtcaaaccacggtgacgtccaattctgccggcggcgtggccgtgttcacgccttcggacggcattacgctgaatcagcagacgccactgaacaaatgggcgaagctggtgcccgacctaaccaaggccctggtcgacgccggtttcaagaaaggcgatatcgatcatacgacgtccgactcgttggacaagcaaagccgcgccatccaagactttgtggtcgatcatctttcgaataacaccacggacgattccggcattgccatcgcgcccgacaacatgacattgctcgtggctccagtagtcgaggccgacgcttccactcgccaatacggcgattacgtcagccagaacctgagcaccaacgatgccacggatgagggagctacttctgacggtgattcttccgaagacagctcttccagagatgactcgtccaacactgagagcgacggcactgcatcggacgagcaggcgcaggccgtggaccggctggtctcatcgctcaagctggccaaggaatccggcatgcatgtggtattgctcggcaacagcatcgaggggtacaggccggacgccttcgtcaagttctcggacgcccagaccatcggcaagctacaggcggaaaagatggtgtccaaactcaagttggataaggccagtaaagacaaccccaaatacattgaggtgctgctgccatacaccgccgtggacgaaaaaggcaacgccaacgattccacgttcgcccaagaggcgttccgtggtatctggcaggtactgggctcctactatcagaagggcgttgtggaaagcccttcaggcaccttggacggcaaatccacggaaaacgattggcaagccgtggcctacgatgccgccaaggaaggctccactgcgaaagtgcttgacaagcgtctggcaaaaaccgacgggcagtccacactcacccgtattgacggcatcatcacgatgaacgactatatcgcctccgaggtcgtcaaggaattggacgatctgggatacaccggctctgccgccgatatcaatccgcagatcaccatctcgggcattgtcggcaatatcaccggcaagaaggatctcagccgcgacgcagtgccggacccgatcaaatcccctgaaaacgacaacgcaaacgactcatccagttccgatgacgatgcggataaggacacctccgcttccgacaaggaccgtgactcgcaatggcctctggtgaccggatacggcgcgtacgtctcgaacatcccatccatcgtcaatggcaagcaatggatgaccggcatggaagacagacagaccatcgccacggatatcgctcaggcctgcgccaggctcaacaagaacgaagcgctgaattccatgccttcaatcaggaactccgaggtaggcggcgtgaagaagatcccgaccatcaacgaaccgttgctggctgtcagcgccagcaatctcaagtccgcgctgatcgcccccggatatatctccttggccgatgccggtctgtgattcatactcgtcacgccgctagccgcctgcgatgcctcttccgtacggccctgttccggccgacgaacattgctgaatcatgtcggcttcagtacgatttttcgactccccgcatattgctgtgggtcaagatagtcggccgttcctcgcttgaggccccaatgcaggcaacggtcttcgcaatggtccgagttgccctcaacgatgcctacgggctgtctgcgggagatcgtatcccccaccgagagctcggtaacagccggttcgaatgttgacgtgacacctccacgatgccgtagactcaccacatctttgccagctactttgccagcaaaactcacggtccctgcctgtggtgacagaattacggtaccttgctccgcaacaagatccacgccacgatgacctggtgcccacgggttgatcggccgctcgaactgttgttcgacctgtggatcgtcgaccggccagtcgaaccgggattcgcactgattgccattgcgccacgccagatcagacatatcggtgaaatcctccaccgtgtatgccgcatctccggtcaccgcagtatccgcatgcgcaacatgctgaggcgtggatgccagtcccactcccaaggcaagcagcaggccgataacggcggccaacgcgattatggcatccatacgccgttgccgttcctgagcccgctgacgcgcctgctgacgtcgcctgctggcacgtcgggcttcgtcgcgacgccaatcaaacaacagtggtgcattcatgagattcctccccatagtgtgagtgtgatgcgattccggcttctttgccggtgatacccaccttgaggggtccgaaacaggatgtccagccagaacgacctatgtggttccaacttccgaagttatccacaatgaaatttcgcgtgacagtatcgccgcatcgtcatcatgttgtatgagtgggtattcgatgagtccgattctgcggaattcggcgcgacatgccctacacgcatgtaatttgctttttcgtggcaagcatgtaggatatgtgacttgtgcgcgagagaaatctcaaacacagcagacattcctgcgtagctcagttggcagagcatccgactgttaatcggacggtcgctggttcaagcccagccgcaggagctcacctgaagccatcggcgtgtcgccggtggcttttctgttactcattccctgaagctgcttcattcacgtgagaaaataccggtcggcggtaccacgatgcgcgccgatcgccattcaaacgaggacagtcatggaccgtcacgggttcgcccgctacgagcacttcacgattcagaaaccctacattattctacggaatctgtcacttctgcagattcggcattccggccttataccagagcaccgcgataccaacacgttctttgacatcgagcttggcaagagacctactaaccgcctttttgactgcctccagttgcattccgagacgctgagcaatttcagcgttagtcattccttcgctgaccagtgctgagacttcgaattcgcgaggtcccaatgaatcgaatttacttctgatggccagagtgtcagcattgatgctgacgttgggaacccctcggcgaatcacttcctttgtaatccgtggtgtgagtatggcgtctccatcgtacaccgagtgaatggcccgacacaggtctttagtcttaacgtccttaagcaagaatcccgaagctccggcgctcaatcccccaaacgcatagctatcctgatcgtatgtggttaaaatcaggatacgtattgaaggatataactgtttgattcttgccgtggcatcgagcccatccataacaggcatgcgaacatccataagaatgacgtcagggaggctctgcccatgtaattgcagtgccgcaagaatatcaagggcatcctgtccattccccgcctgcaacgtcatgcgaagcgcaggatctttcatgaccatgagcgaaaaacccattctggtcggctgctgatcgtccacgatcattacgttaatcatcgtttccctcctgcacaggaatatatggacgtttttgctgtggaataatggctgaaacagtccacccctgccctgatgatgagccatagtgaaggtgcccgccgacccgcgtaacttcagtcactaggccagcaagcccgaaaccggtccccttagcgcggttatctttgttcagcgttggcttaccatcatcacgcactgttatatggagttccccattatccagatgatcccatgaaaccacaattcgcgttatatttttcccatggcgcattgtgtttgtgacagcctcacgactcactcggaagcataaatcagcttgggctagatcgtctggacgccttcctgtctcggtcagaatggcggcgattccaatatcacgagcatgttgaagaatcgggtttatatcattccagctgcacagttccaccgttcctgtttttgttttccgtaacgtcaccggagatgaaagtttccgtaccgcctcgcgtgtatcacctagactttgccgagctaagttattgatactctttatagcgccttccaccggctcctgtgtcaatccctccaagccttcagtaagtgcaatgatagcggtgagattatggcccacgctgtcatgcagttcggctgcgacgtccgcccgccgacgttcttcatcgcgttcctgttccaattccaggcttcgttgctgttgagcttccaccaaggccgctcccttccgccgctgactgatgttgcgcgaccaaagagctaaaatagcggtcatcgacgcaaggagggactcgggcagaagtatatcagtctgcaaggcggggaaggtcgcaatccagaggccgcaaacgattgacaatcccgacaaaaccattcccgcaatggcacgttcagtggtcgcggccaaggctgtagacgtgtagacggcaaacaagagaggcaacatcagatatggctccgcttgaagcaagcaagcgcatagatacaatccgcatatggcacacaaaatagcgaacggcattctgatacggaacaacagcgccacaacagataagacacataggatggcgagtacggggattccccattgatgctccaacagtttcatggctgccgaatcgcccccgccatgggtgaatacgattctggtgagcatcatcacgtcgtagcataggcacagtatcggcgcgaccatgcgcgcgaccgggctggaccgccagaacgcggccacgtggccgatcaggccggtaaccgcgtggcgcttgtcgtttccggtttttgcggtcatgcgattctccttccctgggtgctgccccatccgtgttgaagcgtatcgcatgtggcctgtgctgtatggcgtgtatgcggttagatgaacttccaaagaagttttccgttgtcagtcggattcctactggttgatgaacatgaggaagatgagcatgccgccggcggcagtcaggcctgcggataggagtatcgcgattgtactgacgattctgtgtactcccgcctgttcgggataggtgacgatcgcgatgacgagcgaagcgatgaggcatacgaagtcgatgatgacgaggatgttcctgacccagcccgtcgtgtagaggtggatgccgagcagctggggcacgagcgtgcacagaaggggaaggacggccaatgcgaggctggcgcagccgccccatgtccgcccgccgtccggcggtgccggcgtatatgccggttgctggtttgggtattgggatgtgtttgccatggtcattgctccttggatgtgaggttcacggtgccggtgaattggtcgccggtgacgtagatgtagaagctggtgcctgtgacgttgtaggtctggtcgattttgccgttcgtggcgggcacgggtcgtttcgtgtcgctgccgttggtcacgaggattctgccggtgccggatgtgcctgtgatggtgccgttcaggtggatgctggccttcttgccggtgccgccgaatacggcctcctcgccggtgaacttgctgtagtcggccttgtagccgcccgtgtaggagtcgccgtcttgggtgcgtatgccttggaggttcctgtctccggccacgccgatgccggtcgagcagccggtgaggatgatcgcggcgagggcggcgatcagcacggcgatgacgcggcgcggcaggcgtatggactgttcgctgttgtgtggcgcgttgtgttgttcgtcgtgtcgttcgttgtgttggctggtggtgtgcatgatgaagcctttccatggtgttgggtggcgggctcccgcaggtgaggggagcccgtggacggttgctcagacggcttgtttggcgagccggtggaagatcaggccgctgatggcgacccagatggcggcggcggtcgtggaggcgagcatggatgccgggctggcgatgttcgcgaggtcgcgggcggcggaggcgctggtgatcagggcgagcggatacggcccggcgacgacgggcgcggccaggctcagggcgcagccgccgatggtcaggaccatcatcacgctcatcgtgcccgcgaacgattcggccttcgcgctcacggcctgcgtgagcgtcatgatcgcccacaccgacagggtcagcgggatgccgcgcagcaggaacgggccgagctgcgcgaggtcgaatccggcggcgaagcgtccgacgaggatgaactctgcctcgaacacgaggacggtcagcgccgaagccgcgagcccgtgcagcatcttgccggcgatcgccgcgttcacggtgccggcggcgttcagccgctgccagttgcggcctcgatgctcgttggcttcgacctgcgcggcgaacgcggccacaagcaccggcatgaacaccatgctcggcaggaggatcgcctgaccccagatcgcggcccaggtcacgccctgcctggcgaactccgcctggtagccggtgtactggctccacccgttgaacatgccgattgcgtcgaacaagacggtcacgatccagtaccacaggttgccggccttgcgcgtctcccagcggaacgccgcccacacggacggcctgcggcgtcccgccgcatgcgcgcggggcatcgcggcatggctcgggccggcagctggattggcagccgggttgattgccgggttcactgcgtttgcgtgtgtcatcgtcttgactccttcaccttgaccacgaccatgctgaccagcgtccagccgaggaacgccatggccgcggaggccacggccatccacgggcgcgcggcgagcagcatcgtggcgttgccgcccgcatccacggatctgacgaacgggctcgcggccgaactcaggccggccgggaacagccagccaagcgcgggtctgttcatcgcacccaggccggagcccagcacgccggcgatgacgcccagacccaggccgatggcctgcttgtcgatcatcatcgagaacatcagctggaccgcgctcgtggccgtcgcggacaggaagccggtcagggccggcacccacaccagcgcggcgaacgagccggccaccgtgaagccaagggccttcgccgcgatcggcacccacagcaacgggatcaggaagcaaagccccacgccggtgccggcgacgatgagcttgcccacgaaccgggccgcgtccgactggccgaacgacagccatgtgaggttcatgcgctccgaggtctccagcacggcgatgcggctggtcaacagggccgccagaatcggggccagcaggctcacgacctgatagacctcgccatcggccaacgcggccgacctcaacgtcgggacgggactgccggcgcgtttcatgaacgccatgcccgcccacgccgaaaccagcagcatcatgcccagcagcatccaccagaacgacgagccccgcaccttcaacaactccagacgcgccagcgtgaacgggctgccggtcttcgcgcgggggcgcggcggacggcggcccgtcgccgcgaacactgccgcgccgctcattgtgcgcctccgtccgccgccgcgaacgccgcccgacccgcagcctgccggatcggcaacggacgacgcggggatgcgtgcgcggatgcgcgtgcggcgtcggaatccatggcattttgcgcctgatgaggcgtgggctcgcggctctgcgggctttcgatcagttcgaggaacgcctgctccagcgtcttgcgctcggaggcgacgcgatagaccgcgacgccctggccgacgagctgcgtgatcagggtgccgatccgctggtccggcagttccggcaggcgcagcacgccgccatccctgcccggcagccaccggtagtcgatccggtccgagcccagcatcgccgccgcgagcttcgggtcggagacacgcaaatcgatgtgcccctcctcgcgcagactgtcgagcgaaccctgatacaacaggcggccggccgcgatgacgcccacgaccggcgccaccttctcgatctcggaaaggatatgcgagctgatgatcaccgtgatgccccgttcgcggctcagacccatgatcatctcgcgcacctcgaccacggcctccgcgtccagcccgttcgtcggctcgtccagcaacaggagctccggctgcgagatcaacgccatcgcgatgcccagccgctgcttcatccccagcgagtagtccctcgccttcttgccctcatggccggccagaccgacctgccgcaaaatcgcgggcgcggccgaacccggcagattcaggtaatcggccaccatacggcaattatctagaccgctcaaccccgggtagaagctcggcccctcgatcatcgaaccgacccggcccgcctgcaacctgtgccggccacccaccttctcccccaacatccacatatcgccgctcgtggccgaggccaacccaagcaacagcttcatcgtcgtggacttgcccgcaccattcggccccagcaaaccatacacgccatgcgccggcacgttcagattcaacccgttcaccgcgagaaaatccccataccgcttcaccagcccgcgcgtcagcaccgcactcgacgccggatcagccggctgcgctgtatattgtattgtcattatcgtcctccaaaatccgtcaccataccgtggcctttacaataaaaactcgttacgcgcgatacctcaatgaatgagagcggatgtgtactctcgggaggacattccttctgagtttgcaccgacatgcgacggaggtagggattcgaggctgctgtcaaatttttcctacgtgcgctggtatagggctttcgttcatgtccgtggccgttatccacaggccgtcctgcgtaagcccgtagcgttcgcgcagcatgtcgaacgtgtgcaggccctcgcgcatcgctgcccggtattcgtcgtcgtccgccgcgctgttgaggttggcggcgatggcgaacgcttcggatacgaggcgttccatgtcgtgcgtggacagattctccgggtgtctttctcgtccgtcatcgaggaagggcggacggttatccatcgcggcgcgccattcctggacggcgaggctgcggcttctggcatcgtccgcccagtcgtcgcgcagtcgtttcaatctcatgtcgtcgccgtacccgttccgcgccttccattcggcccattgacgccattgcccgtactgccagctgacgcgcgtgccggtatcggagcgtgcgagcccgaccagttcggggcgcgatttctccatccgcctgcatgatctctgcgcgttgatccggtcgtggtacgggttgatccacccgtcgtcggcggcgagctgcaccatgatgtgcacgtggtcgttgccgttggcggacagtccgtggcggaccgcgaccggttgcccgacacgatgctgtattttgagtcgtatgacggtcggaaccatgtggccgtcagtgccgcgctcatggaggatgatgacgaggaggcgctgcgcggattcctcgccggggaatgcgggactcagggcgaggagctcgcggatcgggtcacagcggactggcagggtgggcgctatcgcagcgccgtgctcgcgttgcgtgacgcggggtggatttcacgcttgatacccggctcgatatccgctcctggtcggacgagcccatggaacaggggcttgaagcatccggtctcgatggcgccaaggcgcgtgtggaacaggccatgagattgatcgagcaggccggggaatgtctgcgaagcgccgatgccatcgccttggacattgactcgcattacctcgcggccgctttcacgggcaagaccgtcagcctgtgcgaccagctcgaacaggcgacgaagcagaccgcagcagaaatcgaggaaatgcgtctccaggagccatccatgggatcatcggacggcaacgatgattccatgtcctttttctctgtataggctagaataatcgagtgttaaggaggcctgcaatgtcgaatctggactataaaccgcctgagccgacaaaggcgcaactggagtacgcgcgttacctcagccgtttccaagcgccgcgtggacgccggactcttttcgcccgcaccgaatcggatatcgcggctgctttccgggaagaggcggcgaaccgttcctggaacgccggtgatctcgcctcccgggccggcatcgacccccggtccgccgatgatttgctccagcggggcgaagctccgattgaagcggtgttccccgcagccgatgcgctgggaatagacatagccgcgttgccgttttccagtctcgggagcgcccggtgagggagctgcacgcctggatgggcgattctcctgttggtgtgtttctggaggattccgaggggaatgtttccctcgaatacgccaagggtgtggatatgcccataagcctttccctccctcttgacgggaaatgggcaaggaaagcccctggcaggttcctggagaactttctcccatgtacgacgttttgaccacgaccttctggccttgggtgtccgccgagctgcccatgcgcatcggcggcgtcaccggcgccagggatgtgacgccccgtcattgggagaagctggcattggaaaacgacctcgatcccgagcgggtcgtcggccaggccaggcacatggccggtctggtcctttccaacatcgaggaggcgtactcggatgtggagcctcgtatccgtgaccggatcctcatgctggtggatagtgcgaacacgaaaatcgatccgatctatgattccgtatccatgactgatgatccgatgggcatgttgtccggcctgatgccttccgccgacgagggcagacgcctctgatatcggtgccggtatgcgccgacatgcttctttgcgcatgtcggcgcataccttttttgtctatcctattcttgcggtgctgagtgagtacgtggcgacgccgtttgcgccgacgatttggttcgtgggcatggtcaatctcatgtcggtgcgtgtggtggattccacggcgttgcgcatctcgtcctgcacgagtccgccgggttgcagcgggcgagcccgcgtttcatgccccattggtagaagaccttgacgcagctgcgcactccgcgtctgccttcggtgcccatgccggcaagataaaatatgaggttgtcttcggtcacgtccgtgatgctcttgttcacgattttggagaaacggacgatctggtaccatcgggttctcaaggtctcttccgtacggctgaagctcttcggaaaaccgggtgcatcgagaggaattgtcgagacacgccgatttgaaggacaagcaaagcaggtgtactctctactcctgttgcaagaagccctacggctgcaagccagaaccgtatatcggacggtcactggttcaagcacagtcgcaggagctcacctgaacgggtaactccggacgggatgaaaattgaatattcctgcgtagctcagttggcagagcatccgactgttaatcggacggtcactggttcaagcccagtcgcaggagctcacctgaacg

SEQ ID NO: 3346 - DNA, 6334 bp, Unknown
  R151_18m  MAG No. k141_17873
gtcctactattcgcaatcggtggatatggacacggtcatgatgttcgttgtcggatttctcggtggtttctcaacattctccacggcgctcaacgaagtggtttcattgattcgccagcgtcgttttacgctggctctgggttatggaatagcaaccgtcgcggtgcctctcatttgcgtggccaccggtttcggcattgcgctgctcgccaatccggcgtaattttcacgttacacgggcggttgctgagtaacgtgaaagaaatctgagcgcaaccgcgcaagctgtttcctctcctacgttgtgaaaacaacaagagaggaaaaaccaatgacagccgtaacgtatttcacacggcatcgtcgaccgggaatcgcaatgctatgttcgatttttgccgttctctcgatgcttttcgtactccctcccgccattgcgtccgcagccggcaccgctcaagccgtggatgaatgcaatccgacatccgacaacggttgcatcaacggcattctgcaggatgccggcaaacagccgatcgccggcgccaccgtcaagttgtccggcaaggctacggcggagaccacaactgcagccgacggcaagtgggcgttttccgttgccgatgatggcgactacaccgtcacgattgacgatgccgttgcgaaagagcatggcctgaagtcgagcagtgcgacggtcacgatcaagaaagccagcttcgacaagcagcgcggcgtcatccgcttcgatcaggccgacgataccgccggcaacggcgcggccgaatcggcggacagcaagcaggggacggcggatgcagccggatcggcggacgccgcagcatcgtcagccaaaaaaggtgaccccaatatcggcaaacgtatctggcagcaactgtattccggcattatcttcggtctgatgctgggcctgatgtccgtgggcatgaacctcgtgtatggcactaccggcctgcagtctttctcccatggagaacaggtcacgctcggcggcctgatggccttcgtgggcacgcagatgctgcacatgccgctcgtggcctccgccatcttcgccgtgatcatcggcgcgctaaccggcttgattcaaaacgaaatcgtgtgggggccgctgcgccgccgtcacatcggcaccatgcagcagatgatcgtcaccattggcctgtcgatggtattgcagtacatgttccagttcttcttcggcggcgacatcaagagcatcgtcaaatccgtgccgaacagcttccaaatcggcccgatcaccactgacatgccaacgctgctttccgcggcaatcgccattatcgtaatcgtcggcgtcaccttgttcctgtacaaaactcgactcggccgcgcaacgcgagccgtgtccgacaatgcggcactcgcggcggcttccggcatcaacgtcgaccaagtggttcgcgtggtttggattctttcctgcgccatggccgccctgtctggcgtgctgctgggcatctacctgaacggcatttcctggaacaccggcgcaactctgatcctgctgatgttcgcagcggtcacgctcggcggtcttggcaccgccaacggcgcgctcatcggctcgctggtcatcggcatcgtggcggatatgagctccctcgtcatccccaatgacatgcgttacgccagcgcgctggcaatcctcatcatcgttctgctggtgcgcccgcagggcattttcggcaagcagcaaagggtgggctgattcatggacttcatgacaatcatctccaacgcggcgggcgagctgatcgccccgaccacagcggcatacgttctcgccgccatcggtttgaacattcacttcggcatgaccggcctgatgaacatgggacaggcgggcttcatgctcctcggcgcctacggattcgccatcacgcagtcgatgggctgcaacctgttcgcctcggtttgtgcggcgctcgcgctcgccgtcatctacgcgctgctgctcggcattccgacgctgaagcttgggcccgactatctggccatggtcacgttggcggccgcggaaatcatccgcatcgtcggccgttccacagccatgacgaacttcaccggcggttccgcgggcatctcgccgcaggatttcaccgaaaagttcgaagcgctttccccattgcccaacggctcgaccacgttcctgctgtggacgtacagcaacaacatcgcgaattcctggtggctgcgtatcgtggcttggattttggttgcgatcgctgcattcctgtgctggcgatggtttcactcgccgtggggccgtatgcttaagggcattcgtgaggatgagaatgcgattcgttcgcttggcaagccggttacgaaatacaagatggaatcgttgattttgggtggattgttcggtgcgatggccggcatcatcttcgtcctgccgcgctccgtacagcccgattcgctcggccgtaccgtcaccttctacgtgtggacgattctgctgctgggcggcgcggccacgattctcggtcctgtgctcggctcctgcgtgctgtgggtgctgctcaccttcgtcaaggaggttatgcgcaacaccgttcccgaaaccctgatctcctccaatcagatcgaagccctcggctgggtgatcgtcggcgtggcgctgatgtgcctggtgatattcagaccccaaggcctgttgggcgaccgaaaggagttggctttccatgcctgatacaacgaataccccgaccgccggcgcgcagcagccatctggcgtgcagccgggagtgccgttccatgacctgaccaaatgggccaccaaagcgccggaaggcgagaccctcatttccacggcctatcgtgacaaagtcaccgaggatttgaaatttgtggagaacaagccgggtgtgcacaagcccgatccgattctgatcgcagataatgtaacccgcaaattcggtggtatgacggcagtggatgtcaatcattttgaaatcgaaaggcatggcattaccgcactgatcggaccgaatggtgctggcaaaaccacgttcttcaatctgatgaccggtttcgatatgccgaacaccggcacttggcagttcgacggcaaggacatggcccacgtgcagcctgaaaaggtggcgcgcatgggtatggttcgcaccttccagttgaccaaggttatgagccgtctgactgtgcttgacaacatgctgcttggcgctcccgtgcagcctggcgagggcatgttccgcgcgctgttccccggcatgtggaagaagcaggagaaagcgaatattgagaaggcggaagcattgctggaacgttttctgctgatcaaaaagaaggatgattatgcgggtgcgctttctggtggtcagcgcaagttattggaaatggcgcgtgcgttgatgtctgatccgcagttggtcatgttggatgagccgatggcgggtgtgaatcctgcgctgaagcagtcattgctcgaccacattatggcgttgcgtgaagagggcaccacggtgctgtttgtggagcatgacatcaacatggtgcgtcatatcgccgattgggtgactgttatggctgaaggcaagatcgtggccgaaggccagccgaagagcgtgatgaacgatccggccgtgatcgacgcgtatctgggagcccatgcgaatatcgacttgggtgacgactccgtgctggaagatttgaaggaggcctgaaatgagcgacaacgcaagtgtggcaagtgcggctggagtgtctggtgcggtctcggtaccccatgtgtccgattctggtgaatcggacatccaaggtggcggagacaagccgctgacccgcgcgcagattcatgtgggtgagccggaaggtgagccactgcttgacgcggtggaccttgtggccggatacattcccggcgtgaacatcctcaatggcgcttccctgaccctccatgaaggtgagatcgttggcatcatcggcccgaatggtgccggcaagtccacgctgctgaagtcgctgttcggcctggtacatatccattccggcaagcttctgctcaagggcgaggacatcaccaacctgcgtgcagacaagctcgtttcccgtggcgtgggcttcgtgccgcagactgaaaacgtcttccctagcctgaccatcgcggaaaacatgcatatgggcgcgtttcaggcgccgaaactgttcaatgagcgttttgactatgtgtgttcgatttttcccaagctcggtcagcgcaagaaccagcttgccggccagctttccggaggcgaacgccagatggtggccatggccagggccctgatgatgaagccgtcagtcctcctgctggacgagccttccgcgggcctgtcgccaatgcttcaggacgaaaccttcatccgcgtgcgccaggtcaacaaggccggcgtctccgtggtcattgtcgaacagaatgcccgccgttgcctgcagatctgcgaccgcggatatgtgcttgatcaaggtcgcaacgcctactccggcaagggccgtgatttgatgaacgatccgaaggttgtctccttgtacctgggcaatctggaagaggaggttcaggaagagggcaggtagccccggtaaatcgcggaacggagcgtataaggcccgtcatcctctccgctcgaagcgccttcgtgtgctttagagtgccttagaactcggatatcggtctccgtacacgttacgcgatcccctacgagccggaatttcgggttctgaatcaagtctccgccggtggggcggaatacctccgccggcggttccgccatgcctgaaaactgatacaaatccttgtgtttccaacagttttcatacttcatctccggttaacttcacgcatacacgttcggtttcctcgcagcctatagtgcacctcaagatgttcgagcaacccatctcggcaatcgtcaccaagggttcggcaatcagcggagccaagagaggaaatggtgattcatatgaagaagacaaacatgaagggcatgagaaagctgtccatcactgccaccgcagtagtggccgccgcggtcatggcgctcgccggatgtggctccggctccggaagctccagctccgacacatccgattccggtgccaaaaccaccaagttcgtgcttggcggtctatggccggaaacaggatccctggcctatctggcaccgcctgaactggccgccgaaaagctggcagtcaaagacatcaatgacgctggtggcgtacttggcagcaaggtcaccaccgtggacgccgatacgtccgacgccgaccatgccgaccagaacacgtccgcggctcagtcggtgttgagcaagaatccgtcgttcattattggccccgcttccagctccgtggtgaagaacacgtacaagtccattacttcgcagaatattccgatgctgtcgatgggtgccacgtctgccagcttctccggtctgtccgactacttcttccgcaccgtggcacctgacaccgtgcagggcgcggtcatgggcaatctgatcgcccaggatggcgtgcagaagctcgccatcgcggtcttcaacgacgaatacggcaccggtctgcgcgacacggtcgtcaaaaccgcttccgcggcgggcgtcgacattgtctacggagaaaaggacaccttcgatccgaccgagacgaacttctcctcaatcgccaccgccatcaaggcgtccaaccccgacgcgacgctcgtcatcgccttcgaccagaccaagccgctgctgaaggccctcgcctccgcgggagtcgacactaagaagctgtatttcgttgacggcaacacctccgactattcgagcgaactcgacgcgggcctgctggaaggctcgaaaggcaccattcctggcgtcaacccgtccgacgacttcgtcaagcgtcttgaatccaccggtgtggatctgaaaaacaccaccacctatggcgctgaaacctacgacggcatcatcctcgcagccctcgccgcgcagaagggcggcagtgctgacggcaagaccattcaggccaatatggctgcggtttccggtgctgacggcggcgagaagtgcgattcctacaaggcctgcctcgctctgctgaaggatggcaaggatatccagtatcagggccagaccggtattgggccgttcaacaagaacaatgatccgagttctgcaaatatcggcgtctacacctttgacaaagacaacaagccggtctttgaccacacgcagtctggtgacgttccgaccgactgatcgcgatgatcgcaatgtaggccattatcaatacaaga

SEQ ID NO: 3347 - DNA, 5994 bp, Unknown
  R151_18m  MAG No. k141_18276
gccaagattgaaaggaagccataatggctaagtacaccaacgatgagctgctggaagccttcggcgagatgaccctggtcgagctctccgagttcgtgaaggccttcgaggagaagttcgacgtcgaggctgccgctccggttgccgctgttgccgctgttgctggcgctgctgctccggctgaggaagagaaggatgagttcgacgtcatcctctccgccgtcggcgacaagaagatccaggtcatcaaggctgtccgcgccatcacctccctcggcctggccgaggccaaggctctcgtcgacggcgctccgaaggccgtcctcgagaaggccaagaaggaagatgccgagaaggccaaggctcagctggaagaggccggtgcctccgtcgagctcaagtgatttgtgcggcataagccgcaatcacagcttttcgaggaaccccgcacctgtgtttcaggctgcggggtttccgcatactgagtagactagttgacgagggcgaggcggagaacgcgatccggcgtggaatcacaaagctggcaatgagcgaaagttgtcaattctgtgcccagtaatccgccaaaagccggtaaaagatgacacaatggcacgtagtgtggtcaaatagtgtgtccaggaaggcggtcacggtgagcgagtggacggtgaagatcaacggtgtcgaccggatcagcgtcaagccgggggagtgcgtggaaatcggccgtaagccgttacgcccccttgccgatgatggcaacacccgccttgacgtcgccgatcagaccaaatcgatgtccaaacggcacgccatgttcacggtaaaaagcaatggtacggcttcggtccgcgatcttggatcgaccaatggatcgtatgtggtgcgggaaaatggtgatttgttgcgcttgccggccaatgtcgagttcctgttgccgacgtctcccatgcgcatgcagttcggtgatgtgcctgcggacttcattcgtatcgacgatccagtggcaaagccactcgaccttaaggtgcctgatttgtttggctatgcggttcacgaagcaccgcaggagccggatgcggcggatatgtctgtcgacgatattcttgatttgcgggccggcgagccgaccgccatcttcagcgcggataatgttcgacgcaaggtcgacgagcttgaacttggctcgctgaatatcacgcagccagtgacgaaaaacgatgagccggccataccccgtgacctgttcgcggatgcgttggcccagcatgccgagcaggagaccgaacgcaaaaaccagcaggccatggactccgtggtactgccgaagcagcagaccgaacctgagtcgacgactgtaacgcccgcatccaagcacagcaggatctccggtattgtcccggtagatgccatcgcccatgccgttgttaagcacgctcccagcacaagcgagccggcagtggcgtcggcggcggttgttgaatccgatgtggtggctggcgcaagcaagtcagccgaaaacgttcagtccgctccgaataccgacgattctcagccggtggacgctgttgcacagcattctgaaggcactcagtccgaagccgcccagtctgaaaacactcagtctgagaccgcccagccgacaaccacccagcctgaaaccgctcaaccggcaaccgacgcacccgaggatcagcagctggcgaccgaaaccgaaaccgcccagcagtcggtctccgaagcgtatgaagcgtatgaagcgtctgatatctactccacgggcgtacacactccggtcttcgagcccggctcggtgttcgagcgtgtggccaagggcgagctgaaagcacaggagccggcagtcgaagtcgatggcctgacctctgacgaggcaaaaaccacgcaagatttcaacgttcagttcgaagtcgcccgtcatcccgaattactggcgttcctcgccatgaatccgtacctgtacgacgacatgtattcttggctcgccgcccgtggcgaggccgatattgacgaagccctgtctcacaacaagggctatcaggaataccgcgaagcggttggaaagtgagtcgagagatgacccagagccagactcagaaccagaatctcacggaaggtctgaatcgcatccgtcgctggcgtgaccaataccgcagcatgcagccgccatcgccgctcgaggatgtgaatcaactggccgcgaagctggagatgacccatgcccatccctccggcatcgcccagctgttcgcttccggccatgttcggttggattcgttgttccgtgacacgggtgtgcttaaggccgccgaacgccatatcgggcgcgtactggatgaccaggccgccaagcgcaggatttccggcgtggcggagttgtcgctcgtggttggtgtggccacgtggaggggcaacgcgctgccggtgctgttgtacccggtgagcgtcacgatcgaggatgatggcttgtcgaccaccattcgattcaccggtcgcgtgaccctgaacgccgcgttcgtcaatgcattgcgtgagcagggggtgttcctggatgaggattccctgtttgacggtgccagctatgacagtggcactcccgaaacttccgcgatgttcgcccgtatttcgtccgaagcatcggagcgtatctccggcttcgccatcgagcgccagattgtgctcggatgcttcatggacccctcgtcgcagatgatcagcgaaagccgacagttcatcgaccagctggagaatggccccaccggcaatgtgctgttggacgcgcttgccggcgacaaatccgcccgcaccgcgctcaaagatgccaatattccgcaatacagtcctttcgacgtagacccgcatgccgagtacgaagtcggcgatgtggacaatacggtgcgatatgccgcgtcacttgctgccaatggccatagcatcgtggtcgacggcaccttcccgaagggcaccgcggagcaggctgtggccatcgcatcgcgctgcctgatgaatggtcgttccgtgctgtacgtgcccggcgtggccgagcagaagcgtctgttcatccagacggcctccgccaatgagatgaaggcgcaggtactggatgtatccgatgaacacgccaacgccgcgcttgataagcagctgattgccgcagtcggattccagcccggagtcgccacccagcgattcgaccagctggccgacgaactcgtgggcgtgcgctcgcgcttgacccgctatctgggcgacctgcacgggggcaacgataagtggaatgtgtccgcatacgagaccattcagaacctggcccgtatctccgtgctcccgacacaccccgccacccacgttcgacttgacgagtcaagtgccctgagcatcgccaacgatattgacacatggatcagcaagatggaacgtgccggcgagctcggcgaatacaccatcggcccggaagacaccgcatggtacaaggcgtccatcaccactgaagaacaagcggtaaccgcttaccagcgcgtggacgatttgctgcgtcgcttcctgcccgccacccgtgagcaggtggcacgcaccgtgcagacctgcggattcccggttcctcccaccactcgcgagtgggagcgtcaggttacggttttgaagaatctgcgacgagtgcttgacgtgttccagccagagattttcgagcgagacatcagctccatgatcgaggccaccaagccgaagagccagcgcaaggccgagggcacgtcgatgggattctgggagcgccgccgccacgtcaaggaagccaaggatctgctgcgcgtcggcgcgcaggtcgaggacttgcacgaagcgttgaaggtagtcgccaagcaaggggagcagtggcatcagttcgtgcctcacggcggttggccggtgctgcccagcaagctcgacgagatcatctccacccaagaggcgctggtcagcaatatgaccgcgctggataccgtgctttccaccacacccgccggcggcaatctggaaaccgccgatttcgagaaggtggaagcacgcctgaaagcactgctggatgatcgcaaggcactggacaccttgccggagcgttgcctgctggagcaggaattcgcttctgccggtctgaacgagttggtcgccgatctcaacgctcgccgggtgggcgtggagcaggtgcgtggcgaagtgcagctggcatggtggaccaccgtgtttgaggacattgtgcgttcttccgccatcatctccaaccaggatggtgccgcgctgcagaccgcatccgaccgcttcgcacaggtcgatgtggagcacgtgcgctccatcggaccgatggtgtcgcaggaatccatgcgccgcctgtgcgacatgctgttctcccgcactcaggaagccaaccagatgcacaccgtgctggcagggcgcgccagtgtgtcgctgagcaggattcgccgtgatcatccggagattctggccgcggccaagccgattctggtggccgcaccgggtacgctcgccgcactcaccgagccgggtgtgctggctgatgtggcgattctcgatgcgtgcgcgcacattcccgctatcgagttgctgtccatcatcggccgcgtgcagcaggtggtggtgatcgcccactgcgcgacggtaaccagcgaaagcgtcaagcagctgatcgacacgttgcctcatatcgaggtggatgctgccccgtctcgccgtgcgccgcgcctgtccgcattccttgaatccgagggatatggtcctgttcgctatgatgtggccaccgagccggctgccggtggggtgcggttccaccgtgtggaagcgagcggtgtgccggttatgtcttctggtctggtggaatccagccagtcggagattgatgaagtggtgcgtctgattacgcaacgtgccgccggttttgctgtggttccttccagctatcgacttgtggtcgtgatgttgaccgacgcattccgcacacgcttgggtgccgaattgaagtcgttggcaggcaaatccaaggcgatgggccgattcctgcgccatgtgcggctggtttccttgcgtgacgtggccggaggtcgtgccactgacgtgattctgtcgatgtgctatgcgaaaaccacgcacggacgtctgcttcagcagttcggtccgctcgaaagcacaggcggtcgcggactgttgctggatgccctggcattggcggaccacagcttggatattgtgtcggcctttggttccgaagatttggatgaagaacgactgcaccagtccggtcctcggttcctgaagaccatgttgacgtgggccgaacagcttgacgaccgtccggtgcttccgttgcgtggtgcggcaggcggcaacgtgctgttcgacgatatcgccgacaggttgcgcgcgcgaggactgaacgctgctgttgattatggattcgacaagggcgtgaagattccgctcgtggtgggattgaaggacaagccgtttgccttggccgtgcagaccgatgacgcgaactttatgtccgtgcaatccacgcgcaggcgtcatcgtttgtcggcacaggatctcatttccttgggctggaatgtgatgaccgtctggagtgtcgccgccttcgtgaaccccgataaggaagtcgaccgtatcgtcagccgtatcggcgagatctaccgcgaggttgaataatcatggcggaatactcggctacacggcgcacaccgcgcaagcacaagcgcgtggtgatgaaaggcactgagcagtttgacgctgacggcgtcaaactcgagcccggagacatgcagaccgaccaacaacggcaatccgacgacgacaaacgcatcctcggcgaactgcctccacactgggctgttttcaacgagcgcgagtaggagttgaggcgcactctgtgcgctctgatgttgtgttttccgcatccgtacggctgcggaaaacacaaca

SEQ ID NO: 3348 - DNA, 14819 bp, Unknown
  R151_18m  MAG No. k141_18660
cggcgacgccgtcggcgccggatggttcgggctcggccccgtctacccggccacgggaggcatcctcgcggtcaccggcacgcccgccaacgcggccatatccctgatcgcgcagctcgccgtcgccatgctgctcatggcgttgggtggatggtgctcggcacacccgcgcacaacgcgctgaacggcaccggcggaacccccaccgaaaaaaacatcacacggaaagaagacgtcatgttcatctccatcaaccacctgaccaaggacttcctgaggaagccccgcgcgctggacgacgtgacctgcgacctgccgcacggcatggtcggtctgatcgggccgaacggcgcaggcaagaccacgctcatgcgcatcctcgccggcatcatccgccccacatcgggccaggtactcatggacggccacgatctgaaggacgagaggacccgccgtgcgctcaaacgcacgctcggctacctgccgcaggacatcgaaccctacccgcagctcaccccgctcgaattcctcgactacgtgggcgtcctcaaaggcatcgacgacacgcgaaagcgcatgcgccaggcgcacgagctcatcgaacgggtcgggctcacggacgtggccgaccggcgcatcggcggcttctccggaggcatgcgccgccgcgtcggcatcgcccaggccctcatggcggatccccggctcatcatcgtggacgaacccaccgccggactcgaccccgaggaacgcatgcgtttccgcacgctgctcgccggcctcggcggcgaccgcaccgtgatcctgtccacccacatcctcgacgacatcgcccagacttgcccatacgtgttcgtcctgcgccaaggccgcatccgctacgacgggccgaccgaacacctcaccgaacacgccacgggccgtgtctggctcacccagccatccaacaccccgccaccggccggcatgatcgtcgccaacgccgtcaccaccgcacgcggcgtacgctaccgcgtcatcaccgacaccccgcccgccgacgcgcatcccatggaccccacattggaggacggctacatggtcctcatcgaggaacaccccgaccagcattgacggcagacgaacaagcaccccgaccaccaccgaacacgacaaaggaaaccagcatgaccaacacgacacacgccatccaaaccatcaccgccaccggcctcgccgccatcatggccctgggactgaccgcctgcatggacggcatcgaacaccccgaaaactaccctaccaacggcagcaagaaaatcaccgcgaccagcaacccacaggacatcagcgccgaccaactcggccacacatggcccctcaccgtcgaccacggcaccgtcagctgcacgcacaacagcaaaggcgatcccgtcatgcgcttcaccgcgcccgacggcacccaatacgccctcaaccagaccagcgacaacaaggacctgcccgacatcaatcagctcctcgccgacggcaaatccaccggcaccctcaccagcttcgccttcaccgtctgcgacgtgaaataatcatgcgcccgctgccggcggccgtgtcgatgtcgaccaccgtgcgcataccgcgagaatcctgtgacgctgacggttcagcatcgtcttgcagtcaggaccggcgcggttccgccgccgttttctccgtaacaatcgcgtatagcaccagtgcgaccagcacgacgagccgggtccaatcggaattacggatgagcagcccgacgagaatcaggacgtcgtagaacagcgtgcgcgcccaccgccacgggtattccttacggacgcgcatcgtctccgccaatccccagatcagggcgcagacggcgatgataccgttgaaccacagcactatgggcctgccctgcggatcggtgtccggcatagcgagattgctgaagaacatcaccagagcacccgtatatacggcctcgggcgcgaccgacaatcttccgccttcaacgcgaggatctgacatgattacctccttattgggggatccgtcaacgctaacgaatcatgcgaaaaaccattatatttgaatggtatgagcggggctcaagcattcacaacatgctgtcaagcaatcgtatgacaagaatcatccgtttacggcatcgccgccggatgaccacaccagcagggcacccgcgagggagacgacgatgacgccgatcacggccaccgcggtgatggtctgtcgcaatatcagcgcggcgataatcacgctcatggcggggtcgatggagaacagcgtgccgaccacgcgcgccgacgtgatacgcccggacaacgtgtccatcgtgtagggaatcgcaactcccagcaccgccgaggctgcgatgacgccccactgggcggccgacacatgcggcgcgcgagtgatggataccggcgaagtggccagcgccgcaaccgtgaccgacagggcgagcccgtcgagcccggtgcctgccttgccgacccggtcggcgaagagcgtgtacaggccgaagcacacggccgagcccagcgcgaacaggtagccggccggattgaagtagccgcccggcgtaaacgagatcaagcccacacccaccagcgcgaccaccgcgcacaggccctcgcgccagtgatgcgaaccggccagggcgaccacgcagggtccgaggaattccagggtgacggccacgcccatcggaatgcggtcgatggccgagtacaggcagacgttcatcgccgccatcgcaagcccgtagattacgatgcccagccattcgcctttcgaccggccagccagtttcgggcgggtgagtgcgagaatgacgatcgcggcgaccagcatgcgcatcgaactgaccggaattggtcccaacgcgccgaacaacgacgccgacagggacgacgacgtctggatacccaacgaccccaccatcaccatgccggccgccgccatcacacggccacgcgccgaacgcggcgcccgaagcttgcccaatacccctcccctgtcacggccattcccacacgacctctgcgccaccaatgatagtgttcggcgaagactcgcgacgtgcggagtcgactttgtatggcgggatcagcggaaagcggcaggctcactcccgcaacggaatacggtgagaaagctggctgccggacgattacgatccgaaacagtgcacccgtatacggcttcggtcagacacgtttcaccgccttgaacagcagacatgcgcttatcgcggcgatggcgacgccgaccggaatcacgtaaccggcgaatttcaccccgttcaacacccatgtggttggtatgacggcgtacagcatcggcgcgtcctcgaacatgccggaactcaccgtaagtccggcgacgatgaagaaggcgacgacgttccaggcgacgagaggactggcatagagtcgcagaacgaagcatgccagggaaaggacgacggcggtgaacgcaagcatcagaatggtacgcgacgaaagcggctcgttgacgacgagcccgacggcaagcccgtacagcaaagtcaggcagacgttgatcacgacgccgagcgacagcgacttcacgctgaagcgaagcaggagccggtcgtggatgctgaaggaacggtacgaggagggcaccctcgcatgggagaagacgagaccggccgcggttacgggaagcgccatcaccatcgccgactgcaccaccgcacccgtgttcccgtaacgcaaaaagaacaacggaaacagcagcacggccacgaaggcgagcgtcgaccagcggatcaccgccacacgctcaatacgcaatagggacttcatttcctctccactccttcgcgacggaaccggctcaacagcacataggcaaccaaaagcaccacgatcgggacgacgaccatcacggggccgacggacgctcgactcgccgcttccgccggcgacatcacggtgccgttcaggttcagcccgacggtccgtagggcgttcgcgacgtagggcgtcgcatagtcgggaaggtcgcccggcaggagaatccatgcatagcaaaggatggccgagacgattccggcggttctgggatcggcggcgatctcgacgatcgagtagatcagggaggtcgcaaggctctgcagcacgacgaagcacaggacagctgccagatgcgggtgcattccggtacccgtcaggaccatgatggcgtcgaagcacagtacgccaatcaggttcacggaggtcaggatcagggcccggaacacggccctgagcgagcatggcgtccacgcggaatacacgtggcgcggcaggccaccgtagtgcgccttcgcgaccctggcatcgcatgcgaagagcagcgaaagacagatcaacggctgggtggcggtgaaatagacgcaataccctccggttatcggggttccgttcgccgcgcttgagatccacgcacccagcagaagggacgagacggccccaaacaccgcggcgaggaaataccacgtgttccagtagtaggcgaccaacgcgcgaacaggggaaacggcgttcaagaccctacctcccctgatacagatccgcgaggttcaccccagtcagatccgtgacctgcacggcccggccgtgacgaatcatgatgcactcgtccgggacgccctggatctcatgaagcagatgcgtggagatgacgacgcagttccccttgtcccggtaggcgcgaagcgtttcggacaaggaggctatgccatcggggtccagaccgttctgcggctcgtcgaggaacaggaacctcggatgcggcacaagggcgaggcacagctccagacgctctttcatgcccgtcgagtagtccttcgccttccgcccatacaccgcgcgattgatgcccacaccgtccaacgccgcctccgggtccacatccagaccccagaacgcggagaccacctcgacgttctctctaccactcaggtaaggaaagaaactgggatggtctatcgccgcggacatctcattgatattcgtccctgtgtacgtgacctctccgctcacgggctttatccgtccgagtagcgtcttcatcaacgtggttttgcccgcgccgtttgccccaagcagacagataatcctacccgtgctcaaccgcaggttaatgttgctgacgattggggaacccttgtacccgatcgagagattcgtagccgatataactggcataatcacccttcacgaaaggcgggcctgaaggcaaaggcaggatgccttgcccagacccgcgcgttgcaatgtcgccgctattgcacccttcagcggccgcaaacgcaacaacatgtcaggccaatcgcatgacggtagctccatgctccctcgattcgccgaaactatccatcggccaaaggaatgaacctgcgcatcatccgcaaggacgatgcatccgactcccatcgcacacttgccgccaccggtctctctcccccccccccaaaaaaaatggcgaagggcgggttccagtgatcgtcgcaacgcctggctgactgatgggagggccaggtggacaggtgggtgttcgagggcgtggagtacgcgacgcgtggcgagatgtgcgcggcgcggcggcgccgctacgccgagctgctggaggcgggcatgaacttcacgcaggccgcgcgggcggtgggcgtgtccaaacgcaccggcaaggtgtggcgcaacggaaggacacgatcgaacggcaggaacgagaagccatcggtggactggtatcgttccaccgtggacattccccaaaagatcagttcgaggtatctgagccaggacgagcgcatcagcatcgccgactggcggaaggccggcatgagcgtgcgcgggatcgcgcgcacgctcaatcgtctcgcgtcgaccgccagccgcgagctggtgcgcaacacgaatcccgcgaccggcatgtacgagccgtaccggccccagcagatgagcgcggacggcccagacgacccaagcccgcgaagatccatacggtgcccggcctgctcgcatacattcgtgcaggattgcgggcgcattggagtcccgagcagatcgcggggcgcctgcgcgccgatttcccggataatgatgctatgcatgtgtgcgcggagacgatctaccaggccatctacgtccaggccaaaggcgaactgaaaaaggacgtcatcaaggccctgaggagcgggcgcgcccaacgccggccgcacgggcaggcgggttcgcgcaggcccgtttccgcgagctcatgatcatgatcagcgagcggcccgccgaagtcgaggaccgggcgatacccggtcattgggaaggcgacctgatctgcagcgcggccaacaaaagcgcgatcggcacgctcgtggaacgctcgacacggttcacgatcctcctgcacctgcccgacgggcacgacgccaaacacgtccggcaggccgtcatccggaaaatgcaatacctgcccaagctcctgaggaactcgctgacctgggaccagggaagcgagctcaccctgcacaaacgcatctcgaccacgctggacatgcaggtgtatttccgcgacccgcattcaccctggcagcgcggcaccaacgagaacaccaacgggctcctgcgccaatacttccccaagggcaccgacctgagcgcataccccgaggactacctcgacgcggtcgccgaggaactcaacgaccggccccgcaaaacactcggctacaggaaaccatccgagaaaatactcgaactcatcaacacagcatgatacgatcgcaccaatccaagaccgccatcaagagcggcaaaacacacaggtgttgcaaccaccactaaaatccgccaagcccaccttgccgaatggggtgtcgaacatggaatccgtcttggggggggcgtgcggtagtcgcattcgtaacaacaatccgcttgaatgagctgctgagcaaatagcaggtctacatgcctgctttgaaccagccgatggcgatttgagtgcgattgcgtaggcccaaagttgcgaggatacgggtcacggcacgtttgacggaggcaggttcgacggtgagttgattggcgatttcctcgttgatgagcccttcggagatgagtgcgcagatttcacgctggcgaggggtgagtgcgtcgaaagctttgcgcatttcttgctggcgctggctgctggtgggatgcggaacgcctcgttcaagcacttgtctggtgattcgtggggtgagtattgcgtcaccgttggcgatggcgtgaaccgcgtcgatgaggttgtgcttggtgacgtccttgagcaggaagccgctggctccggcgtcgagaccgccaaaggcgtaatcgtcctcgtcgtacgtggtaaggatgagaatgctgatggtgggccagcgtctggtgatgcggcgagtggcttcgatgccgtccataccgggcatccgcacatccatgaggattacattcggcaatggacgatgctgaacggcgagctgttcgagcgtctcgatggcggatcggccgtcagcggactgggcagtgacgacgatgtcggaagcatcgtcaagcatgagttggaagccaagtcgcgcgaaacgctggtcgtctacgagcattatacgaatcatgcggtgtggtccttttcgttcactccgttggacgggatggtcgcctcgacgacccattcgccgtcttcgtttggaccgtattcgaagatgccgcttgccgattcgacgcggtggaatagacggacgagcccagtaccgtcatccttgcgcgcgtccttgcgcgcgggactgccgtcattgcggataatcacggcgacggtgccgttctcgctgtggttccaggcgatgctgatatgcaccacgttctgtccgtgacgtatggcgttggtgatggcttcgcgagtcacatcgaaacacaaatcagcctgagcttcgtcatcggcgcgcgtaccagtctcggtgaacaccgtgacgatgcccagccggcgtgcgtgcgcgagaatcggccgaatgtcatcccatgaatgctggtctgattcttgggtgtgcgtatcgtcaccgttcgccgctccatcgaactcggtcagtgcgcggacggctttgcgcgtgtcgcccagactctctcgtgcgatttcgttgatgccgtgcagcgcatcctccacgcgtgggtcatcggttttgccggccagaccctcagacagtgcgatgattacggtcagatcctggcccacactgtcgtgcagttgaccggctatgcgcgaacggcgtattgcggcatcgcgttggaaggccagctcggctgcccgccggcattcctcggcagctttgtgttcggcttccttggcctgttgcctgccacgtactgcaagcgcgccgcctcccacggctgccaacgttaccactcgactcacccattcggtcgcgagaacgtccgaatgcaccatgatggccgacgcggtcatcgacagcatcatgccgatgcctccaacgcacagcccgcgccccctcgctgtccgggcgaacgcatagcaggcgacgagcgtctgaatcatcacgattgagtccaaccgccagtacgaggcaactattaacaataccgcttcaagcgccaaggcaacggctggcagccagtaacggacaagcagtatcgcactgctggctatggtcatcgccagcagcagagccaatcccagcggatctttggcaaacgtatacatggtgtcggccggcgctccgatcgcatgctcccacagcatcgctgcacattcgaccacggcgatgaccagtggcacggccaggaccgtgaccttattggcctgcgcggattgcggtttcatggctcccattgtggctctttttgtatgatgttgcgtgcatgtcagcatgtgcgtatcgtgtcggccacgctgcggtgtagcgcggggcgaatctgcgtgaactggatgaggaacaatgccagccagcaggccgtgcccatgccgattacgcccggccatgggatttcggccacggggatgccgacgagcgccgcggatcttgcggcgaaaacgcttgcgctgacggcgaccgggatgagcgagagaatgaccgcgccggcggccagctgcaggctctgccagagatacatgcggatcacacgacgtggggacaggccgatgctgcgcagcaatgcctggtcggcgaccatgctgcggttcgacagggcgatgaccgccatgctggtggccagggacacgatgcacagcatcgttatgagcagcagcgagtccgcgtagttcaggctcttcggatggccgcccaaggcgagtatccggccataggatcgcgcgcaggtcagcagggtgaccgacagtcccatggcaagggcgagcggggcaatcgtgttcgtgttgctggcggccttcgcctcggcggaacgggcggcgagcacaccggtcgcggacccgcacaggcgacacacgacacgtccgatgcccaacagaatcggaatcagcatgctgacaaggatgtacatgccgaacgaggcgatgatgccggcccacagcgcgctgttgaatgtctgccccgcctcctggccgaacgcgagcgcccgtggcgtgcccatgccggagaacgccaatgccagcgccgccgccatgacaatcaaaccaagtgcccagtgcgcccaagaccgccaaccgtgccgtatcccgatggctcccgtgccgcgaatcacctcgatgggacggatcttcgctgcgcgcagcgaggggatggacgcgcccaacatgcacgtggccacacccaacagcagggatccgagccacgcggccatcgacggcgtgaacgcaggaggtgcgaacgagccgaatccatcggcgaagctttccgcagccatggcgttgaactcgggaaccgccagcaggctggccggcactgcagccagagagccgatcagggaaccgaacaggctcgccacacccacgagcatccacatgctggcaagcacctgactcgggctggcgcccataagccgccattgcgcgaacgtgctgtgaatacggttgaccgtggccgagccgaccaccgtcaacgagaagaacgcgagtaatgacaccaccacatagatcgtgaccgacaccatgccgaactcggccggatcaagacccgcctgccgcgcggccaatgtgaacgacggagacgaggtccacacgaattggttcatgcatatgcccaccagcgtggtcaccactgcgaccaccagaatcgtgggtacccatcccgtgacattgtcgcggaacacacgcagcacatacctagccacgatgagcctccttccgctgctgcggatacgccacgcgctggaccggtcggcccggttggacggattggataggctgggcgttcaccatcatcgggccgacagaccgcgccgccgcaaccaacggcggcgacccggccggtacgaaagtgcggcgtatgccatcggcaatctgctcggcggtgagtctgccagcgatgtgggtgacctgaccgtcgcgcaggaagatcacgtggtcggccaaagcggcggcatccgtgtcatgcgtgaccatgaccacgctggagcccgcatccgccagctcgcgcagcacctgcagcacaagctcgctgttcgcggtgtcgagcgcgccggtcggctcgtcggcgaacaccaccgccggacgcatgagcagcgcacggcacagggcgacgcgctgctgttcgccaccggacagggcgcttaccgtcgtcttcgccctctggcgaagaccgaaccgggacagcagctgcgtgacctgcacgtagtcggccttgcgatgggcgagcgagagcggcaacatcacgttctcctcgaccgtcagatacggcacgagattgtattgctggaacacgaaaccgatatgcccgcgaatgaaccgcgaacgccgttcctcattcagtgcgtagacgtcggtaccgccgatggtcacccgcccggaatcgggcctgtccaatccggacagcacatacagcagcgaggtcttgcctgcgccggacggaccgacgatcgccgtcaagcccgctccatcgatatccaacgaaacattattgagaacagtctgcgtgtttgcgggtcgggaggcggttcgagcatcgaaccctgtccgtttcaccagtccgagcgcctgaatcggtgtgccggcattttgccaagtcatgaggtagccccctgtcgtgaaagttgacgccgtttttctcaaccttcgcgccaggggcatggcaggtcgaggtaaacacggaaagtgacaccctagggtgacagattccagtagcgttccatgaccggcacccaatatgccctcaaccagaccagcgacaacgaggacctgcccggcatcgtccaactgcccgcctatgccaagtatgatggacggctgctcgtcatacttggttcctccgggaagcgaatatccttctgtcgtttgcggaaacaagccctgccgatgcccaagaccgccagataaagcaggaacatcacgggcacgacccatgtcacgtaccgccacgggtcaatctggaacgtatcgaagacgatgaacatgacgccccacacgttgatggcgacgatcgccagaatctgggcggccgccgaatcgaacctggattcggccgggctggtatcgttcgcgtcggccggaacgtcaggcgtccgcccggcgcgacgcatgaagccgagcgccgcccacacgatggccgccaccaacgccacggccgccggcaccaccagcttccagaactccccgtcattccagccgtaccggatgacggcgcacgtgatggccgtgacggcggccacgcccaatgtggcggaagcgccgaaaaaccacagcagaccttgattccgacgcccaccatgggaggcccgcacctcatcgtccgcaaccatatcgtccccgcattccataaagtccgacgcgtacgcatgccatctcaattatggcactcaaagagtcaatcagacaacatgctgtcaagcgatcgcatgacaggaatcggctatccgtcaatgccttagggtgctgtcgatgcatatccgattgaccgatgcttctacatgcgtgccgacatgtgccggtccttcgcgtccgcgtacgcattcttacatcacgacctcaaactaatctacgaaaaactttaaacagatatctatttgattttaatattatttatggtatacttaattttattaaacccgccgtgaattgaaggaggcaggtatggatacgacgatgatcccgccgtggatgtcgaacctcgatgacgaggatatgacgttcatcaaacggtttctgctcgcatcaggctccatgaaggaggtcgccgcgcagtacaacgtctcctaccccaccgttcggcttcggctcgaccggctcatccagaaaatcaagttgggcgagcagatcgagaacgagccgtatatcgcgctcatcaaacggctcgcggtcgacgacaagctcgacttcgacaccgccaaaatcctcatcagcgaatatcgcaagcagctcaagcaaggagagtaatcatgattggcgccacaatatttgccgtagtgtttttcgtgtttctcatcgccatctgcatcggcttcatcatattgcagatcaggctttcgaagatggacagcaagtggcccggtctggtattgcccgccatcacattgctgctgtcgcttgtggcggcgattaccgtcttcgccagggcggacatcggtgcgtatggcaacatgtggaacgtcgtgctttccgcattcatcgcgttcctgtccaacaacgtatccaccatcgtgctggccggcatctacttgtatcagcgtgacaagatcaatcgtcgcgccgagctggcccgtatgaacgttcaggacctgtaactcactgtgcaaaacacgcagactgaaccctacgccgcttatgccgactcatcatcttttgcgccgcttcgcgcagcttggatgattaagccggtgacgtggtcgcagggttcgtcgcgcaatcggagccggacgccctgtcatttcggctgattccgtacatcctgttccgccgcgaaccgttcggcgatttgccgtgcgtggatgttcttggcttcgttgacgaagtcggcgcatgccttgctgccgtagagcgcctcaccacacgggtcggcgaaacgcggatcgccgaccagcgcggagcgaatggccccgaacgagccggacagcggcatggcgttcatcacggtcgcggtttgattctgtgccgcccgggtgcgggcggtcttgaccagaccggtctcgtcgcagtagcgcaacgtgcgcgtcgtcacgccgctgatcaatgccgcctgatcaatgggccacaaccggcccgtatccagcggattgccctccacatcgaacgcgccggaaccgttgacggcgttcgccgtgttgtcgttctcgttcatgatcgatcatcccccttgaagccgattatcctctacccgccgtgcgtgtttcgcggcgttgccgtcaggatagacgtttacgcaacgtcaaccgcaatcgataatgggatgtatcgttcaagccaggcaatatgccgtcaagcaatcgcatgacagcaccatgttcggcacataccagatggaagaattggcaaaccttaaaaataccgcggttattgctgtgccgagaacgccaatatgaccatagacgtgctttcccgctacacgttattcacctgtcatgcgccgatatcaatcaaaagacacttgcataaccaccgctacgcatcgccaataacataccgatgagccagaatgaggcccaggccacgatgctaatccgtaaataatactggtcagagtggcaggtacattggtcctatggctaagcgcaaacatatcggcactgttgttattgcaatactggtcgctattctgctgacggtgggcgtttccggctggctattctggcagtcggtacaacgggtgatcggcgaggcgcagcaggcgggcgaatatgcggctgaagcacagcaatccgtcgggcagggcgacttcaagcaggcgcttgagcagatggacagcgctggcagtcacatcgtcacggcgcacgacgaaacccagggcgcgctatggcaggccgccgaatacgtgccatattacggttcggacgtgaaagcggtgcacggcatgctgggcgcggccgccgacgccgcgaccaacgccctgcccaaaatcgacagtgccgcgcagggcacgttggtggacttcaatatcgaagagctgctgtccggcatgaacttctccgacggcacgctgtccattcccaaaatcgcctccatcaagcaggatctgtccgacgccggcgtggtcttgaagcgcgtcaagacgtcgatttatgcgctgccgcaaccccacacagaacagatcaccgaaatggtcaaccagggcaagcaggtagtggaccaaatcgatgaggctttcgacaccttgaacaccatcatcgagaagattccgggctgacgttggttcgttcttgtcgtatattggcgtaacctccgcataaggctagtccatacaaatttacataaataattctttagctatgtaactataagctaaagaattatttatgttaaaatttgggataggaggtgccaatatgccgacacgcacaccaatcccggtcagtcgggcgatgcgtcagatatccgccaacctcgatttggcgcgcagacaacagcgcattcccgtagccttgctggccgagcgggctgga

SEQ ID NO: 3349 - DNA, 29793 bp, Unknown
  R151_18m  MAG No. k141_18686
aacgtgctgtgcctcggcaactccacgccgcataattccaatgcggtatacagcgagaaacacaacgtgcgtttcgtgcgcactttgcccagcagattccaacaggccgtgttcttggccgtggctttggcgtcaagatctctgcgcagatagttgttgatttcgccattgtgcggcgcttcgctgtatccgttcatgcgccgagcgtagcgcattccacggtggcacaggggcaaaaccgaaaaatggggataacttaagtggcgcgaaccggttatccaccggcatatcgtgtgccgcgcccggttatccaccgcgcttcgggagtgtcgtccaccgtataacagcactcatcgtgtgcgaacagctagccacgctcaaaatgcctagtacatttatacgaatacgacatgggaaacggcgagaccagccccacacaatacaaagtgaccgccagccatgcgcccgactgcggcatacacggcagcaacgccaacgacaccaaggccaaacatggaatcagcagataggacaacacgtgcccgctttgccgtcgcagcaacgtctcagccaccacgcagcaggcaatcagcgcacagcagacgccgagcgatgcgcgactcagcgagaatgtatgccgatgcccaatgccgccttcacgatgtctgatgcggaaatgagacatcgactgagcaactgtgtggacatactgtgaacacgttggaaacgtcggtgtgttatcctcccactcatgtctgaaacgaacaatgaaacagcagtgcgttcgcgcacgacaagcacaacatcaccaagcaaggccaaattgaccccgctggttcccggcaaagaggacctgaaccgtccgctagtcgaactgacccacgtcgaaaagcacttcggtgctttgcacgtcctgaaggacatcaacctgaccgtcaccaagggtgaggtgctggtggtcgtgggcccgtccggctcaggcaagtccacgatgtgccgcaccatcaatcgcctcgagaccatcgattccggcgacatccgcatcgacggcaagcccctgccacaggaaggcaaggagctcgcgaacctcagggccgaagttggcatggtgttccagtcgttcaacctgttcgccaacaaaaccattcttgaaaacgtgacgttggccctcatcaaggtgcgtcacatggacaagaaggaagccgagcaactggccatggacctgctcgcccgcgtgggcgtcgactcccaagccagcaagatgccctcccagctctccggcggccagcagcagcgtgtggccatcgcccgcgcgctcgccatgcgccccaaggtcatgctgttcgacgagcccacctccgcactcgacccggaaatggtcaacgaagtgctcgacgtgatggtcgaactcgcgcatgaaggcatgacgatgatctgcgtgacccacgagatgggcttcgcgcgcaaggccgccgaccgcatcgtcttcatggcggacggccagattctcgaagagaacacgcccgacgagttcttcgagcatccgcagaccgaccgtgccaaggacttcctctcgaagatcctcacccactgacgaacccactgaaagacgggtacgcaatccaatgacattcaccaatacgttcaaacggaaggtttgccgcgtgatcgccgcgctcgccgccgtggcctgcacaatgtcgctggccgcctgcggcgcggacgaaaccggcaagatccgcatcggcatcaaattcgaccagcccggcctgggcttcaagaagtccggcacctacgtgggcttcgacgtggacgtggccaagtacatcgccaagaaactcggctattccgaagaccagatcatctggaaggaagctccctccaagcagcgtgaggccatgattcagaacggcgacgtggacatgatcctcgccacctactccatcaccgacgagcgcaagaaggccgtctccttcgccggcccgtacttcgtggccggacaggatctgctcgtgcgcaaggacgacaactccatcaacggccccgaagacctgaacggcaagcgcctatgctccgtcaccggttcgacctccgccgccaccgtcaaggagaagttcgcctccgaagtccagcttatggaacagcccggttacgccgaatgcgccactgccctgttctccggcatcgtggacgcggtaaccaccgacgacatcatcctggccggcctggcctccgcctcgcgcggcaagctcaaggtggtcggcaaaccgttcacgcaggaatactacggcgtgggcatcaagaagggcgacacgcagctggccaccaaaatcaacaacgccatcgtggacatgattcaggacggctcgtgggagaacgccatcagcgataacaccaagggcaccaactacacgcccgacgtacgctacaacccgcccaccccggacgaaggagaggaggcctgatgagcggattcctggaactcttcagccagtatgacgtgctcggcgcgtttctggtcaatatcgaactgaccttgtggtccgccctgttctccctgatcctcggcgtgatccttgtggtgatgcgcatctcgccgatttcctcgctcagggccgtggccggtgcgtatgtggaactgttcaagaacctgccgctgaccatcatcatggtgttcatggtgctgggtgcctacgcgcagctgaagctcagcttctccgacaccttcaccacgaacttcttctggctcgcggtcaccggcctgagcctgtacacggcggcgttcgtgtgcgaatctctgcgttcgggcatcaacaccgtgccgattggccaggccgaggccgcacgagcgctgggcttgggcttcatgcagtccgccaccgagatcattctgccgcaggccttccgaggctccgtggcaccgctcggcaacacgctgatcgccctgctcaagaactccaccgtggccgccgccgcatccgtggccaccgaaacatcctcgctgatgagcgagatgatcgagttccgtcccgacgtgatcatccaaatcttcctgatcttcgcgctcggctacgtgatcctgatcatccccatcggcatgctcaccacgtacctgtccaacaaactcgccgtaaggaggtgacggatatggccgatacttcgaattccgtgctgttcgacgcgccaggtcccaagggccggcgcaccattcgcatcgtcaactggatcgcgggcattctgttcgcggtggtgctcgtgtttatcctcatgcgcctgcacaacccgccggacggcgagaaccagctcagctgggagctgtggaagcccgccgtcgaacgagaggcgtggaccgacttctacctgcccggactgtggatgaccatcaaggccaccatcgtggccgtggtgggtgccgtggtgttcggcttggtgttcggcgtgggccgactgctgccgaacccgttggtacgtggcgtctccgccgtgattgtcgagttctgccgtgcggttcccgtgctgctgctcatgatcttcttctggcgatggttcgcgttcgcgggcctgcccagcccgtcctattgggccgtggtgctggccttggtgctgtacaacggttcggtggtcgccgaactggtgcgctccggcgtcggcaatctgccgggcggccagcgtgaggcctcgctcgctttgggcctgaccgaaacgcagtcgctgatggagatcgaggtgccgcaggccgtctacgccatgctgtcggccgccgtcacccagctggtcgtggtgttgaaggacaccgctctgggctcgatcatcatgtataccgacctgctgcaggaatcgcgccgactcggctcgatgtacttcaacatcctgcagacgctggtcatggccgcggtgatttacttcatcgcctgctggctgttgtcgaggctcgccgaatggctgccctcgcgcatgcagcagcgtacggccgcacccgccgaacccgagcccgtggcgccgatcgccgccggcgacccgtccaatgtcaaccagatcgctgtggccaaggaggtcgaagagctgccgctgggcggtacgccgcgcaaataccatgtgcatcaccgtggcaccaacgcctcgattcgcaactggcggcgcacccgctacgaacagggatatgacgccacccagcccgagtcacaggttgacccggaaaccggcgaattccaggagtctcaaaagcctgaggacaagccagaggcctgacggtcagctcaatcgccgctaagccggcacgaagaatttactgagtgtttgactgggctccggctacgtagccttcacggaggataggttggaacatatgaagatgttccggcacctatcctccgtttttgctattgcgaccattgcgccgctggcgttggcggccacgctagccgtgacgcctgcaatcgcacaggccgaccagctgcccaacctggattgggtggcattgctctccgactacgaaaagaactattggcaggcccccaccgatgccgaacacggtggcaaggtgctcgacgccgataccatgaagctcgacgaagatttggccgtggccattaaccacaaagccgccgaaaatctcgataaggatggcctgaacgcccaacgcaagcgtgcgctcgtcgactccgatctgcaagccgaggaagccatgccggacgcgctcggtccggtgcttggcaaatatatgagcgaagggctcaaatccgggaaactcaacgccgtcgccgatatcttctcctttaacgtggcctccacctacgcctcaaaacgtgcggccatgcatccgcgcccctatctgaaccgtgcggaaagcagctacggcggcactaacgatctcgccggactgcccgccacgcttgacatcaagcaatcaccctcatggctcgaacacgtgcccggctactcgaacttgcagaaaaacagttcctacccctccggccacactaccggcgcctattcgtggggtatcgcgctggccggcatgattcccgaactcgcgccgcaaatcatggcccgcacttcggaggccggcaacaaccgcatcgtgctcggcgtgcattatccgcttgacatcatgggcgggcgcattggcgcatccgcccagaacgggcagtactggcataacgaattcgcttcgtccatcgtgcccgcgtcccggcagctgcgggactatctggtgtcccgctgcgccgcggacggccacggcactaccctcgccgcctgcatcgccaacaccaaggcctccggttcgggcggctacaccaacgattttctggacccggtggccaccgagccggtcgcggaccaggcctcggccgtgcgcgtctacaccgcacgcctgacctacaccttcccgcaagacaccgcccagtccggcgctgatttcgtggcaccgcgcggggcggcggacgtgctgcgactggcctatcccgaactgcacgccgatcagcgcaacgcgattttgaaagccactgccttggattccggataccccctatggcaatcgagcgacggctggcagcgtatcaactgggccaaagccctgtgcgcccgcgtcaccttggataagcacggcgatgtggccaaggtcgagaccgccgaccaagtggcgcttaccggcccgagtgtggtcaatgcccagtacaccgacgcgggcaatcacccggcgtcggatagctcggcgggtgaaaacagcgccattgcggccgggccggatctcgccaccctccatgccgcgcaacgaccggcgttgatcagcgtagccatcggtaccgctgtaatcgcgattgtcggcggaatacggacggttcgacgcaaatccaagaaccagcttcagcggtaattcagccaaagttcagtttggagatttaccgagtttgccttcatacggtgtcggcttcatttctctctcataccctcggggtgtcatccgccgaaaagcatcatgcggcggcggcacaacccgaggaaggaacgggagtaatgttccacaccaacaatttcaccgcgatgtcacggcgcgccatcgcgctgctcaccgctgcggtgacactgagcagcatcgccctgatcggcgtgcccgctgcggctgcggacgagcagcaggccactgccgaacagaacacggctgccaaaccatccgtaatcatcaacgaggtctatgccggcaatacgaaagctgccggagacccggatagcaagcgttgcgattgggtcgagctcaagaacaccggctccacagacgttgacgtgaagggctggggcatctacgacagcggcaagaaagccaagaagcactacaccatcggcaccagcgaagtaacgaatacggacaccgtcatcaaagccggcggatatctggtggcatacatcgaccccgacaaggccgagcccggcctgggttccgatgccgacgaagcctatctgaccactaccagcggcgactttaccgatagcgatgtggtggattccacgtcatggaataccgatacaaccggcgtgaagaagatgagcgacagtcagtcgtggtcccgtaaggacgatggcactttcgcgctttccgatacgcccacgcccggtgcacagaacgtgttcgatgacccgactccgactccgcccgccggcgagaccatgaccgtggacgcatggtcgggattggccgatgtgaccacagtggatgccgaaggcgaatttggcgccaaaggacaaggcggcgaccacactgacggcaatctgtctggtctggtgtatgaagccggtaaagacggcaagcaaggcgtgctgtgggcggccgacaacgatctgaaccccacgctcggcaacaccgctgataagggccctggctccatcaacaagttcgtctaccagaacggcacatggcagcaggatcccactgatggctggaccttcaccaacaacggtcagaccaagggcggcaagcagctgcacttcaaggacggcaagggcggtgtggactccgaaggcatcacgctgatcaacggagattcatccaagggcatattcatcggcgccgagcgcgacaacgaaaacaagaatgtgccgcggccttccattctgcagtatgacgtgaccgcgaaaaccaccgacgccaacggcgacggagcgcaagagctgaccgctacgcacgagtggaatctcatcgcagcactcacgcagttcggcgtgacgctgggccacggagcggacgccaatcttggggtggaaggcatagcctttattcccgactcggtcctgaccgccaatggattccaatccaaccttgacccgaagaacgtaatgacctacgacccggacggtttcggcaatgatttcggcggtctgttcttcgccgcactggagaaaaccggccatatctacgctttcgcgctgcaaaccgtgaatggcgaggacctggtacatccggtggccgacatcgacctgccgcagtccgcagtgaacaccggctatgatggcccgcgcgatctgacttgggacgccgagcacaaccagctgctcgcccaaagcgacaatgatgcgaacaccggtgccaaaatcggcacctacgagttcaagaacggtgtgctgcagctgaccaagctgaccgacactccggatgaaatccgtacgcagaacaccgaaggctttgccatcacccctgataccgaagccaccaaggtagtaaatggcaaggtgtacaagccggtgttctgggcagacgacggcgtgaccaatggccattcattgcgtatgggctatatggcaaccaatcagccggttcccgccagcaccaccatcaacctgctgaacttcaacgacttccacggccgtatcgacaagaacctcaccgtgccgttcgccgccaccatcgagcagctcaagggcgaataccctgactcatcactgttgctgtccgccggcgacaatatcggtgcttcgctgttcaactcttcggtgcagcaggaccagccgaccatcgatgtactcaatgctttgggcgtcaaggcctcggcggtgggcaaccacgagttcgaccaaggctatgccgaccttaccgatcgtgtgatcggcaaggagggcgcgcgcaacgcccaatgggattacctcggtgccaacgtgtacaagaagggcaccacaaccccggctctgcccgagtacagcattcaggaggtgaacggcgtgaaggtcggcatcatcggtgcggtcactcaggaaaccggcacgttggttgctcccggtggtgtcaaggacatcgaattcggcgatccggtggaagccgtgaaccgtgtggccaagcagctcaccgacggtgacgaatccaatggcgaggctgacgtgattgtggccgaataccatgagggtgcagcctccaatgaagatgacgccaccgccaagcccacacttgacgagcagaaggccgccagccccgtgttcaagaagatcgtggacgataccgatgcggcagtgaacgtgatcttcactgcacacacccacatgaagtactcgtacaccgatcccgcgcacaacaaccggccgatcatccagaccggtagctatgccgccaacatcggccaagtggcgctcacctacaacacggccaccggtgcggtgtcttacgacaagtccggcaacacggccgtgcaggtggcttcgcagcccgccgacaaaaatgatccgcactacaacgattacgccgaatacaacgatggcctgctcgccgccgcgaacccgactgtcgccaaggtgaaggacatcgtgtaccaggcccttaaggtggccgatgaaaagggcggcgagaaggtcggcaaggtgtctgcggatatcaccaccgcattcaaggacggcaagcgtgacgaccgcgcctccgaatcgaccatgggcaatctggtggccgatgcgctgctcgattcgctcaaaagcgaggaccgcggcgcggccgaaatcggtgtggtcaaccccggcggtctgcgtgccgaattctgcaagtccggcaccaatgacgcctgcacgctcgatgccgacggcaatatcacctacgcccaggccaacgctgtactgccgttcctgaacaacctgtggaccaccacgcttaccggcgcgcagttcaaggaagcgctggaacagcagtggcagacgaacgcggacggcagcacgccatcgcgcgcgtatctgcaactcggactgtcccacaacgtgagctacacgtatgatccggatgccgcgcaaggccatcacatcacctcggtgaccgtcaacggtgagcctctggacctgaaacgcaactaccgtatcggttcgttcagcttcctgttggagggcggcgataacttccgcgccttcgcccaaggcacgaacaccaaggacaccggtctggtggaccgcgatgcttggatcgactatctcaaggacaacaatccggttgccccgcgctacgaccgccgtgcagtggccgtcaccggtatcccgaccggtgcggtcaaggccggtggctcgttcaccctgcacttctcgaagctcacgctcacctcgctgggcgtgcctgacgagacgaagctgaccgccaccatcggcgagcagatggtcggcgaagcacaggttgcgaatggcgataccgccgagctcaaggtcacgattcccgccggaaccaagaccggtgatataagcctgacagtgaccggtgcgaccaataagaccacggtcgctctgcccgttgccgttaccggagtgtccaccgggacggacgacaaggataacggcaaccatagcggtagcgtcaatgccaatggcagcaccaagccacagcagaccgaacatacggccgataccggtgcctcggttgcgttggttgtggttctggcgacgctgttcgctgcgggtggcgtcaccatcgtggtcaagcgtcatgatgcggcgcgcaagtagcgcttgaagccgcgtgcgctggtcggatgcttcagcatgatgccgacgatttgccggtcggtgatgatctctttctcgtagcagatcgtgccgtcttcctgatagctcaggtatgtttcgggccgtttgccgcttctttatgtactgcaaaacgggcgggggattggccgatagggacgagagagaacggagagagtatgaagtgccaggtttgcggaacggagatgccggagggaagccgattctgcacggaatgcggtgcgccgatggcacagtctgcgccaagcccaagtcctcagtcgatggatggcccgacgctggtaccggctgctccccagcaggtgccagcgagttcgatgccgttgcccccaagtttcaacacggcgaccgcacctacttcgacattgtcgacggcgccaggcaacggtggcgctgcgcagccgcgttccggtgggtctgccggaaagaagatattgctggggatcgtctgatccaggcgcgataagcggcagcaacgttacggatgacgaagccgaaaataatgcaagcaaggcattggattggcaggtcgagcacgacaaggactccgcagagctgttctattccacgtataccgcacagctgtccagcaagcgtaagggtatggaggctgaaggcaagacctggaactaccgcgatattcttgcgcaattcatcacgatgcacaacaagaattcaaacgtactgcttatctggtcgggtgactggcccgcctacagcagcaattccgacaaatactatgtgattcttgccggtgagggcttcgactcgacagatgaggcttggaattggtgcaaagccaacaattacggtccgaacgactgcatgcctatagatttgcagtaacaggcgaaatgtgaatgtcgctacgttgctaggtctcctgagttacaagacgtacaatcgggagcatggccaaggacgacgacagaaccaacaagcctgaagaggccggcaagtggggtacggccggaaaatcctcaggaaagaacaacaagaacggcaagggaaaggaatccaaaaccgatcgacggatcgacaaggtattacagctcgcggtggatcgcatagacaccatcgactccagtgccagcgtgcctgaacgactggcgcgtgcggcgaaatccagtgaactgctcagcgccgtatggtcgttgccgcccgctcaacgtcttatgttccaccacggcatgcaggtcactgatgtcgaaggcgattccactcccggattcgacggcaataaagaggacgccgagaagttcatttcgatcagcgcctccgaaatcgcccgataccagcggctcatgtacgcgaatggcgtcaaaggctcgacacggcggctgctcatcgtgctgcaaggcatggatgcctccggcaagggcggcattgtgcgccacgtgttcagccaaggcgacccgatgggcatccattaccatggcttcggcaagcctacggccgaggagctcgaccacgacttcctctggcgtgtgaagcgtgaattgcccaagccggggtggattgccgtattcgaccgctcccattatgaagatgtggtcatgccgcacgtctatggcacctatcccgaagacgtatggcgtgcccgctacgaccagatcaacgatttcgaacgtgaactggccgccagcggatgcgccatcctcaagatcttcctcgtggtaagccaggaagaacagaaaaaacactttcttgggaggctggatgatcccaccaagttctggaaattcgatatctccgacctcgaggcccgcgaccgatgggatgagtacatgttcgcttggcaggaagtgttcgagaaaaccagcacggccgccgcaccgtggtacctcgttccggccgataaccgctggtattcgcgagccgtggtctccgaactgctgcgcaccaccttgaagaacatgaacatgacctggcctcccctcgaacccgaggtggaccccgacgaggtgcgccgccggttggcgtgagcgatcctcccattggcggagccaagcgcatggcacggctcttcgcatggctccgcccgctggcgggaggcgtcgcatagcgacggagggcggctcgtgccgtcggaataggccactaggtagactgagcattatgactgacgagaaggaatacggatccctggggcggctggcccccgaatgggacggcgacggacgcgaacggaatcttacggccgacgacatctacgaacggttcttcggctgggtggaagacgtcaagggcatcgagccgtggccgcatcaggaagaggccattatggacctcttggccggcgaccatgtgattttgaataccccgaccggttcgggcaaatcgctggtggcgctcggcatgcacttcgccgccctatgcactggccgccgctcctattacaccgctccgatcaaggcgctggtgtcggagaaattcttcgacttggtcgaagtgttcggccgcgacaatgtcggcatgatcaccggtgacagccacatcaacgcggacgcgccgatcatctgctgcaccgccgaaatcctcgccaatcaggctttgcgcgaaggcgcccatgccgatgtgggcctcgtggcgatggacgaattccattattacggtgatccggagcgcggctgggcgtggcaggtgccactgctcacgctgccgcagacccagttcctgctgatgagcgccacactcggcaatgtggacgccatcgccgacaagctctccgatctgaacgacaccccggacgtggatgtaatcgccgacgcgccgcgaccggtgccgttgagctacgaatacacgctcgacccgatggaaaaaaccgtggaactcgccttccgcaacggcgaaaccccgatttacgtggtccacttttcgcaggacgccgcattggagaccgcgcaagcgctcgcctccaccggtgtatccagcaaggaacagcgccaagccatcgcagaagccatcaaaggcgtcaagttcaccacagccttcggcaagattctgcagcgactgctgcgcaccggtgtcggcatccatcatgccggcatgctgcctcgctaccgccgcctggtcgaacagctcgcccagcagggtctgctgccggtgatttgcggcaccgatacattgggcgtcggcatcaatgtgccgattcactccgtggtgctcacggccctgaccaagttcgacggcaccaagatgcgccgcctgcgcgcccgtgaattccaccagattgccggacgagccggtcgtatgggattcgataccgagggactggtgatcgccgaggctcccgaatatgaaatcgaaaaccagaaagccatcgccaaggccgggggagatccgaagaaactcaagaaggtcaagcgcaagaaggcgccggaaggttttgtgacctggaaccagagcacgtttgataagctcatcgacgctgaaccggagaccctggtcccgcacctgaaaatcacgcattcgatggtgctcaatgaagtggcgcagggcggtgacgcccgtgcccgtatcgacgatctcatcgacgattccgcgcagacccccgaccagaaggagcatctgcaccagcgggccgacgagatcttccaaaccctgttcgataccgaagtcatcgaaaccgaggaccgcaaggacggcggcaaggactactacatgacccttgatatgccggacgacttcgccctcgaccagccgctctccccgttcctgctggccgcgctcgaactgctcgaccccgagtccgacacctatgcgctggacgtgatctccatggccgaggccacgctcgaagaccccaagcaggtgctgcgtgcccaggagcgtcaggcccgagacaaggcgatggccgatatgaaggccgacggactcgactatgacgagcgtatggataagctgcaggagattacgtatccgaagccactggaagacatgctcgaagccgcgttcgatcagtaccgccacgatgtgccgtgggccaacgactactggctgtcgccgaaatccgtggtgcgcgacatggtggaaaccgcctccgacttcaccggatacatcacccgatacaacatcgcccgctccgaaggcaccctgttgcgctacctctcggacgcctaccgcacgctggcgcgcaccgtgccgcccgaaaagcgtgacgagcaactcgaagacatcatctcgtggctgcgcgtgctcgtgcgctccatcgactcctcgctggtggacgaatgggagaacgccggtgactccgccgaccagtccgaggcggcggcctccttggcggcgccgggcaagaagaacgcggtggtcgaggaccgtcgtggtcttaccgtgctggtgcgcaatgccttgttccgccgtgtgcggcttatggaccttgaccagccggacaagctcggcgcgctcgacaaggactggggctacggcgtgcacgaatgggaagatgtgctcgacgactactacgacgagcacgagtacgtgggcatcggcgccgaagcgcgctcgcccgaactgttcatgttggatgacaagcacgagaacgacgagcatacgtggaaggtgcgtcagattatcgatgattccgatggcgaccacgactgggccatcgaaggcatcgtggaccttgacgccacccaagacaccggcgaagtagtcttccacgactacaaggtgagtaactgattcctggctcccctctctgagggaagccaaggtgcagctcgaacgtctgttcgaacactggggtactataggacgttatgagtgagaacgatttgtttggggcggctgatgcgccggagtcgatgacacggccgttggcggtgcgcatgcgtccacgcactttggacgaggtgattggccaaacgcaggtgttgggccagggctcgccgctgcgccgcctcgccaatccggccagcaaaggaagtctcaccgcgccgagctccgtaatcctgttcggccctccaggcgtcggcaagaccacgctcgccaccatcgtggccggccaatccggccgcgtgtttgaggaactctccgccgtgacctccggcgtcaaagacgtgcgcgacgtactcacccgcgctcacgaacggctcgtgtcacgcggccgggaaaccgtactgttcatcgacgaggtgcatcgcttctccaaatcccagcaggatgcgctgcttcccgccgtcgaaaaccgcgacgtgacctttatcggcgccaccaccgagaacccgagcttttccatcatcaaaccgttgctctcccgttcggtggtcgtcaagcttgagtcattggagcctgatcagctcaccgaactggtgcagcgcgcgctgactgatgaccgcggtctcagggacgaggtcaaagccacggacgaagccatcgccgatatcgtgcgcatggccggtggcgacgcacgcaagagtctcacgattctggaggccgcggctggcgcggtcaccggcgacgaagcccgcaaaaagggcgcacgccgacccatcatcacctccgaaatcgtggctacggtaatggacaccgccaccgtgcgctacgacaaagacggcgatgaccattacgacgtgatttccgcattcatcaaatccatgcggggctccgatccggatgccgccatccattatctggcgcgcatgctgaaagcgggtgaagatccgcgcttcatcgcccgtcgcatcatgattgccgccagcgaggaagtcggcatggccgccccgcagattttgcaggtcaccgtggccgcggcgcaggccgtggcgctggtcggcatgcccgaggcacgtattattttggccgaagccacgattgccgtggccaccgcgcccaaatcaaatgccagctataacgccattaaccaggcgctcgcggacgtggataccggcaagatcggcgctgttccgctgtatttgaggaacgcccccaccaagcttatgaaagagtggggcaaccacgagggctacaagtatgcgcacgattggcccggtgccgtggcgccacaggaatatatgcccgaagagctgcgtggcaccgagtactaccatcccaacgatcgcggctatgaacacgaagtcagccagcgtcttgccaagattcgcccgatactgcatggtggggaacccgaacagaaatgaacataggggagtaaagtgtaacgcaacaataacagtggaaaaaggggaggcaaacaccatggcgaccatcttcatcgtggacgatgatcaggccatcggcgaaatgcttagtcttgttttggaaaacgagggattccagactgtgacctgcctggacgggctgagggctgtggaaatgttccccatcgtcaagcccgatttgattctgcttgacgttatgctccccgggctggacggcacggaggtggcccgccgcatcagagctacctctaatgtgccgattatcatgctcaccgccaaatcagacacacttgacgtcgtggccggcttggaagccggtgccgacgactacgtgcccaagcccttcaaagtagccgaactgctggcgcgtatccgtgcacgcttccgcatcgccaagccggccgccgaagacggtgccaccggtggcgcaagcggtggcaatgcaaacgtcaaccatctggaacgcggacccatcgtcatcgaccgtttggaacacaccgccaccaaggatggcaaggacctgaatctcactccgatggaattcgagctgctgttcatgcttgcggccgccgccggcgaggccatcagtcgttccagcctgctcaagaatgtctggggatacgagaattccggcgatacgcgcctggtcaatgtgcatgttcaacgccttagggccaaagtggaggacgaccccgagaacccgcaaatcgtgcagaccgtacgcggtatcggctacaagttcgtcactcctgaacaatgaacctgcgccctcgattcagcctcaaacgcttgctgcgccacggacgcgctgaagttcgtcgctcactgcaggcccgcaccgtggccctcaccgtgattcttacgctggccgtggccatcgtcttctctggcgtatcgatggtatcagtgcgcgcctcgctgcttacccaaatcacttcgcagtcgcgtgccgactattcaaacatggtgcagcaggcccaaaccagtctggacgcggccgatgtctccgccgtagtgcagatccaacagctggtcaatgacttggcgtcctcgttgcaatccgaggggtcctccaacctgataggtgtgtatttgtggagtcgtgataccaactcgcgtgccatcatccccgtatccaccgaacccagctatcaaagtctgatttctgacgacatccgttcgtccgtggcttccgacttggatgacagcgtgttctatcagccggtcgaaattcccggtgattccggcatgccgggcagcgggacgcccgcagcggtgctcggcaccgtattggactttggcgtggccggcaacctcgaattcttcgccatttattcgtacacgttccagcagcagtccttgacgcagattcagctcagtctggtggtcatctgtgcgttgctgtccattgtggtgggcgtagtaatctggctggtgattcgtggcatcgtgcgcccgattggacgagtggcagcggcctcggaaacactggcctccggcaatctcgatatgcgcgttaccgtggatcgtaaggatgagcttggtgtgctgcagcaatccttcaatacgatggctgatgcgctcaaccagaagatcgatgagctggaggaagcaagcgttttccagaaacgatttgtgtccgacgtcagtcatgaattgcgtaccccggtgaccaccatgcgtatggcttccgacctgctcgaaatgaaaaaagacggcttcgacccctccaccaagcgtacggtcgaactgttggccggccagatcagtcgattccaagacatgctcgccgatctgttggaaatctcccgctacgatgccggttatgcggcactcgaccttgtggaaaccgatttatgcgaaccaattgaaacggcagtggaccaagttgacggcatcgcccaagccaaacgggtgccgattcacacgtatctgcccaatgtgcaggttttgactcgtatcgattcgcgtcgagtgattcgcatcgtcagaaatctgttggccaatgccgtcgatttcgctgaggaccggccgatcgaagtgcgcgtcgcggccaaccgcaaagccgtggccatcagcgttcgcgactatggcgttggtatcgacgaagacaaagtcgctcatgtattcgatcgattctggagaggcgacctttcacgttcacgcgttaccggcggcaccggattgggcctggccatcgccatgactgatgccttgctgcaccacggtagtatccgtgtacgttcggcagtgggggagggcacctggttcttggtattgctgccgcgtgaccccgaccaaggtgaggtggcggacgctgaactgccggtgaattttgcttctgaaacgccggatgacctgcgtgttaccggtgggtttggtgtggccaccagccaagtcacacatgattatcatgaggttcgccgcgacacgatgatggggaggccactatgagacgagtgaccagaacgattgccgccgcaggcgcggccatagcctgttgcatcacgatgacggcatgctcaagtccgttcggtttgccgattagcggctcggtgcagactctggcaccggtggaacagcagacccagcgtgtttacaccaatcctcaggggcctgcggacgatgcacagccggaaaccattgtcaaagggttctatgacgctatgcctgctggcgtgcagtccgatggctatcgcgtggctcgcgaattcctgactggctcggcttctgccgggtggaatggagattctgcggcactggtatacagcggcacccctgatttccgccgacgcgccaacaccataagcgcgccacaaggtgcggaaagctcactgattgtggaagtggaacttcaggtggtgggttccttggattcgcatggcgtatacacgccgtcaaacagcacccaaacgcgcaggcttccctatacgctgatgaagaaaagcggccaatggcgcatctcgtcattggaaagcggcgtggtgatttccaccgcagattttgaacaggtgttccgccaagtatccgtgtatcaggtgagtacttccggcaagcaacttatcccggatattcgttggttgagctggcgcaactggcgcacccaggcagtcggtgaagtgctctcggatgcaccctcctggttggaaggagtgctgcgaggcgccggcttgtctaccatcaaactcgcggtcgacagcgtgccggtgaagaacaatgtggtggagatacacctcaacagcggtatcaatgcgttgaacgaggaagaacgaggcctgctggtacgtcgcatccgtctgactatgggcgacggcaatgccgaatacgcgctgaggattaccggcgatggagtggactattccgatgccgacgcaaatgtgaaacttactaccgagcagccgacagcgggcgtatacacgctgaccggtggtcatatcgtttccctggccagctccagtccgttgcgtgtaggggaggcccccggatatgacgatgctcggggcttcgttttttcctcatccggcggcgcggtgttgcgtgcggacggcgtggtcgaatgcctgaaatctgatggtgcgtcctgtggggtgatgttctccggcgagccgatgcgatcgattaccgaaggtctggatggcgaagtatgggctgtatccgagaacgggcgcgaattgcatgtgtcagatgggggcaaggaaaccgatctgaagcttgattggcttggtgctgccgacagcattgtggcattggcggtttctccggaagggtgccgattggcgttggcagtcaggggcgaggacacgaacggcgtgatgatgaccggtgtggcgcgcaacggtgataaaacactgagcggtctgagcaaagcggccacccaagtgagtgtgctcaggcacgtcaccatgctcacgttctacaatgatctgaatctggtgtacgccaccacacctcctgagggaaacagcgaacaacaagaggcatggcgtcaaatggcaccaggcccggccaatgcgcagcgtttacccaatggaatcataacgtcgatggcatcggggcagatcagcctgtctcgtcgcctggccattgtggacgatttgggtattgtgcgctccgtttccggctcactcgacggttcctggaccatcgccgatagccaggtcactgccctcggtgcgcagtagatggtataagaaaaacggtgttcataataacttttcttgtgttgtgatgcggcggctttgtcgctcggctgacgagcggcattgccgccgtgcaaccacctcttattatggcttaatgacaaggcaaaacggcgctgtgaagccgttttttgaactactgttatcaaactgttataaacctgttatcaaactgttatcgcatgcgattgaacatttggcctgtgagcgtcacactagagattgtcgatgacgaacagtcaccaaacaggatggaagatcatccaaaaaataaacactgctcgaggaggagtatttatgaagaattggaagaaggccattgccctcgttgcttctgctgctgcgcttgtcagcgttgccgcatgcggttccagcaacgcaggtggcagctcggactccggcaagaagacggttggcttcgttgctgtgggccctgagggcggcttccgtaccgccaacgagaaggacattcagcaggcattcgaggatgccggctttgacctgacctactctccgacccagaacaacgatcagcagaagcagattcaggcgttcaacaagttcgttaacgacgaagtcgacgccatcatcctgtcctccaccgaggattccggttgggatgactccctgaagaaggccgctgaggctgagattccggtcttcaccgttgaccgtaacgtggacgtcaagaacgccgaggccaagaaggccatcgttgctcacatcggaccgtccaacgtctggtgcggcgagcaggctgccgagttcgtgaacaagaacttcccggatggcgccaacggcttcatcctcgaaggccctgccggcctgtccgtggtgaaggatcgtggcactggttgggacaacaaggttgcctccaacgtcaaggttcttgagtcccagtccgctaactggtccactgatgaggccaagaccgtgaccgctggtctgctcgacaagtacaagtccgacaacccgcagttcatcttcgctcagaacgacgagatgggcctcggtgccgctcaggctgttgacgccgccggcctcaagggcaaggtcaagatcatcaccatcgacggtaccaagaacgctctgcaggctcttgttgatggcgacctctcctacgtgatcgagtacaacccgatcttcggtaaggaaaccgctcaggccgtcaaggactatctggatggcaagaccgttgagaaggacatcgagatcgagtccaagaccttcgacgccgcctccgccaaggaagccctggacaacaacacccgcgcctactgataagtctgctgcgactcattgataactggaccaaataattggtgtgatggtgtgagaaggatgttccttccacaccatcactcatgtgtggctcaaatatcacaaaacgataacatctcattctcgtttaaggcaaagacatgacagataaaaaccccatcgtcgtaatgaaaggcattacgattgaattcccgggcgtcaaggccttggatggtgttgatttgactctctacccgggtgaagttcacgccctgatgggtgagaacggtgcaggcaagtccaccatgattaaggctctgaccggtgtgtacaagatcaacgccggctccattatggtggacggcaagcctcagcagttcaacggcaccctcgacgcacaaaacgccggtatcgccaccgtgtatcaggaagtgaacctgtgcaccaacctttccgtcggtgagaacgtgatgctgggccacgaaaagcgcggccccttcggcatcgactggaagaagacccacgaggccgccaagaagtatttggcacagatgggcctcgaatccattgacccgcacactccgctgagctccatctccatcgctatgcagcagctggtcgccatcgcccgcgctatggttatcaacgccaaggtgctgattctcgatgagccgacctcttcgctggatgccaacgaggtcagggacctgttcgcgatcatgcgcaaggtgcgtgactcgggcgtggccatcctcttcgtctcccacttcctcgatcagatttatgagattaccgatcgtctgaccattctgcgtaacggccagttcatcaaggaggtcatgaccaaggacacaccgcgcgacgaactcatcggcatgatgattggtaagtccgccgccgagctgtcccagattggtgccaagaaggctcgccgtgaaatcacccctggcgagaagccgatcgtcgatgtcaagggcctcggcaagaagggcaccatcaacccggttgatgttgacatctacaagggtgaggtcgttggcttcgctggcctgctgggctccggtcgtaccgagcttggtcgactcctgtatggtgccgacaagccggattcgggtacctacacgctcaacggcaagaaggtcaacatctccgatccgtacacggctttgaagaacaaaatcgcgtactccaccgaaaaccgtcgtgatgagggcatcatcggcgacctgaccgtccgccagaacatccttatcgccctgcaggcaacgcgcggtatgttcaagccgattcccaagaaggaagcggacgccatcgttgacaagtacatgaaggaactcaacgttcgtcccgccgacccggatcgcccggtcaagaatctctccggcggcaaccagcagaaggtgctcattggccgttggctggccacgcaccccgagctgctgattctggacgagccgacccgtggtatcgatatcggtgccaaggctgaaattcagcaggtcgtgcttgacctggcttctcagggcatgggcgttgtcttcatctcctccgagcttgaagaggtcgtgcgtctgtccgacgacatcgaggttctcaaggaccgccacaagatcgcagaaatcgaaaacgacgacaccgtctctcaggcgaccatcgtcgaaaccatcgctaacaccaacgtaaacaccggaaaggaggcatgagatggctgaaaaggcaaaagccgagggcaacaactttgtcaagaagctgctgagcagcaacctgacctggtcgatcgtcgcattcattcttctggtcatcatctgcaccatcttccagcatgacttcctggctctgagctggaacagcaacaccggtggtctggccggcccgctgatcaccatgctccaggaatctgcccgatacctgatgattgcaaccggtatgaccttggttatctccaccgccggtatcgacctttcggtcggttccgttatggcagtggcaggtgccgccgccatgcagaccctgtccaatggcatgaacgtgtggctctccatcctcatcgccttggctgttggtctggccattggctgcgtcaacggcgctctggtttccttcctgggcctacagccgttcatcaccaccctgattatgatgctcgccggccgtggtatggccaaggtcatcacctccggtgagaacaccgacgcctccgcagttgccggcaacgaaccgctgaagtggttcgccaacggcttcattctgggcattcccgccaacttcgtcatcgccgttatcattgtgattctcgttggcctgctgtgccgcaagaccgctatgggcatgatgattgaggccgtgggcatcaaccaggaagcctcccgtatgaccggtatcaagccgaagaagatcctcttcctcgtctacgcgatttccggcttcctcgcggccatcgctggtctgttcgccaccgcatccgtgatgcgtgtcgacgtggttaagaccggtcaggacctcgaaatgtacgccattctggcagtcgtcatcggcggtacttcactgctgggtggtaagttctccctcgccggctctgctgtcggtgctgtaattatcgccatgatccgcaagaccatcatcaccctgggcgtcaacgccgaggcaactccggccttcttcgccgtcgttgtgattgtgatctgcgtgatgcaggctccgaagattcacaacctgagcgcgaatatgaaacgcaagcgcgcgctcaaggctcaagctaaggcggtggcagcatgacaacagctacggcaaacaaagtgaaggctcccaagaagggcttcaagctcgatcgtcagatgatcccgaccctcgcggccgtggtgatcttcatcctgatgatcatcatgggtcaggcgttgttcggcacctacattcgactgggcttcatctcctccctgttcattgaccacgcctacctgattattctggctgtggccatgaccctgccgattctgaccggtggtatcgatttgtctgtcggtgctatcgtggccatcaccgcagtcgtcggcctgaagctggcgaacgccggcgtgcccgccttcctggtcatgatcatcatgctgctcatcggcgctgtgttcggcctgctggccggcaccttgatcgaggaattcaacatgcagccgttcatcgcgaccctgtcgacgatgttcctggcccgtggtcttgcctccatcatctccaccgactcgctgaccttcccgcagggcaatgacttctcgttcatctccaacgagatcaagatcatcgacaatccgaagatctccaacgatctgtccttcaacgtcggcgtgatcatcgcactggtggttgtggtcttcggctacgtcttcctgcaccatacccgcaccggacgcaccatctacgccatcggcggctcccgttcctccgcggaacttatgggtctgccggtcaagcgcacgcagtacatcatctacttgacctctgcgactctcgccgccctggcctcgatcgtgtacaccgcaaacatcggctctgccaagaacactgtgggtattggctgggagctcgacgccgttgcctccgtggtcatcggcggtacgatcatcaccggtggcttcggctacgtgctcggctccgtgctcggctctctggtccgctccatcctcgatccgctcacctctgacttcggtgtgccggccgaatggaccaccatcgttatcggtctcatgatcctcgtcttcgttgtgcttcagcgcgcggtgatggcggtcggcggagataaaaaatagcgggcttgcccgctcggtctccgcaccgaatacgacacacaccataactgaataggcgggatcagcccggctgctgtgatggcaaggtcacagcagccggcactgcccgccaaagctttctttctccttttcttcctttcattagcgtgtggggcgtgccccggggttctcccggggcacgccccacacgtgtttggaaagctgggactctattgatgatcggatttatgcacgcttacgtgccgcgcgaatgcggaacgcggtggccagacagcaccagccaataaggcagataaccgtcatcgtggcaaacgtccatgtgccgccgacggcagtggcgtgagcaaactcagcggtgccttcttctcctgcgccggcctgagccacggaaagaatcgtggagaacagtgcggtaccggcagcgccgccaaactgaagacacgtgttgaaaatggcgttgccgtccggcttgaactcgggagagacctccgacaggccactggtcatcacattcgcattgccgatggaatagaacagaccgaaaatgaaatagaatccggcgagcagcacgggcgtaagctgcatcgagaacaccagcataagcactgggcccaaaatagcgatgccgatcggaatcagaatcggcttgaccgcgccgaacttatcgtagaaccagccgccaagcggggcacagacagcgccgaccagtgctccgggcagcaccagagagccggccacaaatgccgtggtgccgagcgagagctgtgccacattggtgatgacatagccgtagccgatggcgaccaatggcagcagcagatatgcgcaggcgtgtaacagtacggcgggatccttgagaatgccaaggcgcagcagcggggagaaggcacgcttggaactcatggcgaacacgatcaacaaggcgaggcccacaatcagactgacaatggcgataatgccggagcgtgtggctgacttgccggacaccgccgcactgatggccacgccaccttggttgagcgccagcaccagaccgaccaacgcgacaacaatggacccaagctgaatcgggtcaagataggcagcctcggtcggtgtcttctgctcaatgcacttcatgccgatgcatgctgcgattagcaccagcggaatggcgatgacgaaaatcgcgcgccacggcagcactgtggtcaccgcgccgccgacggtcgggccgatggccggagccacggtaatgaccagcgatcctacgcccatcaatcggccgatcttcgaacgaggagactgctccagaatgatgttgatcatcaacggcgtggccacgcctgagccaatgccctgaataatgcgggcgacaatcagcagcgggaaggcttgggcgacgatcatgatcagcgagccaacgatggccagaatcacagccgcaagaaaaatggttttcagtgagaatcggcgcttcaaaaacgagctgatgggcatggtagcggccaccgccaacagataaatcgtggtaatccattgcacagtggccgtgtcgacatggaattcgcgcatcagtgcggggaaaagcacggtcatcacggtttcggtcagaatgccaatgaaggcaagtgagccgacagccacaatcgcgccgataagacgtgtgggaatcttctcgttatcaatatgctgctcaggcatacatgctcctaaacgttcggttgcaaggtatggaagtaaggtttaccaaccggcgtaggtacctgtgcgtgcggataaaccggcaatcgtactgccttggctgcacgctatggaatcacaaaaccacctgtgagtgtacggttcggggcggacgctacggtcgatgcgcaatgggctgtcccttggtttggtggggtttgatggggcgggttcggcattggtccggcggggcgggttcggcattggttcagcatgaggaaacacgcgataatatccgccctgccgcctagtttggtgaaccatgggtattgagaacacgcataagctgattgtcaactgcctgccactcaacgaaggagaacggcgcgctttcgccaaggcggcccgcgatgtgccgcaggaattcgtgggcgacgaagcgcaccgcggcgacatggtatggtcggccgctgttcccgaggagcttcgctcccgagccaccgcagtcatcggcaactttccggtctcgcaggcttcccaatacacccgtcttgaatggttgcagaccttcagcgccggtgtggatgcgtacatccgcccgggtgtgctgccttgcggcaccatggtcaccaatgcgagcggcgcgtatggccaaagcgtgtcggaacacatgttcgccaccatgtgggcattgatgaagaacctcaaccggtatgcctccaatcagcgtgatcatcagtggcaggatgaaggcccggtattgagcccggaaggtggcatcgcactgattatcggcgtcggcgacatcgggtcgcatttcgctcagcttgcccaatccgtaggtatgcgtaccttcggcgtgcgccgtcatgcggacgtgccggccaagggcattgaaaagatgtatggcttcgagcggctggaagcactgctgccattggcggacgtggtggcgatggcggtgccgcgctcgccgcagacccatcatctgctgaatgcggatcgtctggggcgtctgaaatccacagccatcgtgatcaatgccgggcgtggcgacgccatcgatcccgaggccttggccgacgccttgcacaatggacggctccacggtgccggattggacgtcactgagcctgagccgttgccggcggaaagtccgttgtgggatgagccgcattgcctgatcaccccgcatgtggccggcggcaatcatttggaaaagacttccgaacacatcatccgcatcgccctgaccaacgtttcccgctatgccaaacagcaggaactgttgaatctcgtgcgatactgattcgcctgtatcgggtgtacatgaactcatgtacacggccggcgtgtcgcatcccacggaggctgcggcatcgagatgatacctgcagaggcgtggttgatcagaggcccaatgaacgtggcccgaggtcagtctcagtctgatagttcgtagccgttggcgtctttatgccacggcgagccgggcttgctgcacagaatgatgatgccttcaacaaagccccagatggcggctgcgattgggccaagtccgagcagaatccagccgacaagcgtcagcagcagctgggccacggccttgccggtgttgccgagatagaagttgtgcacaccaagtccgccgaggaagatgcccaacaggccggcagccaacttggacttggatgattgccacaccggggcggcggcatacggagcggcggtgtattgcggctgtgcgtaggcattcggctgctggtaggcctgtccatagccgggctgctggccgtagcccgctgcgggctgtgcgggctggccatactgcggctgagcgtactgagactgagcgtatgcgccggcgggctggccgtattgcggctgctgctggccgtagcttccggcggcgggttgagcgtatgcggcgggctgtggggcgccatagccctgaggctgccgtgcggcatcttggccgtacgacggctgtgccggctgtgcaggttgtgccggctgcggaacactgtccgaaccgtacggttgttgttgattatcagtcatgtgggtctatcccttctcaatcgggaacggcagtaccttcttaccgtttctgcacaacatcatctcacgttttgcctaatagtaaaacctgccgcgctacgattgggccatgaaaagtttcctgaccagctggttgattatgactatcgccgccgccgtcatggtcgcggtgactcccggcatgaccccggtgggggagcctccgattctcggcatcgccgcgttcgctttgttcatggcgctgattaatgcgtcaatcaagccgattgtgcatctgatcgcactgccgtttgcgattctgtctctcgggctggtcaccttgattatcaattggctgttcatgcgactcgccagctggctggcggtcagtctgttcggcgtgggcgtcttcgtacacggtttccggtggtcggtactggggtccttggttctgaccattgttgcgggaatcgtcgggtccatcttggatcagtgacggtgctcgctgggcgaatatgaataatggcggttggaatcggactgactccgcaagtggttccggattgttgatttttcaacgattcggaaccttttttcatgccgggaatcggtatacatttcggtatatatttgaaggcatgaacggcacggttttctatgacgcgaacaacaagcgatgga

SEQ ID NO: 3350 - DNA, 6956 bp, Unknown
  R151_18m  MAG No. k141_18843
gccgcctttgtggaagagtagtgcgattggaacggcaaacccagccgtcctccaatcgagccgacaacgatgactcgtccccgcttacggttgcgtgccgcggtacggcgcagcaacggcagtgcgatttcgttgacctgcaacacgccaaaataattcacatcgaactgcttgcgagcgagcgtcattggtgtgcattccgcagaaccagcgatgccgaatcccgcacaatggacgatggcatccaatcgggggagagcgctgagaatgcgcgtgatgtcagccggcttggtgacgtccatctcgtaggtaaacagttcgccgcggccaatatgctgagtctcgggaatgctctcctctgtatcgagtcccgccgaaactacatgccagtcccgcacagcgagcattcgcgccgtcgcctggccgataccactcgtacctccggtgaccaatgccaccagccgtccatcatccttgattggttccatgtgtactattatcgcgcggtggcgatgacggaatcacggcgtagtgatgacagcagattttgataatgatgaaatccttagtgcaggcgaaagccgcgcatggagctaatgcagtattccttcctgggatgaagcacatatttgctatgtcgttcagtcctgactattgtagtaaatggactttaagcttacgcgtggtttgggtccgtggtcggtgacacccccgctgatccgttgggttccgctgaaagagttggagctgatgacggtgactgtgggggtgtgctgtttttcaggtaatcgacaccgtacttgaggaaatcgtagattctgatgtccttgcgtaggtcgtagtcgagctgttctcccgactcgattttggctttggccacggtcttcaagaggctttcaagcccagtgagatcgatttcagattggtgtagcagaacaaggtgtttgtaagcgtcattggggaatacgctgatgaggccggcaatacttttgtcctgtaactttactcgtctggtctcgcgaatccttcgatctgtgttgttgagatatgcctccattgtagttttatcggcgagctccttttgagttcgctgacccagcggtccgtcataacgttgcaaatagtagtacatgggagcgccgccctgcttcaacatcgcatccaagtattctccgataaccagttccggtgagaattgcttgtttttgaagagtgcatcttcatgaagttcagacaatgttactttgcggccgtagtccatcactccgacgccaacaatcacatttttattgggcgggagttcgtccatatgcgaaagttccacggcgactacgctctctgcacctgttccggtataagaagctttgtacagctgcctcagaatttggttcagtactttcggcgcatagcgttgattggttggggctgcggacgttttcttggagaccgaacggaaagattttcgtatgtccggtcttgaggaacgagagcgtgcggtggagttgtatttcaccacgccgatgacgacggcccaggtggtggagcatctgggttatccgaccaggcagtgcctggagcgttggctggcgatggattcccggtatgctggccatatggccaaacccatcatcccactggagaccaggcgaagggcagtcgagctggtgctgggcggcatgcagcagaagcaggccgccaaacagctcggcgtgagcgtaggcgcggtgcatggctgggtcagggcgtaccgcaagggcggcatggccgcgttgcagcccaaaaacaggaacgccgcgcagggcaataagcccgctgactcccgccgccggccgtccgcagccgatgatgatgacgcggaggctttgcgccgcagggtcgaggaaccggaaccgggggaacgcgttgatgagggaggtggtggaggtcgcagaaaaagaccccggcgccgacctgcggcgcctgtcgaacagggagaagaccctgttgatcgaccggttgaggccggcgtattcgcccggctcgatgacatgcttgcccggcatcgcgcccagcagccacctactgccaccacgccgggctgagcgttgacgaatacgccggactcggggcggaggtggccggggcgttcgccgattccaagggcaggtacgggtaccgcaggatcaaggcggtgctcaagaccggcgtatcggagaagtcggtccgcaggatcatggcggaggaagggctcgtggcgcacgtgcccaagcgacgcaggtatagttcctacgagggcgagacgacgccggctcccgccaatctcgtcgaccgggacttcacggccgagcgtccgaacgagaagtggctgacggacatcagcgagatcaaggccagggacgggaagggcgtgcctctcgccgccggtcgactgcttcgatggcaagatcgtcgcatacaccgccggcttcagccccaacgcggagctggccaaccggatgccggagaaagcggcctcgacgctgccggggaacgcgcgtcccctggtgcactccgattaagccgggtttgttgttaagccggggaacggttcggggtcttggtggctggccgtgtcccatgtggtttcccggcttaacgttccgggttatttgagggtgtgtagttgtcggagtcgttgctcgctgagccatgtctccttggaggggtcggggccggggttggccgcatcgacggctttgcgcatcatgtcgagggtcgcgaacgcgtagaacgcgctggttgtgctcatgctttcgtggccgagcagttgcatgatgagcggtagcggcacgccctgttggtagaggtccatggcgcgggtccggcggatcaggtggcagtggacgcgttcgggcatggacgggcacgtcccgcggcgtgctctggccgccgcggttttgaggatctcgtcgatccggtccacggagagcggctggatggcgccgttcctcgtcgagtggaacaacggcctgtcgccgtcgcgcatggacggtccgggatggaattcctcgaggtaggcggccaggtgggttcgtgtcctttctcccaggggcacgacccggctcttgccgcgtttgccggtgagcgtgaccctggccggcttatccatacccacgtccgcgatggtcagtgcggcgagttcgccgatcctggcggcggtgtcgtacatgaggatcaggagcatgcggttcctgcgcgatttggcgtcgccggtgccccatgcggtcagcaacgctttggtgtgctcctccccgaggtggtcgacgggtttgcgcgcgggtggtttgacacgtatgccggccgcgtcgttgcccagcgcggtcaatgccgggtgttcgaggcccgcgtggtcgaggaacacgcgcatcgtcgtcatcctcagcatgatggtgcggtccgagtacccgcgctcggtccgcatccattcgacccaccggcccaggcgcgcccggtcgaaatgcccgaaaccgatgtggctgcgctgcgtgccttccgtggtttcgagccatcggacgtaggattccaggccgatgcggtacgcctcgacggtcttcggcgagctgccccgcaccttgggcagccagtggtgcagccagtcgcgcgcgactcgccagaagtccggttcaccggagctggcggccgttttccttgccttgctcatggttcctccgtttccgggaccacgcgttcggcgtcggcgacgaggtccgcgtatccgtccatgaaatcggggctggcgtgcacgtagtagagggtgctgtcgatgccggcgtgtcccatgtaggccgccagatagggcagcatcgccatcacgtccacgccgtcgcgagtccaccgctcgatgttcgcgaacgcgaaccggtgccggaaatcatagggcctgggccgtttgccggcttgtggccactcgagcccggcccgcgtccagacgcggcggaacaccacgccgggcatgcccggggagaccggattgccggtggaggtgacgaagaacgcgggacggtcgtctccgaagcgttcgcgggaccgttggtcgcattccagcagttcggcggcgacctcgtcgcccacgggcagcctgcggctgcgaccggccttggaatcgaccacgtcgatggaacgggccttgtggtcgacgtgcccgacggcgagtctcctgacctctcgggtgcgcagcccgcagcaggccatgagcatgaagaacgcgcgagactgccacgcccacggcgacggagactccaacgttcccgcggcccgcaggaacagggcggcctcgcggtccgtcagcaggtacggcgtcggacgcggggatccggccttccactggtcggagagcacgtacgcgtcgggatcgtgggccagtcgcatccacctgccgaagtccctgatgtacgagaaccacgagcggcaacccccgggattcgcgtcgatcctatgggcgatccatcgctccacgacgccccgctccagacgcacggccccgtgttcgaggcaatgccggtcgaacgagcgcaggacctggacgcgggtggcgccatgcctgcccatggacgccttgaaacggatgtactcctccaattcgccggcgagcgggccgacgaatccgtgttccgtgggtctcatgacgatccgccttccggcacgggcagcacgcacgcgagcattcccccgcggtgcgtggccatgtagacgcgtgtggaatcggggtcggcgtggccaagcaccgcgctgatcgtcggcaacggcgtggccgcctccagcatcctcgtcgccgcgttgcgccgcaacagccgggaaccgccccggcgtccgagcccggcgtgccgcatgacacggctgatcgcctcgtacaccgatgaatgaccccgaagcgcgacatggggcgccttgtaccgcacgaacacacggtcgtcgtcggtggcgggcctttcgtccaacagccaggacgccagcctcgcggccagcagtcccgtcatcggcacggtcaacggattgcccgtctttcgctgcaccagacctatgctcatggaatcccaatccacgtcggcgatcctcagaccgatcacatcgcatgccctcagcccgcacgtcagcgacagcagggtgatcgccgcgtccctcgacggcaccgaccgcgaggcgcacgcctccagcaagcggcggtgctcgtcgtcgggcaacgttcccgcgatcgcgtgggtcctgcgtatgccggccaggccgattgcgtccgccaggtcatcccgcccgagccatctgaacaacgggcgcaggtccgacgcggcgtgccgcatcgacgactccgaccagcgtgaacgcagcccggccaggaaccccagcacatgcgagccatccgaaccgtccaacgacacgaccccatgagattccagccacgtgaggaacaagcccgccatccgacggtaatgccccaccgtcgccgaagccagtcccgaaccggcgagatacgcctcccaacgctccatgaccacggccaaacccggaaccaccggctccgcaagcctgctcctgcgccacttgcccaggtccaccgaaccggaccgcagatacgagtcgcacaaacgcgccagcctgccgtaatcgaaccaccgctgcctgctgaaaccgcccgtccgctcactgaaggtcgacgcggcgaaccccgcgcccgacccacgcgtgtacaccgcatccgggcctccggcgtaccgttccaacgccctgatggacttgcggtactggcctatggtggattccatataaccggccccgtaaagcgcgcggaccacctcgcccgcgacatggccaaccgtcgtctcacccatggcaaactccttcgttcgaatcaaatgggacaagacgaacataacccggaacgttaagccgggaaaccacatgggacacggccagccaccaagaccccgaaccgttccccggcttaacaacaaacccggcttaatcactgttaaaccgatgtcggtttaattccgaccgcggctgccactaccggtggccggaatggatccgcatctgcatggacaacaacctgacgcgttcgatgagcgcgaaaggctgttctccggacaacgcggccgcggaggggttcttcggccgtctcaagcaggagttcttccacaagcgcagcttcgcgggcgtctcgatggacgggttcatcaacatgctcaacgactacatggtctggtaccgggacaggcggatcaagacggagttcggcatgagcatcatggatcgtcgacgcgagctcggtcttgtggcatgattggtggtgatggaatcaacgacgagtccaacaaaacggcaccagccccaaaccgaaaaaaattagtgacgaaacacgaaacaccgacttgactaaaaacatttcagctcctcggggaccggaccgtgcctcaacttgcgttggccgggcgcgagctcgtcgatccacgccatgagcagttccttgcttttcggatagccgagcatccgcatggtgcggctgagccgtctgccgtattcgaggtaatggtccaccgcggcccgtttctgcccgtccgtgtaccgcctgtagcgttccccgcgcccggagggaacgccggtgcgctcctcctcgagccggtccgcgtaccacgacagcaacacgcccttgctgggatagccgagctcgcggatcacgtcggcggcgcagcgttcgtatttgatgtacaggtccacggctctgtcgcgctgctccctgctgtacttcgccatgagggggttctcctcccggtcagggagtccaagaaaacgtcaccacctcggaaaaagcggcgggtttcagtccagttgagcggaaagacccgccgccattattgtttggtttctatcccatcagggcgtgggtgcgcctgtacgactcgccctcgaacctgatcatcctgccgtgatgcaccgtcctgtcc

SEQ ID NO: 3351 - DNA, 9897 bp, Unknown
  R151_18m  MAG No. k141_19066
attttcacggattttcaatattatatattttcattcaaatacaatgaaaccggtgatttgtattctcaccggtttcattattggatatggattggattcatatattatatatcaaacaatccaatcatattcgtttcagttaatcattttcgccgtatcactggcgctattcatcaaatcactattttgattaaacatctcgggtgcgatataaacaacaacagccacgccgattccaatggataggaagttaatgaactgactccattgcctgttcaacaggaactttaatgatagtgcacccattaccataataacaataggacttatccatttttgaaccgccgcattccaaacttcctgcaatgttgcaatgtccgccgcataaacaatactatttaaaataatcataatccataatcctttgttgaatgttttcatgaatcatctatcaaaaggaaacggcgcgccggtttgttccttgtaccggcacgccgcaatatattatttgatgacaatgtttaaatatcatggtttcatttttttaaaacgccgccgtcaggtggacactattctatctatatttaagtataagaatccctaccctcgggatcttttttgaaagaatccggtctataagggcatacggtgatacacggtgtaggctccaccggacgttactccatcgtttgccaggctctcgcccttttgctacctacaaagaccccaacattagaacaagatttcacatgtaacgcgttgtatcactgccgcgttaatgctatctgaaacctcacctgtatgtctattgcctaccaatgtttgaaccattacattgaaaacgataccaatattttaaacaggtttttaagttcttagttcacttatttcatacacatgctttttgacggcgcatgactgcctgattctcatgatttcaatctcattgcggttcatgttaacctgatttacatttcattgaaatgctgtatgaaagtgctcattccaatgaatgccattcatccaatcaatccatgatttcaatctcattgcggttcacgattacctgaaaacaatcgccggattcatctcatgattggattaacaacttatgcgtaatccgacgcggttcatttttatctttatctatgttatcaatttgaaaccatgaaccatactcactgttacggaatccgatgattcacggtttcaatacttattatctatcaaaccgtcgtttgaaaccattgaatattgaatagaatcattctacggcggttttaacgcggtttcagcatgaacatgaatacttcatcgtatctcatatgaaaagccgttagaatgccgtttaaacgcgtttttgaggcatgtatgacgcaatccagtgaaccattccatatgaaccatggtttcatacactatgaaatgtgaaaatattgtgaatattccataacgctgaaaccatggtggctgttaatggtggctattacatgtacatggttcaaaccattgaaaactaatgcttgctcacattgaacttgaatgttgtggtctgctcgtttttccactgtttccaatgcctgcgggcgtcctgttccacgtcgggcactctaaaggcactctatttcgttgtccactccattatacgtgacagtgcattctcccccataacgacgaaaagcccccgaaccataccgtgagtgcggtaggttcgggggcttcttgttattcggccttggatgccttggccttgagggtgcttgcgccgatgacgacgccgatggtcagggcgacggcgttgatggtggtcgcggccggatcggcccatgtccagccccatacggggccgagcgtctgcacgagcacgccgatggccggcagcacgatcagcgcgagccatttgagcacgtcataggctcggttcggcagcagccaatcgggcacggtcggggtcgcggcggcggtcttgggttcggtgttttcgtcggtcatattgtcctcgattctctggatatgaacctagggacctcgcccggtgtcgagtgcaaggttcctaggtagggttcgggctctcagtagtgcagcacttcgccggggtagatcacgttggggttgccgctgcggtagccggtgagctgcgtgtagctgatgccgaggcgtgccgcgatgccgctgagggtgtcgcctgcgcggacggtcacggtacgggacggtggggcgttgctgccggtggcgacgctgccgccgccgttgtaggtgacgacctgaccgggccagatgcggttgatgttgccgctgggcacgctccacctggacagcggccacaggccggtacgcgaggcgatgccgctcatggtgtcaccagagcggacggtcacacgtgtcgcggtggaggtcgcggcctgcggcgtctgcgtggcagcgccggcgttgaggcgttggttgacgatcgccatgaccttgtcgtagttcgcgccgagcgcgtcgcgtcgctgctggccgttgccgtagtcgccacggatggtggcggtggcgagggcctgtaggtcgatggtctgggtcggcggcttctcgggctgcggcggcgtgaccggcttggccgcgcctgcggggttggcgtaggcctgccactggccggcgtcgcctcggaagtagttcaggtcgagcggcccgttgtagccgctgacccaaccgttcgaggtgtactggcgcatggcctcgccgtagatcgagtagttccacggtcggctctggtagccggtcggcgcgttgctggcgtactgtgcgacccagagtccgcagttggctctcacgtcgctggggatctggttcaggtatccggcgctggtgtacaccatcggccatacgccggtgagcgtgtggacgcgctgcgcgaaccggcgcacccagtcgccgtttccccactgggtgttctggtaggactcccagtcgagcacgagcacggccttgccgatgtagtccctaacccggccgacgaagtagtcggcctcggactcggcgttgttgccgccggcgtaatggtacaggccgaggctcttgccccggtcagtcacgcacttggcctgcgtgcgccagctcccgctctcgaagccgacgccttgggacaccttgacgacggcgaagtcgtagctggcggtgcaggtcacgttctcggcctgccagccggacacgtcgatgccgaccatgtcggccatggcgatggccggcgtggcggcgagcagcattgccacgaatgccgcgatgagggcctgtagcggcttgcttttgttcttgattttgcccaattcggttccttcctgtgtgttgggtgggcatgaaatagcccccgccgggatcggcgagggctaagcctgtggttttctcggggcgatcggcgcgtcctgtatgtcctgattgacttgggtgccgtggccgttgccgccgaggctgtggtaggtgtcgtagacgagctgcgcggtccgtttggcggtgttgtcggcgatgccgtcgttggcgaccatttcgcgctgcatctgttcgagcttgcacagcaggagcacgcgcacgccggtctgcatggcgtcggatttgcgtcggtagccgcgccaccatccgagcatgtacccgcctagggcggtgatgatgccggtggcagcccagacggtgagctgctgggctatggggttcattcgttcccttcttcgcccagggcgtcgatgtactccttgacggcttcgcggcccgcttcgggcacgtcgtcgatggtcttgcggccggcgatgacgaggcgggcgtagacgcggatcatggctttgctcatgcttcacctcccgcgaggagctggtagatttcggccagagcctcgtcctgatcgaggcttgacgcctcgagggtgctgagtcgttgactgtccgatttggacgcctgcaaacagtcgagccaaatgctgtcggcctgctcgatggcctcctgttcggtcaggtcgcgcacggtataggcttcgtcggcggtgtattccgtccacgtggcatcgccgtcctcgtgcacgacggtggcgatgttgcggcggatgcggatgtccgcgaggccgtcgccgcgcgggtagtagctgacctcttcgaggggttcggggctggataccgtctggagcatggtggtgccttcctgtgtgtgatgggcgtcgcgctgaggtatcgggtcgcgcggcgcatggttgaatcgatgcggtgcctgcgtcggtattggatgctgtcgctgttgcgcaggtacccgtagtaggagcagcagcggcgcgcgatgaacgtgctcattggccggcgtcgggccttgttgaacgttcggcgggcgcggaggaacacgccgctgcggatgttgacgcggccgtggggtcggaacgtgtacccgaccatgtcgatgggttcgaggtcgaggcgtttgcagttccattcctcgtgcacgtcgagtccgagccggtctttgaggtaacgaacgatgcggcgggcggcgatcttcaaatctcgtttggaggtgccgatgagcagcaggtcgtccatgtaccacagttggtgcgtgatgagccggcggcgggtgatctcgccggtgcgccggcaggtgcgttcgatggtcatggccggcgattcgatccagtggtaggcgtggctgaggtagtagttggcgagccattggctcaggtggctgccgatgttgagcccgttgccgccttggtaccggtcgatgaggtggaacacgaggcgcagtaggatcgggtcgccgacgtcgcgtgtgagcatcgccttcagggtggtgcggtcgatgctgggatagtatttgcgcacgtcgagcttcacgaaccatttgctggatcgttcgcgggtccatcgtttgatcgcgcggcgggcgtcgatggtgccgcgattggggatgctggcggtctgccatcgtcccaccttcgcgtcgaacaacggatggagggccatgacggccacatggtcgtagatttggtggcgcaccgattcgcggccgatgacgcggtgcttgccgctgatcggttcgatgcggttgaagtacgtgatcctcgtgtctcggaagcggccttcgcgtatctcgtcggcgatccgcatggcgagccggtcgaggtcggggtgggtttcgaggaagcgggtcacgtcgcggcgggatcgtttgcccttgaggtagtggtcgatcgccctgcggacgaacatgggcgtggcgcagctggtgtgcttgcaatgggttttcagagcgtttcctatctggactatgccggcgttccctgttgctggaggggttcgggtaccggccgggtgctcggttggattttcggctgggccgtggctcgccctctcactggctggcgtggagggtagttgtggcgtaatgatcgtgttgacaggattgaccggatatgcggcccccgatgttccacctgcgattcgcgaggtcgttcgtgaggttcacggcgaagacgccgcaggcagccccgtcccagaggtcgccgaagcgccgcaccaagcgcacgaacgtcggaggcgtaccgccacaaatcccaaaaggctgcgaaacgtcatgagggggctttcgccccctcgctgcgcttcacccccatcgcactgcggctacgccttcgtgcgaccgagcgcagaaaggcggcccccgatgtgccaccagcgacgcgcgaggtcgtacgagaggtccacggcgaagacgccgcaggcagccccgtcccagagggcgccgaagcgccgcacctgtcggaggccctgggatgctagcgggttggcgtatacgccgtcgcataggccggtggcgctggtggccccgatgccggtggggatgagcacgccgttggacagggtgaagtcctcggcatatctccacgagttgtcgatggctttggtgcgggccgggaattcgccgatcttggtgtagttcgccgtcgaggtcttgcttgccttggtgatgtcgaacacgcggtagagttcgacgcggccggcgtcgtcggagtccttgaccgagttggcgatgaggtcggcgtcggtctcgtagatgccgttgaacagttcgatgccttgcagtcggacaggctggcgggtggcgttggcggttgtggggcggccgtcgatgccgagcagcttgtcggtggccccggtcttccacggcatgctgctgacgaagcatgcggtggtcgtggtgatggcgtcgccgtcgaggttgagcgcggtgttgttggcgtcgatggcggtcttgctcaggatggtgcgggcgcgggcggagctgtagttgccggcattgccacgttcgcggtcggtgccgacattgacggtgctgcctacctcgaagctgccggcggcgctggcggcgatgatgactcgtttggcgttggtttcgaccgtcgtgacggcggtctggctgttgcggtcccagcatccgccgagcacgtccgagtttttggtggcgtatttgatcatgagcatgagctggatatagaagttgtcgccggcgcagcggccggcgtagcccttgcccttcttggccgcgtagtcgatggctcggttctgggagccgaattctcggtcgatctccttgccgctgacggacagtgggcgttgctgggagtcgagggaggcggcgtatttcgcgaataataggcatggccgcttgctgccgtcgggcagcagcacgccgggcatgggcgtgtagccgtcgtattgggtgtcgctgtagaggaattcgttgtgggtgctcgtgctttcgagcttgtagtatccggggcatgtcatgacgtacacgtcgccgttggtgccgtcgcgtttgaagcggttgtcgaggccgtcgatggcggtgacgtggggcacgccgtcgtcgtccacggtggcgttgacgtcccacaccctgaaggcgggcagcgcggcgtagtcgtcgcggccggccttgtcgttggtgctgatctcgatggtcaggttggcgttgtcgcgggtcttcacgccgaccggggtgttgctgtacgtgtatttggggaatttcacgccgtacaccctgccgtccgtgtgggcggccatgtaggcgacgacgttcccgtattcgcccttggcgttgtcgtattcgaacttcgcgccgcctgtggcgttggcgtggactttggcgatgagcttggcggtatcctccaaggtcatgaccttctgcgtgttcgccatgatgttccttcctactggttgatgatggagagcgcccaatcgatgtcgtcttgggtgaggggctggatcgcgtcgccgccaagggcgggttcgatcacggtctcgtactgttcgtcgatttcggcctgtgtggcgaagaccacacccgcgctggcgctggcggcgatcttttccttgcagtcgtcggagagctgcgcgtattcgatggtcgaggtgcgggctgcttcggcggcgtcgcgtgcgtcgccggcggcgctggttgccttggatgcggcgtcgttggccttgccggccgccgtggccgctgcggtcgcggccgtgtctgccgccgtggccttgtcgttggcgttggatgcggccgtggtggccgagctagccgcgccgttcgccttggatgccgcagtgctcgcggccgtggccgccgcgctggcgttcgtggtggcggtgttggccttgcctgtggcagtgttcgcggccgcggccgccgtgttcgccgccgtcgcggccgtgttggccttgcctgctgcggtgttggcgctgctggttgccttgtcggcgtcgaggatgagctgttcgatccggccgagcttgtcgtccgcgtcgggtgacgtggcgtcgaacacggcgcgttccacgagcccgtagaagttgcgcgagcacaccttgtggccgccgctgctgatctcgatgcccaacaggatgcgtccgggcttggcgagcgccttgcggggcaccgctgcgcggaacgtggccgtggccgcgccgctgaccgggctcatggtcacgcggtcgccgaggctgctgccgggactggtgttgtaggcgagcgcgcaggtgatttcggcggttgtggtgatgggtgtgccgttgtcggtgagttcgacggtgatggtgcggccgttgacgtcgccggcgttgagtcgcacgtccggcacgtagtcgttggcgaagtcgagtttgagtgggtcgccgcttgcggtgcggaatgcgtcaagcgttgccattgccgtcgtccttgtcttcgagtttttcgcgcagttcggctatctgcgcgtctttgacgtcgcacatggctgcgagcgtggcgatctgccggttcgcgtcggcgagctgttcggagagcttctgcgacacgatccggtcgaagctgacgtactgcttgtcatcgggcatttttcttacctttcatctgattattggttgcggcatgaggcttgcatagaagctttcctcggcgttgtcgatggcattggcgactctcttgtctgagagcaggtcggaaagcgcctgtgtatcaacgcaggatgtgtctatgccggttccggcgtctgagtcttcgagggcgtatgtcgatgccgattgcgcctgttgcgggatggttggtaggtgcatgccttttctggtgtcgttgcgggcgacagtcagcggatcgttctggacggttccgtcatcggcgagcattgacatgtcagccgcgctgtcgttcagcgccgcttcgagcgcttcataggcctccgtccagacacctctgccggttgacggatcgtatcgcgtcgtatcctcgacgccttgcattatcgcggcgactgtttcggtcgtggatccgagtccgagcagtgcagtccaggatgcaatggtttctggggagaacacgaattgctggtatccgttgacgggttcgtcacagttgacgatgatgttcccgtcgttcattgtcatggtttgtttcatgttcgaccgtccttatttaacgagccatccgagcgtctcgcaccacatcgtgaccgaacaagggttccggtcggcgttgtacagctggatgtcccatcccgattggcctccggtgtttttgacatgcatgacgatgccgccccattcgccatcagcgtttgcgagagcgtagtatcttccgtatttggctggggatcccgtggagaagtgcacggagacgcttgcgccgaccgatattgatccgccgttcggtttccatgcctgccatgccgcggatcccacgaacgtgtgacggttcgtgtatcccccgagaaaaccgcccatgtagaggtatccggtgttgatgtcagcctgtacgccgacgacgccgttcggatcccacgaggcaatctccgcgtatgtgtccaaagcgtcggtcgcaggagaggcgaaggacaccagtctcgcgccggagctttttgcgtcactggacgctacgctgtagtcgcgcaaggcgagcgcttggaatatcgcctctttcttggctttgttgtttttcgtgcttccgactcgcacgaaggcgctcgggtcggtgtccgcccgtcgtccgccgttgaacgtcagcgtcgaaatctcgcccagttcggaattcgtggactctgccgcgatatatggatgctgtgccgcagcggttgcgtggatgaacgagatgccggcgccggtgatgtcggcggttccgccgaccggtgtctgcttgaagctggggctcatccatagtcgtgagccggacgtgcctgtctggaaggtgccggtaagcgtgttgtggctgccgttgccgtcgagatggaccgtttcgacgccgttggcgtctgacatgctgaatatgccggtgtcgaggttccagtagcttctcgcgccgctgatgatgccggaccgcaggtaggtggcgttgacgtacagcaggttgttgctc

SEQ ID NO: 3352 - DNA, 11386 bp, Unknown
  R151_18m  MAG No. k141_19410
ggcaaatggcacaggtaccaccacgactgcgactgcaagatcgtcccctcatggggagagaccaaactcgacggctacgaacctgacaagttcaagcgcatgtacaaggccgcgaaatcacgagctggcacttcggaaaccaatgccgtaatgaaggccatgaaccacatgtttcccgacgagctcacctctggagtgttcgaatcatcggccgaatggcccgccgaggtcatccagccacgggcgaaaacatgggatcatgtcttcgccaaccacggtcccgacgcgacagtacccgggaaaactcattttccgaaggaatgggacgagaagaaaatcaagtgggccgtagaagagaccgtcgtggctcccgacctcgtcataccgggtggcagggaacgtcaaaccctgtataagatagtcgaagacgagatcatccgcgtgtggctccagaaaaccagaaacaccggcggccgattcaccgtccacacggcacacccggtcgtgcctcagcaaaaggagaagctatggcaacagattcgcaatgcgaagccgcataccggcggctgaggccatactgcgacgtccttgaggaagccgaggaactggattacggcctagccgccggcgaacagtactacgccctgagttggctcatcgccgcgatcctcgaaaaccacgtaaccgtgccgcaagaacccctgctcgacgccttcggactgctcgaagacgaagacaaggacgaatacgcctcggccctcgacaaagaactggcccagacgacatagcgccggcccattcaagccaccctcgccgggtggctttttcaatgcccgaagaagagcgcccaagttttcagccacccgcacgggtggctttttcaatgcccggaaagggcccgaatacaaggagaaccaccatgttcctcaacctccagcacccccatatccgatacatcgccccgcccgccgaaggcggttcggacattaccggccccaccccgccggccgaaccgaacggaaacggcgaggagatcgactgggaagccaaatacaaggaagcgctcggccactcgcgcgactgggaaaagaaggccaaggccaacaaggccgccgccgacgagctggaaaagctcaaggaatcccaaatgagcgagaccgagaaggccgccaagcgcacgcaggaactcgaagcgcaggtcgccgcctacaaggccaaggaacagcaggccgaatggaagaagcaggtatcagccaataccggcatcccggccgacgcattgcgcggcagcaccctagaggagattcaggcgcacgccgacatcctcaaaccgctcgtgcacccagcgccgaagctgccgaacgtgcccaacccggcacagcaccccgaaggcaaaaccgccgacgaacgcgccaaggcatacgtgcgcagcctcttcggcaacaaagactaaccgccaccaaccatccgaaaggaaaccatcatcatggcactcgacaccagcaaggtgctgctccccaaggaagtagccaccgtcatcaccaagcgcgccaaggacaccagcaccatcgccgcactgtccccgagcgaaccccagctcttcctcgacaaggaatacatggtcttcaccggcaattccgaagccgaggtcgtcgccgaaggcgcgcagaagtccagctacgaggaaaccctcaccccggtcgtcggcaaacgcttcaaggtgcagaccaccacccgcgtcagcaacgagctccagtgggccgacgacgacgccaaactggagatcatcagcaagatcatgaccgaccaggccgccgcgatgggccgcgtcctcgactacgtcgtctaccacgccttcgaccccaagaagaagacgaccctcgaaggcttcaacgcgctcgccaaaagcgcggtcagcgtgacggccaccgacgatcgcgtcgccgacatcgacagcctcgccgaggtcgtcagcgacgagtacgacatcaacggcatcgccctgtccaagaccatggccaacgagctgcgcaaaatccgcgtcccctccaccggccagcgcttctacccggaaatcccgatcaaccttcaggtcggcaacctcgacggcatccccgccgccacgtccggcacggtcaacggccggctcgtcaccccggcgaccggcatcctcgccttcctcggcgacttccgcctcatcaagtggggcatggtgcgcgacatctggagcgagatcatcgaatacggcgaccccgacaacaccggcaaggacctcaagggcgtcaaccagatcgcctaccgcaccgaggccatgtactcctacgcgatcctcgaccccaagggcatcgccgtgctcaagaagccgacgagcaccggcagggcgggcaagtgatggccgcgccgctcacccagacgctcgtagtgcaggaaaccgacgaggccgacgaggccggcctgtccattcccgtgcgtctggtcaagcccgacggcaccccgttcgcggaaggcgtcgcgaccatcgcatggtcggccatcaccggcaagcccggcacgttcacgccgcccgcgccgaccgccggcgcgcgcggcggcgtgctccagcaggcggccgaagcgcagctcgccgccagcgccgactcggcggccatcatcgcgaaggtcaactccacgctgaccaagctcaaggccgccggcctgctcgcctaaggagaccccgcatggacggataccccagcaccccgctcaacctgtccgacggcacaaccgtgacggcagacggcgggggagaggacgaaacgggcgacgagaagccgttcgcgcaggccggcgacctcgaagcccgatggcacgcgctcaccggcgacgaacgaacccgcgccgaagcgctgctcgcggacgcatccgacctgatccgcaccacctgcccgcgctggcacaccgccaaacccgccacattgaaacgcatcgcctgcatggccgtcaaacgagccatgcaggccggccccgacatgtcgggcgtcacccaaagcacccagacggccggaagctacagcgaaagcctgagctacgccaaccccgccggcgacctctacctcaccacgagcgagaaggaagccctgggcggcgacggcgaggcatgggcctacgacatggccggaggcacggcatgagaggcgagaccatcaccctcatccaccgcgtcaaagccggcgaagaccccggcggcggaatcatctggaacacccgcgaggaacaggtggacgacgtgctcatacaggacggcagccaatcgaactccaccgacggcatccgccccgacggcatccgcaccgccaaaaccatccacatgccccgcgcatggccctaccgaagcctgcgcggagccaaagcgagaatcgacggcgtcgaatacaccgtgataggagacccccgcccctacacgggcggcatgaccccgacccgctggaacctcaccgtcgaactcgccgacaccagaggctaggagagcaacgcatggcaaaggtcaaactcaacctcgccggcttccgtgcggtacgccaatccgcacccatccagcagaccatcgaccaacaggccacgctcatcgccgcccgcgccaacagcatggcacaggtcgaaggcgcgacctacgaggccgcaacccatgtcagcacccccaaaggcagcgtcgcgctcgccacgaccgggcacggctccgaaggcaacgtgaaggcgatggaggacaacgcgaaacacaacacgctgctcaagtcggtgaaacggcgatgagcctcaacctcgaaaagacggtcaaggactggatcgacgccgaccccgacggcgacgggctgaccgcatacctcgaagtgcccgccgaccggcccaggcggctcgtcaccatcgagcgcgtcggcggcaacgagaacgaatacagcagccaccccaccctcgccatacaggtatgggcggaaagccgatggcaggccgcccagctcgccaccggcacgctgctgccccgactgctcgacctcgacctgctcgaccccatcgccgccgtcagcgtggaaagcgtcatcgacttccccgaccccggcccgccgccccagccccgataccagatcaccaaccatctcgacgccgccacccaataagcgccgccggcatcacgaaaaaggaacaccaatggccgaaaccaaccacaacaacaagaaaaacgtcagcctcggaaagcccaagaagaccggctgcctctactacgcgcccgccggcaccaccctgcccgccgacgccaccaccgccctgccggcagcctacacctgcgtcggctacctgtcggaggacggcgtcaccaacgccaccgacaccgacaccaccgacatcaacgagatgggcggcatcaaggtactgtccgagatcagcggctacggcgagacatggcagttcaacatgatcgaaaccaacgaagccagcctcaaactgcgtttcggcaccgcgaacgtcaccggcaccgcagacaagctcaccgtctaccacgccatcccgtccggcgaaagcctcgtgctcgtgttcgagatcgccatgaccggcaaccgcgtcaagcgcatcgtcgtcgccgacggcaccatcaccgaattcgacgacaccacctacagcgccggcgacgccatcggctacggcgtgaccatgagcgccaaccccagcgacctcatcaacggctccaccagcgtcgaatacatcgccaaagtcaccaccgcgacaatcgccgaaaagtgaccacaccccgcgcccgccgtccggcgggcgcacctttgacactttgaaaggacacgcatatggcagccaagcagccgcaggaccacaagaccccgaaaaaccagcccaagaccgtcgaggtcatgggcgtcaccgtcaccgtcggccccgcgatcttcaacgacctcgacatggtcgaatacctctacgacctccagaccgcccagaccggagacggctccggcgcgttcgccatcgtccccttcctcaagaagctgtgcggcgaccagtacacggcgatgaaggacgcattgcgcgaccccgacaccggccgcgtgagcatcgacaaggtcagcgacttcatcgcccaactcctcgaacaggtcgccccaaactcctgacgctcataggaatgctcgccacagcgcccgacgcgctcgaagcggacttccagcgtttctatgggctcaaccccgacctcatctggacgggcgaactgcccgccaaccgtgcggccgcactggccgccaacctgccccgtcaggccatcgtctggcaaaaactcgacccgcgcctcgcatgggacgaccagacctacctcctcgccgacatccgcgacagcctcgcgttcctcgcctggacgaaaaccaaggaggcctcacgcaagggcgcgcgctggcgcggacagctccaacgccccggcaccgtccggcacgaagccacgggcggcgaggccgtggcgatggacgacgaacaactggccgcatacctggccgcaccgcgcaccaccatcagggaggcatagcatggcaatcgagatcgccaccgcgttcgtgcaggtcgtgcccagcatgaagggcgtcggcaaggccatcgaatcggcgttcggcagcgcatcggaaaccgccggcaacaccgccggcatcaaagccggcaacggcttcgccggcggcttcggcgcgaaactcggcgtcatcaccggcatcgcgcaaagcgtcgcgggcaaggccatcgaagcgttcatgggcctgtccggcgagatcaccagcgcctccgacagcgcccagaagttcgccagcaccctgaacttcgccggcgtcagcgagaagcagatcaaacgactcaccgccagcacgcaggactacgccgacaagaccgtctacgacctcaacgacatccgcaacaccaccgcccaattggccgccaacggcgtgcccaactacgacaagctcgccgaagccgcaggcaacctcaacgccgtcgccggcggctccgccgacaccttcaagtccgtggcgatggtattgacgcagaccgccggccagggaaaactcacgaccgagaactggaaccagctctcggacgcgatcccaggcgcgagcggcaaaatccaacaggcactcaaggaggccggagcctacaccggcaacttccgcgacgcgatggccgacgggcagatcaccgcgcaggaattcaacgccgcgatcatgtcgctcggcttcaccgacgccgccgtggaagccgccacatccgccagcaccatcgaaggagccaccggcaacctcgaagccgcgttcgtcaagctcggcgcgagcgtgctcgacagcgtcaaacccgccatcaccggcggcatgagctggatcgcagacggcgtcaccaacgccgtgcccgtcgtccaggcaggcatcgaagggctcatcggctggttccagcgcctctactccaaactggaggaaaacggcgcgatcacagcgttcaaatccgcgtgggacaccatcagggacgcgatcatgggcgtcgtcaacatggtcatcgactgggtgcacatgatccctcccaacggtctcgccgacggcatcaaactcgtcgccgacacgctcaactggttcatccagcacggcaaggaactcgcgcccatcatcatcggcatcggcaccgcgttcgccgcagtcaagggctatcaggcgctcaacagcggtctacaggcgctcaccggaaccatgaacacggtgacgaccgccgccaagggcatcagcaacggcatcatgctcatgatggacttgggcggcccgattcaaatgctcaaacagatgggctccagcctcagcctcgtcaagacggctcagaccgcgtggagcgccgccaccaaaatggcgaccgccgtgcagggcgcgttcaacgccgtcatagcggcaaaccccattggcgcgatcgccgtcgccatcgcggccgtcgtggccgcgctcgtctggttcttcacccagaccgaggtcggccgcaaggcatgggccgcgttcacctcatggctcacggacacatggaacacgatcgtcaccaccgcgcaagacctatggaacgggctcggcgaattcctcgccaacctatgggcgacgatcaccggcggcgtcaccggcgcatggacgtcgatcaccacgttcctgtccggcgtgtggaccggcatcagcacgaccgccatgacgatcttcaccgggatacgagacttcatcgtcaacgtgttcaccgtgctcggcgcgctcatcgtcgcacccttgcaggcgatccagaacggcatcaacaccgtgttcggctggatactctcgttcatcacccagcagatgaacagcacgaacaccgtatggagcaccatctggacggcgatctacaacgtcgtgtccacgatcttcacgcttatcagcggctacatctcgaccgtcctgaacgcgatccgcaccgtcatcgtcgtgttcctcagcctcctcaagggagactggcagggcgcatgggacgcgatcaaatcgttcttcacgaccacatgggacggcatcaaagcgttcctgtcgaacatcctcgacggaatcaaggccgtctggaacaccgtatggaccgccatcagcacgttcttcacgaacatctggaacaacatcgtcgcgttcttcacgccgatcatcaacggcatcaggaacacgatcggcaacgtcctcaacgcgatcaatagcgtgtggacgagcatctggaacgcggtcaggtccgtcgcgtccaccatctggaacgcgatcagcggcgtggtgtccacatacatccagaatgtgcacaacaccatctcgaccgtcctgaacgccatcagcggcgtatggacgagcgtatggaacagcgtcagctcgttcctgggaaacatctggcacgggatcacgtcggccgtgtccaacggcatccaatccgtatccgccaccgtcggccgcatccgcgacaccgtgctcggcgctgtcagcggtgcgggccaatggctgtacgacacgggccgtcaggtcatcagcggcctcatcaacggcatcggcggcgcgttccagtgggtcaggaacacgatcagcaacctcggcagcagcctcgtcggctgggccaagggcgtgctcggcatccactcgccatcgagaatcttccgcgacgaggtcggcaaatggatacccgccggcatggcccaaggcatcgacaaggccagcggcctcgtcgccgacagcatcgacggactgaccgacatggtcccgaccgtcagcctgaagaccgacaccagccgactcgaaaccccgctcgcataccacggcaccgtcaacggcggccggatcgcgtacacgatggacgaacaggccggcggatacgccaccaaacaggacatcatcgacgcgatcgacgcggccctcgccgccggcatcacgctcaacctcaacgaccgtggcggcgaggtcatggccggcaagctcgccaaaccaatgagctacgaactcaacagcctcgccatgagaggccgttaacagagaggaaagcatcatgctctaccagcggcgcatgcgcctgccgcatgtcgaagaccccacgctcaacggcgtcccgctggagcgcatgatgctgtccctgacctccgacggcgtgaccatcgacaacgccgaacccacggtaagcatgcaggacatgcccggccgggacggccggctcgacctgaccctcaccgacccgaccggggccgcgtacatgggcaaccgcgccatcacgctcgccctgtacgcgatcggcggcgaagacgacatcctcgccgccaaaacccgcctcgccgccctcgccggcaccatcgtcacgctctcatggcgcagcctgcccggcgaataccgaggccgcatgagcctcggcgcatgggaggacaaatgggccggcccccgacagatcgccaccaccgtcaccatgagcatcgacgcccacccctatctgatcggccgcagccgatccatcgcgctcaaaacggacgcgaacacgatccacgtcaaaggcaaccggccatgctggcccacatggacgctcacccccgccgccgacgccaagaccgtcagcatcaaggacgcgcacggccacaaactcgccgtcacgtccaccaccgccatcaccggacgcatctccatcgacaccgaccccgaccaccgggagctgcgcgtcaacggcaacctcatgacacccacactcgaatccgactacttccccctattgcccggcctgaacacgctcaccctcaccggagccaccgccgccagtctcgcgtacaggccactcacgctcatctaggagcacactcatgcgatacatgatcttcgaccgctggggcaacccgctcggcgacctgccctacgtcatcaaggccatccgcacgagagccaccgacgcgaccgacaccctcgacatcaccaccatcggcgagatcaacaaggacgaacgcatcgcgttcaaggactcgatgggccgctgggcggaatacctgtgccagtccacccagaccgcccgcgccgcaggcatgcccgtcaccgtcgcctactgcaccggcagcatcgcggaactctcgcgcacctatatcgaggacaaacgcaaccgcgccgccaacgccaaagcctgcctcgccaaggcattggaaggcacccggtgggcggtcggcaccgtcgagaccggcaccatcaccggcacggccaacctcgccttctaccactgcaccgtcctcgaagccgtccagaagaccgccgacacctacgggctcgaagtccagaccgaataccagcccgacccgaccggcaaccggatcggccggcgcatcatccacctcgtcgaacaccggggcaccgccaacaccacgaaacgcttcgaatacggcaaggacctcacccaaatcaaacgcgacatcgacagcggcgacgtcatcacccgcctctacgggtggggcaaaggtatcgaacaaaccaacgaccaaggcgaggccaccggcggatacagccacaaaatcagcttcgccgacgtcaaccacggcaaaccctacgtccaagacgaccaagcgctcgccaactggggcatacccggccccgacggcaccagacaccacagcgaggcaagcgtggacttccccgactgcgaagaccccaaggaactcctcaccctcaccaaaaacgcgctcaagacccgcgccacgcccgtcgtctcctacaccgccgacgtgaccgccctcggacaagccggcctcagcgcggaaggcacggacgtcggcgacagcgtgcagatcatcgacaccagcttcgccacaccattgcgcctcgaaggccgcatcctccagatcgaggaagacctagccggcagcctcgccgacaccaagatcaccctcggcaacatccggcaatcctacacgcagcgcctcgccgcccaacagcaggccctcgacaaactcgtctccaactccggcgcatggaacagcgccgccggcggcaccggcccgtacatgaaggacctcatcgaccgcatcaaccagatcatgaacgccaccggcggatacacgtacctcaaacccggccaaggcatctacgtgtacgacaaaccagaagaccagaaccccacccaatgcatccacatcggcggcggctactggcgcatcgccgaccacaagaaagcaaacggagactgggacttccgatcgctcgccaacggcaaaggcatcttcgccgacatcatcttcaccggccgactctccgacgcagcaggcctcaatttttgggatatggacaccggcgaattcagcctgtccgcccgcagcaccgtcggcggcaacaaggcgagcgaactcgccaccaccacggcggcgcagcagctcacctccgaagccgtatccgcggccaagaaatacgccgacggcatcggctcgaacacgctcgcgtccgcgaaggccgacgccacgagcaaggcgaacgacgcggaagccaacgccaagaaagccgcctcgacggacgcgacgaacaaggcgaacgcggccctcgaagccgccaagaaggcggcagtcgacggcgacaccagcacgctcgaagccgccaaatcgtatgccgacaacacggccacctcgcatgtggacacgttcgagaaggcgctcacacagcagtacatcttcaacaagctcaccgacggaggcaaactccaaggcctctacatgagcaacaacctgctgtacgtcaacgccacctacctgcggtccggcatcatcagcggcgcgagaagctactggaacctcgacaccggcatattcagcatgtcagacgccaacggcgtcgaaacggtccatctcgac

SEQ ID NO: 3353 - DNA, 3242 bp, Unknown
  R151_18m  MAG No. k141_19902
gctcagcgtgcatccggtgccgtgcgtgttcggattattgatacgcgcgccatcaaaccaggtcacggttccatccgtctcggcaagcacatcgttggcatcctcggtgccatgaccacccttgaccagcgcggcacagccgtaacgctccacgatgcggtgggcggcggcctccatatcctcctgatcgcgaatcagcgtatcggtcagtacttcggcctcgggaatgttcggagtcacgaccgtagccatcgggaacagcttgccggtcaaggccgcaatggcatcgtcactgatgagcttggcaccggaagtggccaccataaccgggtcgagcacgatgttcgtggcgtgatggaaggtgagtcgttcagcaatgacgtcgatgatgtcagtggcagacaccatgccgattttcaccgcgaccggcggaatatcctcaaacaccatgttgatctggtcggcgagaatgtccggtttggtgtcctgaatggaacgcacgccggtggtgttctgtgcggtgagcgcggtgatggcgctcatgccgaacacgccgcaagccagcatggtcttcagatcggcctgcatgccggcaccgccggacgagtcggagccggagatcgcgagcacagcgggcagtgtagatgttgcaatttgtgccatagtgttcattctaagtggggcccatgatgtttttcggagcggttttccttgatgttttgccgctcctgtggtgagatggggagggtttgctgattgcgattgattcatgaaatgttcgggaggggacatggctgataacgatgtactgcgccgtgacggcgtcttggtgcgcatcaccggttttgacgatgaacgcaccgcatattttggcgtaatgcctaatgggcacaccacacagctcacatttccgcgtcaggaggtgttcgatgtgggcgacgtgttgctcgtcggcacggatttctatcgtaaagtgccgcatgatgtgtggccgttgaagccccgtgtgggcatcgtgcgccgtgcgctcaacgaaggcgtggtcctggagacttccgacggcctcgaactgcttgaaggcgattacccgaattcgatcatgcccggcaacaccgtgcagttcaccgacctgttcggcatcgaacgagtgctgtggcccacggccatccgcccaggcgaatccgatcacgatgacgacatcaagcagtaccgcatcacgccgggcagcgatccgtcgcttaccttcgattcgttcggcggttatgagcaggtgatcacgcgcgccaaggagcttatcgaaacgcagctgggcaacagtgcgcagatgcgtgcgatcggtgccaagcccatcaagggcgtgatcttcaccggtgctccgggtaccggtaaaacacatctggcccgcatcatcgccaatgtggcggacgcgcagttctatctggtgtccggcccgaccatcgtgagcaagtatgtgggcgatagtgaggaaacgctgcgcatgattttcgccgccgcgcaggcggacaagcgcgccatcatcttctttgatgagatcgattcgattgcgtcctcgcgcgagaacgataccaatggcgtcggcaagcgcttggtggcgcagttgctgacgttgatggatggtttcgagtccaagggcaatgttgtggtggtcgctgcgaccaatcgtattgaggacgtggatcccgctttgttgcgtccgggccgtttcgactggcagattcctttcccgatgccgtctgagcgcgaccgtttgggcattctgcaggtgcaggcccgttcgttgtcaatcgagggcgaactgccgttggcggatatcgcacagcggaccgaaggctggagcggcgccgaagtgtgcgccatctggaccgaggccgctctggtggccgccaaggaccgccgcggcgcgatccgtgctgccgacctcgtcaccgccttcgagcgagtcgagcgtcgtcccgaattaagacaccaccgggcataataattggctcccctcagagaggggagccagagaggtttactcctgggcggtggagtagagcttgccgccttgggcggtgtacttttcgctcatcgcatccatgccggcgaggatttcttcggggctgagcacgttggcggacaccacgtcgttatcgacattggccttggccttagccagtgcctcggagtcgatgccagcagcagcctccttcacgatttgctgctgagcggcctcgccaccgaatgccttgcggatgttctgggagatggccatcgagcagaacttcgggccgcacatcgagcagaagtgcgccatcttggccggctcggcgggcagggtgtcatcgtggaaggcgatggcggtgtccggatcgtaggacagattgaactggtcgagccaacggaactcgaagcgagccttggaaatcgcattgtcacgatccatcgcgtgcgggtggtgcttggcgatgtctgcggcgtggcaggcgatcttgtaggcgatcacgccctgcttcacatcatccttgttcggcaggccgaggtgttccttcggggtcacgtagcacagcatagcggtgccgtaacgaccgatctcggtggcgccgatggcggaggtgatgtggtcgtaacccggagcggtatcggtggtcagcggtccgagggtgtagaacggggcgcccttgcacacggccttctccagctcgatgttcatacgcacggtgtcgaacggcacgtggcccgggccctcgatcatcacctgcacgtccttggcccaggcgcgctcggtcagctcgcccagagtcatgagctcggaaagctgcgcggcgtcgttcgcgtcggccagggagccggggcgcaggccatcgcccagagagaacgccacgtcgtacttggcgaagatgtcgcacagctcgtcgaagtgcgtgtacaggaagctctcctggtggtggcgcaggcaccagtcggccatgatggagccaccgcgggagacgatgccggtcacgcggttggcggtcagcggcacgtaacgcagcagcacaccggcgtggatggtcatgtaatccacaccctgctcgcactgttcgatcacggtgtcgcggaacagctcccagctcagcttggaggcatcatcctcgaccttttcgagggcctggtacatcggcacggtgccgatcggcacgggggagttgcgaagaatccactcacgggtggtgtggatgtcgttaccggtggacaggtcc

SEQ ID NO: 3354 - DNA, 8512 bp, Unknown
  R151_18m  MAG No. k141_20397
acccagaggcatccacagttacctgtgcgaaatgaagaccgttgaaattaagccgtttctaagattcccgaatagttagccgataatgtacgttatgtcagattagttatccttgacgaggattcagtcgcctgtatcaactagtccacgcataccaggccgacagccaaaggagcactggagcgaccaccgcaattgcaagaatcgccgtgcctttcagccaatccttgtcatctcgtttccagtggaatgctctccaaatgaaccatatcagcatgggaatctcatacagcgacagcaatggcaaaccgatgaaaaccaggtcgaagcccgcggcgcaggctccatcgcatcccatcatgaagaagtcctcgccgttgtgtttcagtgcgtttggaaataacggtttacggcgtcttcgagctgctcaggttgctcaataatttcgtaggcaccgtgttcctccatctcaccggccggagcgtagccccagcggcagccgatggcgtccaaattgcaggcgtgggcgccgtcaatgtcggtgtagcggtcgccgatcatcacggccctgtcccccgctgcagcatcaaaaccgattttgtcgaagcagtaccgaatcacctgatctttgtccagacgggaattgtctttggaagcaccatagatgccgtccaacagttcggtcaggtggaaatggtcgcagataggcatgcactggtattcgggcttgcagctggccagtgccaggtagtaaccgtcggcatgcagtttgagcagctgttcacggatgcctgggaatacgacgttcaccagtcgtccgggcaccttgttgccgggctcgttcggatcgtcgaacacggcacggtctccgtagtagctgcggtagatgtccacggcccgatccagatcttccgcaggcacatgattgcggcgcagagattcaataatcgccggtccgatgaagcgtcgcagttcggcggcgtccggaaccggtcgaccgatctcttcgaaggtcttgatgacggagccgataatgccgccgtcggacttggtaagcgtgccgtcgagatccaacaggaccactttcatcggatgctgtgccattgagattccactcccccttgttcatgtcgactgctttgaatggtcgtcaaacaatgcgacttgttccaacaatgattatgcccagtcgggatgactgggcatcaagttcacgtgttgttcagtaggagatcactcgtagtcgggaatccaaccgtcacggtgcatttgcaggcgcttttcgagcagggtggccagttcctcttcgctacggcgttccagcagcatgtcccagtgggtgcgggtgggtttgctgatttcgtcgccctcacggtcggcgtcgccctcacggtgggccacggaaccacaacggcactcccactcgtccgggatttcggcaccctcggcaaacggcaggatggtgcggtggcccttcgggcatacatacgccacatcgtttcgcgcggcgaaatcgacgttgtcgtcggactccagcgatttcgctccgatgctcatgcccctgaggctacgttctgccatatcggcatcctccttgaaagatctttaaccctactaatttacgcaacagttcggacttggccgctattccaagcttccgacgtcggctgacaaactcccgtcaaacagccccgtcagtccacgccggagtaggccaccacgccacgattgacccggtcggccgcttcgtgggcgaggcctgccagccgctctcccccgtcgaacggcaacggctgggcgacagcaatctgctgcagcacgtcagccagtcgtttggcagtgcgcacgaagtcgccgccggtcatgtcggtgccgtacaggcacgatcccagcgaaccgccatccgcccattcatacatgatgtcgagaatgccgaaatccggccgctgcatctcgtccagaccgtgatcctcgcacaggatatcgatgtcttcacaaatgcccttgagcttggacgaagcgatggcgatgggcccggagatgccgcccgggtagtgcctcggttcgccgtctcccccgcgtctggcctcgtataccagtgaagagagcacagcggccagtccgttggcgtcgagcttgtcgaacgtgccggcaagcagcgcctcgcacagttccaggtcatgttcactgtagatgcggcgcagcagcagacctttttcagtcaacgtcatgtcaatgtggccggccgcattgacatgacgttcgaggtaaccaagcccggtgagaatatcgcagatgcaatcgaactggcgtgccacggacccggtgcgggagtcgtagcgatcggtgacgcgctgcagttctcgagtctcgcgggcccagcggtggccccatttgaggtgttgctggaggtccgggcagttgcggcatggatgctcgtgttccgccttgcgcaaatcgcgaatgcgctggtcgaggttctggaaagcgcgtgaacgctcctgatcggtcaggaacacttcgtgcttcagtttgcggcggccttccttttcgatgtcgctcagctccatacgcagggtcatgaactgtttgaagtcgccgtgttcgcatgcgaacgcctgttcgtatccggccagcgcgttcttcagtgtgttaatctgcgattccagctgccaggccgattcgttggcctcccactgggcaaacgactggtccagggtgacgcgcgcggtctcgtagtcgctggagttgagcaggttcacggccatgttgaacgtgggtcggaagctcgagtgcagcgggtagacacgcttggatgacagcgaggcggccgtggcgggcacaaaaccgtgatggtcgaccacgatggcgtggccgatggtgtcgatgccgcgccgaccggcacgaccggtgagctgcgtgaattcgccgggcgtcaggcccacatgaccggtaccgtcgaacttttcgagtttctctaccaccacgcagcgggccggcatattgatgcccaatgccagtgtttccgtggcgaacaccattttgaccagaccttcttcgaacaatcgttcgactatctgacggaacagggcaatcatgccggcatgatgcgaagcgaagccttcttccaatgcaaagcggaacttggagaactgcagggctttcaggtcttcctgagtgagttgcccctccaccatctcatccacgatgcggcgaatcctggtcacttcctcatcggtggtgagctccagtccagcgttgatacactgttccacggcctggtcacagccgttgcgcgagaagatgaagtagatgccgggcaacattcccaggaagttaagctcgtccaccacggcccagcggcgcggggtgtggcgttccgctttcggggcacggtctttggcgcctttgccgccgcggcctctgccgaagcccttgcgcttatcggggcgttcctcgccgcgccggcgtgcggccttgcggtccaactggtcgagccggttgatgagttcggcgttgagtttggtggtctgctcgccgttgccgtcgcggcgatagaggtccagcacctcgggctcggtgtgttcgtccgcctgcacgatgacgtgctgttccaaaggcacggggcggtgttcgctgatcaccagttttgtgtcgcctcgcaccgaggcaatccagttggagaaatcctccacgttggacacggtggcggacaggccgacgatcttgaccgtcttgggcaggtggatgatgacttcctcccacacgggcccgcggaatcggtcggccagatagtgcacttcgtcgagaatcacgtagcgcagtgcgttcagcgtggtggaacgctcgtagagcatgttgcgcagcacttcggtggtcatgaccacgatgtccgcctcggaattgatcgaggtgtcgccggtgagcaggcctaccttgtccgggccgtacacgtcgaccagatcatggtatttctgattgctcaacgccttgatcggtgtggtgtagaaggctttgacgttgcgttcctgggcgaggtaaatggcaaaatccgccactacggttttgccggcaccggttggggccgcgaccagtacgttgctgccggcttcgagcgcgtcattggcttcggtctggaagtcgtccagttcgaaaggcagggattcggcgaatcgcgctgctgcggacgcccgatggcgttggaccttttggaatgatgcgtaccgctgcgaagggctcagcgtctgggaatcggcattgcccttatggtgttggtgacgtgccattgctgctttccgttagttgttgaatcgcttccagcgggcccatgcctgggtgtgtcgttcgcgcttggcggccttgccgcgaatcacgttcgcatgggcctcggcataacgattctgtgccacgctgagcggctgagtgaacagaggcggctcgctggtgtcggcagaggtgccgggctcccccatcgcggccacgcgttcaccgagttggccgccgatgtcggacatgtctttcaaggcacggagtccatgaagggctgcatagatgagtccggcaacaatcatggccagcatgaacagggccagaatcagccatatccaccaaggcatgaaaggctccttacttgttctcgctgatgctcagttcgcgttcggcgcgtgccacgatcatggtgcgcaacgtttccggggcgaccgccgtgatatgacgcgcgtgggcgatgcagaaggccacgaaccaggaatcggaggaaacggtcagatgcaccttttcaccggcaccgcattgttcgacggtagcgcccggcaatgtcttgatgaatgccagatcgcgctgatcggtgatgaacaccgcgtcggtaccgttgtcgaaactccacttgcgcagttcgctcaccggcatgttcgggatgttgatctgcttggtgggcttgaccagttccgccttttcgatacgggccaatcgcagtacctgccagatgcgcggtttgccgttggccttgtcgagggtcttgtctttggagacgtaggcctttttgtccttgggtgcggcggaaccaacgtccgtgtagacggcggcataatacacgccttcgtcaatgaagatcttggcgggggccaccagcttgcggcgggtacgacctgtaccgtcggtgtactccatgtccaacagcgaatcggtgttgatcgcacgcttgacgatggagaagcttcggggctccagctcatagccggtcaggctcagccacggggtctgaccgggactgacatgacggcgcaaacgctcatacagggattcggcctgcccacgctgcttgtccggcagcaacggcgaatgcgccaggtagctgaccgaggcggtgagcatgctgaggtattgcggcgaaatgccggcaagacgttcaaggcccagcgaattggtggcggaaacaataccctcggcatccagcagcggccagtcaatatcgaagaactggctgccggccatctcaccatcgtcggaaacggtggtcagggtgttgatgtccttatggatgatgttgacgaatttcttgagttcatcatcgttctttggcttgccgataaagcgttcgcccagctcgctcatcgagaattcctcacccagatgagcggagaggaacagcatcagacgcaggcgacgatcaacctcactgcccgtttggaaagcggagccgttcttcttgttctgagccttgatagactcgggatcacccggctctcgcacatcgcgactaatcgacggggaaaccaccgaagcgctcacaggactggcggattcgtcggccagagtgaaccggctggcggcgtgcaaacggcgatgataagcgtccacagcctcttgcgggctgacaatcgtggcccccggatgctcaagcacaaacatggccaaatcgtcggaatcggtgtatgccacgttcaggtgttcgccatccacgtcaacggtggcggcgaaacgacgcgaatcaataaccttgaccagtgaatccggaatgggctgcgtccccaagccaggcgcaatcgaatccaagccaagcccgggaatcggggtctgcggcacacgcggcgtagtgcgcgacacatgctgggtgagctgggactgatccggctcggaagaaatcgacatcgaacgagccagatagttggcggcggcaagcaccggcatatcttccggctcgaacatcaggcggatgcgcggttcgtcgcccaactgcagacgataggacgcgaagtcctggccttccgacttggacgagtactcaggctgccgtgattcgatggcaatgcccatcgcagcgagcttggcgcgatcacgctggaactgcttggcgaacgcggccttggcggcctgatctgccagctctccatacgagtcggcgtaagccttgacgcgctgcgcaatttggcgggatgtgagccattgcgggaacgcggatgacaacacagccagtacgtccagctcgtgcttgccccatttgtcggaaaaacgccgacgtccgcttgtgccctctgccattagtcctcacgtatagttattgtttcgttataagtgcgtatgagtttccccacactcactctatcttagaggctttttccacagttgagcgccatttcacaaaaataatatcttttttatcgttcgaccgtgttgtaaatcacacccaatcgtccggttcgatgccttgcgggccaacgtattcgccgttcggcacgtagctcggctcacccttatcttcaagtttggcgtcggcgaacatcatgacgtcacgtccgaatgtccagtcgccctgaatggaaaccgagttggctgcggccaaagatggcacggcgtaggggaaccgttcgtcgaaatcgcggatgttcttgtagtatcgcggatcaagttcgacgttcgggaagatgtaattgccgtcttccatctcatacgtgtccgtcaggtggaagcgatcggaacgcataatgaacaaatcattggtggttttcaccggaaggaagcgcatacgatccacttggacgcagatagaaccgttgaacagaccgattgcggcacccatggcggtttccagctgaatcacctgttcggagttcgggtccgtgggattcacggtctttttgttacgaatcaccggcaacggcaacacaccatcgcattcggcgagcttgtctttcaaagcgtcgatgcgaatccagatcgagttggtgttgaagtaaggatgcttggcgatgtcttgggccgcttccttatcatccggatggacctggctcatttcacgcagtatcaggcgaccagtggccttgtctcgcacgatatggcctcccttgcgatcggccttggtgcggatagccacttcggccatgaacggggcacctgtgttttcgaagtgctgggccaacgtacgcgaggggcgtgcaccgagattgtcggaattggagatgaacaggtacttgaagccgcgctcctccaatacgtcaagcaggccggactcccagatggtggagaacaggtcgccgtggccgggcgggcaccattccagctccgggttcatggggtagctcaccggttcgccggtggcggccacgagtttgggttcctgatgctggatgatttccatcggcacgtcatgctggctgaacttgcgatgatgcttgagcgccttcatcgtgtccgccgaagtgcggaaagaattcatgaacgtcagcggcagttcgacgtccaggcgggtgcgagcggtaagcacctgaccgatgatgatgtcgatgaagcgcatctgcttggccttgtgcctacgcaccggcaacagcgacttggccttgtccaatcccatggaggtgcccagaccgccattgagcttgaggaatgcggtcttggcgaaggcgtccacggccttgtcgtggttgatggtctcatagacgtcgtggaagctgggcacgtggccaagcggctcgatgtcgtcctcacgaatccagctggaggcttcttcatggcgccatacgtcatacaaatggcggaactggttgatggcggtttcgctcatgccgtgctcgcgcatcttggcggccgaaagctcgaaagtctcatccacttcgggggtgtttacggtttcttcgggggtatccgaggtgacggcgtcggtgtcgccggcggcggtgatatccagttgggccttatcgtttatttcggtcaattcgggtccctttcatcaaatcaataggaaccagtctagcccctgtttggggcaaacacatacgacggggggcggaggcggtgaattgtcggtgataattccaataacacgccaagatgaagtccgtgtttaatccattacgaatggcttacaaaggtaagtcgggttataggccaaaatgtgtgtccgttttggcttgtgttcctttgtggcggtgggcgttcctcctgttcgagttgtatgggcggggaactcgaggtcggccagaatgtgtgtccggaatggccggtcaggccttgcggc

SEQ ID NO: 3355 - DNA, 2835 bp, Unknown
  R151_18m  MAG No. k141_20529
atgcggtcggcgaggtaaagcctgaagaacaggtgtggctgtaattctgttctgccgtctaactggttcggggtattcactgtgaaccagtgcacaattgcgatggtcggatgtctttctacagtccgctttctcaaaggagctggagcggattcgctcgattctgtcggacgagcggccggaacgggtgctggttgatttgctggatcagcagacggcatccttgcagtcgggtatcgccgagcaaaagcaacgtcttgatgactgcttgcagctgcgcaaagcactgacagtctcggcgtctgacttcgtatcgccaacattaaccgacatggcaaccgttatgaacaccacaaccactcattccctgcgcaccacatatttggtcatgctggcaatcggattgcccacgactttgttgcaaattgcatgcctcgtcatcggtgtgatgacagacgtatggtggccgctgccggtcgccgttctgctggcgattgcgctcgccgttgcggcgacgaagtactatcgctcccgcgtgcagtacctatgtccggcttgccatgagaccttccagccgggtatgcgagagttcgtattcgccgcacacgcgcccaagacacgcaagcttacctgcccgcattgcggtcacagggggtactgcatggaactcagcatctgaaagtttctgattataacgttcgatttaccaacggtagttgtcgcagaatttgcaacaactaccgccctgtcaaaatatgtacgttgtgcagggctaaattgtttcaggtcgcggctcgggcggcaggatctgccgttttattgctgcttcggcgttcctgttgctgattgatgggtgacattacgcttgcgttgggtccttctgcaggagaaggaagatgagggcgacgatcagcaggattgcgattgaaagcacgcccaccgaagcgttgccggtcagcgacgtggtagtcgcaacgaggaaggtgccgataatcgaagctgttttgattaaactatcataagaatagctagaatcgttgaaatacaaggcttctgctgtgttattctggctgtgttacacattcatgttacacagatggcggttggtatggcacggaaaagcatcaagatcctgaacggcagagcgaacgcgttgccgcccaccgagaaattcccgagatggcgcgtgatatggaccgacccggttaccggcaagcgtcggcagaccagtggcggagacagcctcgacagcgccaaggccaaggccgccgagatactgggcgactacgttccggattcggagtccggcgtgcgccccccgactttcgatgagtgcttccattcgtggatggacgccaagaagccccagatcgccgaacagacggccgccaactacgtctacgtctaccagcgcttcatcaagccggaaatcggcgaacagtccatcaccgccatcgggcaaagatccatccgcgccatccaagtcagcggcgtcgagttcccaatactcgtcaagcgcatcatcaagggcgtcttcgaacaggccgaaaactggacccatcgtccggccaaccattacgccgactgcatcgtcatcagatccagccgcaacgaaaaacgcagggatttcgtcgcccgtggtgacattcccagttccaagctcgtcgcctcgttcatcatcaccgcctacggcacgcttcagcagaatccgctggacgacccgaccgtgaccgtctggaatcccgaatccgccacccacaaacggtccgtgcgccgcatgtccttcgctccgggccttggcctcacccagccggacgacacctgcttcaggaacggagtcccgttcgagaccatctacccggattatcaaaaaccggaggaaatcaaggatgacgccaatcgccacgccacccgattggccttcatgaaccgcaaggccatgatctgccgccgcgtgggactcatcaccgctttaggcgccggtggcggactgcgcatcggcgaggtcctcgccctacgagtcagacacattctcaccagagagcaggtcgccctgcgctaccagctcggccagtcacgcgaggaatccgcttggcgtggggaaacccacgtgtgcgagcagatcacacgaggcggggcgggacagatgcgcctgaccaccccgaagtacggccacgatagaatcgtccacatacccgccttcctacccaactggaacggtttcggactcgggacgcaccgcacccagatcgccgaggtcataccccgcttcgcggacccccaagtcagtctctggaccgccacggacgaggaggcccgcaccctctggcaagcgggtttcacaccactcggctggctctactggcgtcacctagacgaactctggaccaccatgccccgtaccggcaagccttccatgcaggaggagatcgacgcgttcatgaacctattgctgttcccctcggtcagcaggggcatcccctccaagagcgagttcgccatagaccccaactggccgtatgacgcatcgattcccgagggcacaggcggctaccagcatccatccaactacatgaagcactccgccctgatctacgactacgtggcgcagatccacggcgaatggcccatcaaccgtgtcaacagcaagacccgaaaaggctggacccatcacgcgctcagacactacgcggcctcgagcagaatccaagcaggggtgccgttgcccatcgtcgcgcgggaactcggccacaaggacgccgccttcacgctccaacgctacggccacatgatggccgacgccatccccgaaacgggcttcgactactagcaaga

SEQ ID NO: 3356 - DNA, 3094 bp, Unknown
  R151_18m  MAG No. k141_20623
aaagaagtagtacaaacacgctcttgagttctcaaaccaccaccacaccagcaagacaggaaaccaaccagaagaaggaacccgccgcgctgagcggcaacaggtgaataacttacacgcaaccacgccacaacgcaaatcaaagcgcacaagaacccaaggaatcggcataacagcgcggttccttcggcgtgtcgcacagagcccaatttgctctgatagggctagcgtaacccctcgaatgtttccggaaaacatcgaatccattattcggctggcgtgtcgcacgagttttcggactgtcagctccatgttcatcgttcggcaaccacaccaccggcgcacaatcaatgcatggcaacaacgctccatcatcggatttcgttcatgaatcacgggtatacctgtagttatgaccaagaagattgctgtattaaccggggcgggcatttccacgtccgctggcatccctgatttccgcggtccggacggtgtgtggaccaagcatcctgatcaaatgagcgtttacgacatcgatctgtttctgcgtaacaaagaagaccgtgagtactcctggcgctggcagaaggaatcaccagtatggaacgcacagcccggcaccgcgcataaggcgctggtcaagctggaacaagccggcatgttgacgctgctggccacgcagaacttcgatgcgctgcatgagaaggccggcaacagcgacagcgtcatcgtgaacctgcacggcaccatcggcacctcgcattgcatgaagtgccatcaggaatatgccacggcggacatcatggcccgtttggatgaagaacccgatccacattgccatcgcaaactgaagtatcgtggcgatatgccatgcaatggcattatcaaaaccgatgtggtgtatttcggtgaggcactgccggacggagcgatggagaagtcgtacagcttggccaccaaagccgacgaactatgggtaatcggatcgacccttgaggtgtacccggcagcgagcattgtgccggtggccgcgcaggcgggcgtgcccatcaccatcatgaatatgggtcacacgcaatatgaccatcttgcgagccgcttgattcatgaggatatcgccgtcgcgctgccgaagttggtggacgagacgattgcggagaacaagtagtcctcagcataacgaaagcgccggtgggtggttaagcaactgatgattgttggttaaccacccaccggcgctttcgcgccacctcccgctagcgggaggtattggagcacacttctgcgcggcctcccgccagcggtattggaatcagtagatgcgcttgggctggaatccagcttccctgagtgccacgaggatgcggtcgatgtgctcggggccgttggtctcgaccgtgacgccgagagacaccgcgttggtgtagtggccggatgccttgaactggtcgtggtcaagctgaatgacgttggcgcgctgctcggcaagcagggtggccaccttgacgagctggcccggagtatccggcagctcgacctcgaagttcatgatgcgaccgcgggcgatcatacctttctgaatcaccgcacccatggtcacggtgtcgatattgccgccggacataatcggcaccaccacgtgcgggccggtggcggcggcgaacttgcgcgaacgcaggttcaggtgttccagcgcagccagcgaaacggcgccggccgcctcgaccaccagcttatgcttctcgagcatgagcagaatcatttcgttgatgtcgcgctcggtgacggtgaccagatcgtccaggaactcgttgatcagagcgaagggcaggtcgccggggcgcttgactgcaacaccttcggcggaggtgaccacatggtcagccggagacacacgacccgcggccagcgagtccttccaggccggggagccctccggaatcgcaccgattacgcgcacttcaggcttgaacgtcttgatggcgagcgccacgccggcacccaagccaccaccaccgagcggcacgaccacgtcagtgacgttcggcacgtcttcgaggatctccagaccgatggtgccttggccgcagatgacttcgtaatcgtcgaacggcggcacgtaaatcatgccttccttgtcggcgagctcagcagcgtgggcggcggattcgtcgaacacatcgccgtacagcaccacatcggcgccgtaggccttggtggcatcgaccttcagcggcggggtgatctgcggcatgcagatggtggccttcgcaccacgctcacgggccgcataggccacgccctgggcatggttgcctgcggatgcggtgacgatgccacgggcgatctgctcttcggtgagcgatgcgatcttgttgtacgcgccgcgaatcttgaaggaaccggtgacctgcaggttttccggcttcaggagaatctcatgaccggtcatctcgctcaataccggcgaagggataatttccgtatgacgggcagtccctttgagacgtttggcggccagcttcagttcggctgcatgatcacgctgcagcgccttcaaaacatccttttgttccatagcttttaattgtatggcgcggggacaccgaaaacagtggcttatctcgctaacgagcgctcatttacggtaattcccgttcgtaatcagctttcgaggggctgatttggcttcgcggggaggtctatctcctcttcgaggggctgcccgatcgtgcaatgcgtgagtatgacacatcatttgcagcggtattatgcggttttcggagcccggctattcaggcaccaaccccttgaaacggagatagacctccccgcgaagccaaatcagccccttgaaatggagataccgcctagcaacacttataggctgacgacgacgccctcccatggtgcaagctcacggccggcaagagcggccacagcgtgcgcggcgtcatacgtgctgattaccacgttcgactcggtgattccggcggcggccagttcggcggtttcgcgcggtagatcaacggttcggccggacatgttgaccacgaccagcagcttctcatcgccgagggtgcgggtgaaggcg

SEQ ID NO: 3357 - DNA, 40150 bp, Unknown
  R151_18m  MAG No. k141_21190
caccccactggggtgcgtggattgaaattgggatcggattggcgatggcgagacctccgtcagtcgcaccccactggggtgcgtggattgaaatagttggcgtgggttgcctcccaccgtggacgaacggtcgcaccccactggggtgcgtggattgaaatacttgtcccgcctgactgagggcgatgaagtacccgtcgcaccccactggggtgcgtggattgaaatacgatttacgcagccacatcgcatacgtggaacaaggtcgcaccccactggggtgcgtggattgaaatcacgtgttttgtatatcgttttgcagttccattgtcgcactccactggggtgcgtggattgaaatacacgtacggcgttgccaagtcgcaacatgtttggtcgcaccccactggggtgcgtggattgaaatattaccgatgtacgggcggaagctccaaacacgagtcgcaccccactggggtgcgtggattgaaataggccgtatctttcggattcgcagcacgtgcgagtcgcaccccactggggtgcgtggattgaaatcatccggtcgatcagtggcagcacgccgtcgatggtcgcaccccactggggtgcgtggattgaaataccatcgacccggaagtgaatggcgtggttgccagtcgcaccccactggggtgcgtggattgaaattggacgatgaccgtgtgcgcggggatgcgcatgacgcccggcgagctcatagaggtgcgtggattgaaattggacgatgaccgtgtgcgccgcgtcattcggggtgtcgcaccccactggggtgcgtggattgaaatatggtgtatgtgaaattgaccgtaccggctttacccgtcgcaccccactggggtgcgtggattgaaattgctcgcccgaggtcaagagtgcgctcgacgtggtcgcaccccactggggtgcgtggattgaaatgtaccagtattggattaccgcgccttggcttcagcgtcgcaccccactggggtgcgtggattgaaattcaccgtgctcaaacaggatgcgttcaacgcctgtgtcgcaccccactggggtgcgtggattgaaataagaacagattcgtaggacactgcgaaaaacaaatagggtgctttccgccatcaacagcggaaagcaccctattcttatggtattcttatgatctctctgtcctaattagagcacctcactccgcagcaatcgcggccttgagctcctcgaccttgttggtcttttcccacgggaactcaacgtcggtacggccgaagtggccgtaagcggcggtcttcaggtagatcgggcgcttcaggtcgagcttgtcgatgattgcggcggggcgcaggtcgaagaccttgcgtacggcggcggcgatctggccgcgcgtcacgccttgctcggtgccgaaggtctccacgttgacggacaccgggtcggcaacgccaatagcgtaggcgatctggatctcgactttgtgagccaagccggcagctacgatgttcttcgcaacccaacgggtggcgtacgcggcggaacgatcgaccttggacgggtccttgccggagaacgcgccaccgccgtggtgggcggcgccaccgtaggtgtcgacgatgatcttgcggccggtcagaccggcgtcggccgccgggccgcccaggatgaacgaaccggtcgggttgaccagctggcggtagttgtcatgcggcaccttggaacccagcacctcatcaagcaccgggtcaatcacgtgcttcttcagctcaacagcaagccaatcctgcgtaacctcaggatcatgctgggtggagatcagcacggtgtccagacgaacgggcttatcgttatcgtcatactcaatggttacctgggtcttgccgtccgggcgcaggtgcggcacttcaccggacttgcggacctcggtcagacggaaggcgaggcgatgtgccaaatagatcggaagcggcatcagcgtcggagtctcgtcggtggcgtagccgaacatcacgccctgatcgccggcaccctgtgcttcgtaacgttcttcgcggctggcggcggtctcctgatcgccagtcagacgggcaacgccctggttgatttcggcgctttgctcggtgatggccaccacaacgccgcaggaatcggcgtcaaggccgacttcggaggaggtatagccgatgttgcgcagggtttcgcggaccttggactgcacgtcgcagtaccccttggacgtgacttcgccgaagaccaggaacacgccggtggcggcggaggtctccacggccacatggctggacggatcctgggccagcagatcatcaagaatggcgtcggagatttgatcgcagaccttgtcagggtggccttcggtcacggattcggcggagataagccgatgttcttctgtcatatcatccctttcttcaggacttatcgccccgcgggatgcgaggcacaatgatacggtgtcaatttttacttgtcactgcggaagcgggcataaataaaggcccgtgccaaccagcgcggtggctcgagccttacgtcttgttcgctcctgatgatgagttatagctgattgcgataactcaggcaagcgtgtcgctcaaaatcagttgtgagagaactctcacaccatcattcggcgacaatctgtccaaacaatccaaacgaatcgtctgaatcgatcagttgccctcgttggcgtcgtcctcgcccaaggtctcctcaagcagaccctcgtcgatctcgcggaaggcgatggacagaggcttctcgttgttctggtattcgaccagtgggccgacgttctgcagcaggccctcgttgagctgcgtgaagtaggagttgatctggcgtgcgcgcttagcggcgaaaatggccagcgcgtacttggaatcggcgtgcttcatcagatcgtcgatcggcgggttcgcaagaccgtcgggtgtcgggtcagtaccaaaagccattgttcttatctccaaacattggaaaatctatctcaaccgaagcaagtgtagccgtttggggggacttctgtcagccctataccggactctcgccagaggaatgtattccaaaaaatatgtgtaagaaacgttacgtttttgcagattccattattcgactcttgacaagtggcgtgtccctcgcaaaggcttgaatagagccatgactgaaatgcgatctgcaaaaattatgtcagggcgcgtctttgcaggcgcccgagccctctaccgtgctgcgggcgtcagcggagacgacatgggcaagaagcccatcatcgccatcgccaactcgttcgatgagttcctgcccggccacgtccacctcaacaaggtcggccgcatcgtttccgaggctatcaaggaagccggcggcattccgcgcgagttcaacacgatggccgtggacgacggcatcgccatggggcacactggcatgctctactccctgccttcccgcgacatcatcgccgacaccgtcgaataccagtgcaacgcgcactgcgccgacgccctgatctgcattccgaactgcgacaaggtcgtgccgggcatgctgatggcagccctgcgcctcaacattccgaccgtgttcgtctccggtggcccgatggaggccggcaccacggtgctcgccgacggcacagtcaagagcaccgaccttatcgacgtgatgtacgccaccgctgacgacagcgtctccgatgaggaactgctcaactatgagaagaccgtctgcccgacctgcggctcctgcgccggcatgttcaccgccaactcgatgaactgcctgaccgaggccatcggcctggctctgcccggcaacggcaccatcctcgcctcccactcctaccgcaaggacctgttcaagcgtgccgccaagcaagtcgtcaagatcgctcaccagtactacgacgattccgacgattccgtgctgccgcgctccatcgccaccaaggaagccttcgagaacgccatgaccatggatgtggccatgggcggttccaccaacaccgtgctgcacatcctcgccatggcccagtccgccgacgtggacttcaccctggacgacatcgagcgtatttcccacaccgtgccgtgcatctgcaaggcctcgccgtccggcaagtgggagatttccgacgtgcatcgcgccggcggcatcaccggcatcctcggcgagctcgaccgcgccggcaagctgcacaccaacgtgcattccatcgactacccgacgctggaagccaagctggccgattgggacatcatgcgcccgacctgcaccgaggaagcccagcagatgtacaaggccgctcctggccacatcatctccccggagccgtggacgcacaccaccctgttcgactcgctcgaccgcgaccgcaccaacggcgccatccacgacatcagccacccggagattcacgaaggcggcctcgccgtgctgcgcggcaacctggcccccgacggctgcgtggtcaagaccgccggtgttccgccggagatctggaagttccgtggaccggctctggtggtcgactcccaggagcaggccatcgaggtcattctgaacgacaccctgaagcctggcatggcgcttgtgattcgttacgagggtccgaagggcggcccgggtatgcaggaaatgctgtacccgacctccttcgtcaagggcaagggcatcggcaaacaggtcgccatgctcaccgacggtcgctactccggcggttcctccggtctggccatcggccacatggcgcctgaggctgccaacaagggcccggtggcgctcatcaagaacggcgacatcatcgatatcgatatcgaagcccgttccgtgaacgtcgaactgactgacgagcagctggacgagcgtcgtcgcgagcttgaggctggcgacggctacgtggctcaccgcaaccgccacgtctcccaggcgctgaaggcgtacgccgccttcgcccgctcggccgacaagggtgcgacgcgtgacccggagctgatcaacaagctctccggtctcaactgatcgccgattgcatagctgaaaggcccggcatcttctttatgaagatgccgggcctttactgtgcttccgaaggcgggagcgatattgcttgttatcgcacgcaggcggcgggggagaggcgtgcgcctcgggcccagtcggcggcgcgcatggccttcttgccttgcgccttgacttgggtgagttccagcggcgtgctgccggtaccaacccacacgttcttcttgcccaccttcagctcgccgggctgaagctcggccggagtgttgggattggactggtcggccggttgtgcggcgagaatatgcagggcgagggatttagcggttgactcgtcattatcggcgattggcccttccgcaaacagttcggtccatgccccgggatgtggcgtgcaggcgcgaatctgacggtcgatggcctcggcctcgtccgtccaactgatgcgggcgtccttcaccgtgatcttgtgcgcgtattccaggctctcggccggctgcgcggtgaatgtggcggtgccttcacctacggcggccagcgcatccacatacatgggcgcgccttcctcggccagacggtcaagcagttcgccggaagtctcacggccagtcagttcgatggtcagggaagcgacgatcgggccatcatccaaaccctcgcccaccttgaacacgtcggcgccggtggtcgggtcgcccgcccaaatcgcacgctgggcgggagcggcgccacgccacttcggcaggttggagaaatgcaggttgtaccagcccatgggcaccgcatcaagcacgttcttgggcaggatattgccataggcgatgacagcggcgatatccgcatgcaggtcgttcaacgcctccatgaattcgggggagcggggtttgagatcgatgacgggcaacccgagctccagagccgtcgccttgaccgggctgggcgtgagcttgcggccgcgaccggtaggcgcatcggggcgggtaatgacgccgaccacatcaaaacgtggatcggtggcaaaggccttgagcgagggcaccgccacgtcgggggtgccggcgaacacgagtttgagcatggtcctccttgaaatgtcgatgctcactgcacggccggaatgttcacgccattggcgatgagcagttcacgcagcttgaccggatcctggaaacgtacgccacggatgccggccgcattcgagccgacgatgttcatggccttgtcgtcgatgaacaacgcgccatcggccttgatgccgaactggttcaacgcggcctcgtagatttccttgtgtggcttgcgcagcttgacaaaaccggagacgagcttgccatcaagctgctgcagaatatcgcactgttcctcggccacgtggaacagactggattcccagttgctcaggccccacacgccgatgccggcagccttcaggtcattgaccagcacgcgcgcgcccggcacgatgccggtcagggagtcgcggaagttcttgatgtagtagtcgaggatgtccgcccacttatcgcccttgtcacggcgcatgatggcgatggcctcgtcggtgctggtgccgccgtccatcaggtcgttgacatcgtagaagccggagatgtcgttgtcgaggaattcgtcgatggtcttctggctgtagcgggggatgagtacggcgaccggatcccagtaaatcagcacgttgccgaaatcgaagatcacgtcggtgatcggcttgccggcgttcgcagcggcctcgccatccgcgaccagcacgtcgtaatccatatccggctctccaggccaacccttcatagtgtcctccttctagcgatgttcattctgtaattatcgtttcacgtgttgaagacgattagatcaggtccttgggatctactcggaagcgaagctcgccgggttcgcgggacgccacatgacgagcggtttcccggtgcagtcgggccgccagctcggctcgccgactctgcggcacacggattactgccttcacccggtcggccgtggcttcgagctcccgggcgtcgaccgtgtccggttgcgcgatcggcaccgggcccaacatgccgggcagctcgccgcaggccgtccaatcgccgcccagcgcgccgatacgctgcatcagcgtcatcaccgcatcacggcgtccccatacgcaggcggcggccacggccggcggcataccggtctccacacgctcctcaagatccttggctgcaagaatcctcgaatcccagagcatcagcgattgggcgatggccgggtcggtttcgccgagaatcaacgcttggccgccacgggaacgcggcgcgcacaacgacaccgcacgcatccacgcggtcaacgtatccaaccgagcatccacgcccaacgcatacaggctggtccaagcgtcgagcacggccactgcgcgatactcatgaccggatgttccctgctcggcactgatcggacgcacgcgcggttcgaaaccgggagtggcgatgacaatcatcggctggcaagccacatcgcgcaccagaccctgcgtcttgctggacaaaactactggcacgccacggaacaatccggccagctccgccgcagtgcctgcagcacccacgcgcaccacgcgcatacgttcatgtccacagcccggacacttccagttgatggcggcagccccgcaccagcggcatcgcggtgtggagtcccggcggtcggccggtagttgcaatggtccggaacacttggcgcagcgcacctgacgatggcatttcgcacaactcagagtctcactgacgctgtcttgcggaatggacagcagcacggggccgctctccaaagccttagatagcacgcggacagccgtatgcggcacacgtgcgccgatggacgggtcggcaagacgcgcaagctcatcgcgattgagccaacgtacccaaggcgtcgcatccttcagcggcgaggcgagcgggtgaatcgcggtggaatagccgctcaccggggtctccaccgtatccgggccggtgttttcccactggctttgcggggtgcgcgcattggccatggccacgaacacgccgccatgggacttggagcgcagccgcatcacgccacgggcctgtggatatggcatcataccgtccatgttctgataggcggcatcctccagaatggcgaacagcgccgggccttcaaccggcgcatacatcaccgcacgggtgccgatcaccaccttcacctgtcccaacgccacagccagataggtgcgataccggtcggccgcgggcatggtctccgcgttaagcacggcgacgtcgcccacccagccgccggccggagcaggggcgaacggtttgagcccataattgcgcagcataggcatcaggtcttcgacctcgcgcatggtgggcaattcaaccacggcagctttaccggcactcagcgcagtggccaccatccatgccatgttccgttgccactcctgtgcaccgggcagcgaatcaaacacaaaagattggaaacgctgaccggtaagcgcatcatgaagcacattgacgtcggcgtaattggcggtcagacgacgatacccctgcgcagccccctccgaaacggtactggcaacggcaaaggtagagccagcaggcatggtcccatcgggattggtgccacgcccggcaaaaccgccttgcgtattatctggtagggagccgccgaccggtcggcggaacgacgcggctaaccgctgttcggcctccaccttggccacgcgcggtggcacagcgaaacgcagaatattggcccgtgtgccgccataggctttggcaatcagaccgatatcctcacgcatcgatgcgggaaccagcacatcggggctcaacacccgttcgatatagcgaatcgaagagcgcggggtatcgctggtatcggtgcgtgcccagatcacgccgctgaccctttgaccgccaaaccgcacgcgcaccagcacacccggttgtgcggcctcgctgtctttttcatcaatgaagtaatcgaatgtctggccgaggtggagcgcctgcacatccaacacgacttgcgctatgggatgctgctcggccggcgtatgctccgcaggcgcacgtttacgccgcttgcggggagccagccccgcaagcgtcaactgttctgcgcctgaagtagtcatggctcaactataagtgccggagccgaggtcggtaaaattttaccggcgcagataatcgagcacgtgggttaggtcgcggtcgttgatggctttgtcggcggcgagctgggtctttggcttggcacagaacgcgagacccagaccggcggcctgaatcatcggaatgtcgttggcgccatcgcccacagccacggtctggctcatcggaatacccaaacggtccgcccacgcttgcaaggcgtgcagcttcacggtcttgctcacgatttcgccgagcaccttgccggtcaagcacccatcctcaacctcaagccggttggcaatccaatagtcgatatggccctcggccgccagcatgtcaaccacttcatggaagccgccggacaccacgccgaccttccaaccgtgttcatgcagcgtgtcgataagctccagtgcacccttggtgaaatgcagcttgtcatgcaccgtgtcgaacacggagatcggcaggccctccaacagggccactcgtgcgcgcagcgcatcgcagaactccagttcgccgcgcatggcgcgtgcggtcactccggcaatctcctcaccgcagccagccaccacgcccaactcgtcgataacctcttcgtcaatgagcgtggagtccacatccataaccagcaggccgggcttgctcagcgtcggcacagaaaccgcagaatcagccgggctcccaacttcgctctcggcggacttgtcaacaaaatgcacatcttcttgcgtcatgcttctgattctgggaaaaccttgggacaatgccctctatgagtttttccatggcagccgccactattcttgcgaccgaccccacacccatctgcaccaccaccgaacccggcctgatcggcaccatcaccgactggctgatcatgctgatggaaaccatcggcggtatcggcgtggccttggccatcgccctcgaatccatcttcccgcccatcccgtccgaagtcattcttccgcttgccggcttcaccgccgcacgcggcaccttgagtctgccgggcgcaatcatctgggccaccatcggctccgtactgggtgcctggaccttgtacggcatctcccgctgggtgggcctgcatcgcatcaatctcgcggcagacaaaatccccggcgtcagccgcaaagacgtgagcaaagccaacgactggttcaccaaatacggcacatggtcggtgctcatcggccgtgtgattcccgtggtacgctcgctgatttcgattcccgccgggttcaaccgcatgaacttcctgcacttcaccggctggaccctgctcggctcggccgtgtggaacaccatcctcgtttccgccggttacctactcggcgaccagtggtgctcgattcaaggcgcgctcggcgtgttcgaggacgtggtcatcgcggccgtgattgtggtcatcgtatggttcgtggtgcgaaaagtgcgtactgttatacgtaacaggaaatccgccgacggcaacgaatagggtctgccgactgccataagttgccgaaaatcccggatagaagggaagcgaagaacccgcatgagcgacaccgaagatctcgccgcgctgaacgatcgcctgatggccaagaaccatgcgctcgccgaagcgctgagccgcgccggcaaggaactgaccaaggcgaagtcacagctcgcccagctcgctcagccgccgctcaccttcgccaccatggtcaaggtcgattccacccgcaccgatgaagacggcatccagcacgcgtcggccgaagtcatttccggcacccgccgcatggtggtgcctgtggcctccaacgtcaacgccgcccgcctgaccgccggggccaccgtgatgctcaacgagaagctcgtgctggtcgagcagcgcgatgctgacaccgtgggccagattcgcagtgtcaagcaggtacttgacgacggtcgactgatcgttaccgacgcctccggcaatcccgtgctcatacgccgttccggcgcgctcgcgtatgcgggcatcaatcagggcgaccgtattatcgtcgatccgtccgtccgcctcgccatcgaagtgctgcccgccgagggcgacaaggatctggtgctggaggagaccccggatgtcacgttcgccgacatcggcggcctggatagtgagatcggtcgtatcagggacgccgtccaactgccgttccagcatcgtgcgctgtttgagcgctacgatttgaagccgccaaagggcgtgctgctgtacggtccgcccggcaacggcaagacgatgattgccaaggccgtggcgaacgccctatgcgagggtggttacgattcgaatggcgacggcgcaatcagtccggccgaaacccatgtcaagggcgtgttcctgtccgtcaagggcccggaactgctcaacaaatacgtcggtgaatccgaacgactgattcgcctgattttccagcgcgcccgtgaacgcgccgcggacggcaatccggtggtcgtgttcatcgatgagatggattcgctgctacgcacccgcggctccggcgtctcctccgatgtggagaccacgattgtgccccagttcctctccgaactcgacggcgtggaatcactcgacaatgtgatggtaatcggtgcctccaaccgcgtggacatgatcgatccggctgtgttgcgaccggggcgtctcgacgtcaagattcgcgtcggccggcccaaaaccaatcaggccatcgccatcgtggaccattacctcaccgacgacctgcctctggaagatggcgtcgacgcgcacgccttgtccgccgtgctggtgcatgacatctacggaacctccgaacgccgccatctatgcgacgtgcaggaggagaacggccagtggcatgcgttgttcctggccgacgtggtctccggcgcgatgctcaagaacatcgtggaccgggccaagacccgagcggtcaaggaatccatcgaaaccggcttggacgtggcactcaccgtgccgctgctcgctgccgccgtggaagacgaataccgcgagacccgcgattccatggccgacgtggaccccgaacaatggtcgcgcatcaacggcatggacccgatccgccgcatccgcaccgccgaatagctcaagctcaaggagcactacatgaccgttaaacgagtgatgggcaccgaaaccgaatacgcggtatccctgaacaccccggaccgctacaatccggtgcaactgtcctccgacgtggtgaacggcgccgcggacagccacagcaaatccatccgctgggactaccggcaggaggacccggtcaacgacgcgcgcggcacccgtctcgaacgcgccgccgcccgcccggacatgctcaccgacgccccgcagctcaacatcaccaacgtgatcgcccccaacggcggccgcgtctatgtggaccacgcccaccccgaatactcggcgccggaaaccaccgacccgttcgaagcggtccgatacgaccacgccggagacctcatcatgcaggccgccaccgaacgcgcccgcaaacagaccggcactcccattgccctgcatcgcaacaatgtggatggcaagggctcctgctggggcacgcacgagaactatatgatggcccgcgcggtgccattcgacttggtcacacgcctgatgaccctccacttcgtcacccgccagatctacgccggctccggccgcgtagggattggcgagaacagcgagatcccgggctaccagctcagccagcgcgccgactacatccacgccaaagtcggcctgcaaaccaccttcgaacgcccgatcatcaatacgcgcgacgaatcccactccaccgatgcataccgccgtctgcacgtcatcgtcggcgacgccaatcgcatggaggtgccgcaggcactgaaactcggcaccacgagcatgctgctgtggctgctcgaacatgcggacgaggccggattcgacctgaacgccttcctcgacgaactcgaactgtctgacccagtcgaggccatacacaccgtttcccgcgacctgacgctgggggcaatcttgccgctggccaacggcggcgaaaccaacgcatggcttatccagctcaaactgcgccaagccgtctaccaggttgccgcactggtcgaaggtaccgacaccgccggcgaacccgcctggccggacaaatccaccacatccattatggcgatgtggcagcaggcgctcatcgactgcgcctccatccgccatgccgccgacgatgacgaacgtctggccatgaccggcgaggccagccgcatcgaatggctgctcaaatggcagctgctcgaaaaactgcgccgcaaaatcaccacaacgtccgcacccggcgtggccaacggatggaatgatccgcgactgaaggtcatcgacctgaaatgggcggcgctcgaccccgcggacagcatcttcaccaaactcgaaccccgcaccgaacgggtggtgagcgccgccgacatcgcacgcgccaccaccgaaccgccggaagacacccgcgcctggctcagggcaaaactcgtggcgcaattcggcgatgaggtggccgccgccagctggtcccgactcactgttcgcgacccgcgcgccgcagacgagggcgaggcggtcgaattctacggcaatgccggccatatggccgctaccgcccatcacctgttctccctcgacatctccgatccgctcgccttcaccaaggcgcactgcgaaaccgaactcaattcagccgaacacgccatcgatctgctgaagtcgctggccatcaacgccgaacgatagacttggtagctatggaagaaacacgcgaagagaccccacaggacctgcgcaaccttgcgctcaaagtcgccggcctgctcgaagaagccggccagcatgccctccacgaccaactcaatccgcgtaacctcgcccagccgagcaccgagaacgcggaccgtggcccccgctacaagcttgaagtggacaacaagatcatgcgcttcatgagcgccagaatcgccgacatcgcccacttcgacggcttctggaccacccgccccgccgaaagccgccctggccagcgttactggtacatcggcaagatcgacggtgtgatcaactacgtacgtcgcatgagcgaatggacggtgaccgccgccctgttcgaattcggcccggacaacgagcccaagccgatcatcggcatcgtgcacgccccggccctcggcctgacctacctggccgccaggggagcgggtgccgtgcgcatccacaaaaccgcggtcggcgagaagcgcgacaaggtcgtgccgtcgatgacctcctcgctggatggttctgtgctgagctacggcatgtccttcatccccagcgaatcgcagcgtgcgctcgacgtggcctcctcgctcgccggacgcccggccgacatcaagcgcgtgggccccgtctcgctcgacctgtgcaaagtggccgacggcacctatgacgcctacttcgagccgatgctgcacgtgtgggatatcgcgggcatcgccgccggcaccgtagtggtctgggaggcacagggcacgctgagccgttgggacggcgaacgcatccactggcgtcacgataacgatgtagtggcctccaatggactcatcatccgcgaactgcagcattacctgcagcagtatccgtggctcgactccatcaaccagcgataattttttgactcctccggctcccctcgggtgaggggagccgtcggccgaaggctgactgaggggagtttgacagcccaaaaagaagacaacatgccacaacaattcgaacaacctcaagcacagcaggccgcgacccaggaagacgacgccctcgccaccacgcaggccgccgcccaaaccgagtccaccgaccaagccgacgtgttggacgacatcctcgacgacatcgaatccgccttggaaaccaacgccgaggaatacgtcaacagcttcgtgcaaaaaggcggcgagtgatgccccaactgcgtgacagcggcacccgctccctgcacgccacggaacccgtaccatccgccgagatggacgggttctgccgtattttcggcgtcgaaaccgaatacggcgtggcggtcaccggtgccgaacgccccgtggacgccggccaggtggcgatgaccatgttccagcccatcgtctcccgttcccgctccaccaacacgtatctggccaatggctcacgtctgtatctggacgtcggatcccaccccgaatacgccaccgccgaagcgcgcgacccgcgcgaggccctggcccaggacctcgccggcgaacacgtgatgcgcaacctagccctgaaggcccagcgcaagctgcgcgaatcctacggcgcacacgccacgatccatgtgttcaaaaacaacgtcgactccgccggccacgccttcggctgccacgaaaactacctggtccgccgcttcgtgccgttggagaccatcgaacaccagctgctgccgttcctcatcacccgccagctgtacaccggtgccggccgcatgaccccggacggcttccagatcacccagcgcgcggacttcctggacgaggccgtctcctcggccaccacccgctcccgcccgatggtcaacacgcgcgacgaaccgcacgccgaccccgactccttccgccggctgcatgtgatcatcggcgactcgaaccgttcgcaatggtccacatggatgaagcttgccgtcacgcaccttgtgctgtgcgcgatcgaagacgccttccgccatggcgttccgtccggattcgagcagtatgcctttgctgatccggctgccgccaatcgcacggtcagtcgattccttgacgatccgcgcgccgaactgacgctcgaatcaggcgaatccgtgtccgcactgggtctgcagcgccggtattatgcggcggtcaaggccttcatcgaaacccatggcgatgcgctggcaagttcgctgccggccaccacgatcgacacgattatgggggagtggagccgcgttctggacgcgctggagcgtggtgcatacgatgcgctcgccgaccgcgtggactgggccgccaagaagcgtctgttcgacgcgctcaaacgccgtcgcccggacgtcaccttcgcccagatggaacagcttgagctcgactaccacgacatcgccaacggtcgcctgtacggttcgctcgtagcccgcaaccagatgcgtgagctgctgacaggagacaacgtggaatacgccgtgcacaatccgccgaccgacacccgtgccgccctgcgtggccggttcgtggacgcggccctgaacgtcggagcccagttctccgccgactggacccacctgaccctgaccgcccccgaacgccgggaagccatactcctcgatcccttcgaggccgagcccaccctgggattcgagcagcttatggaagcgctgaactagtccggaataatacggttggacaacacgtcacagcaccacaacaaaaagaccccgaccatctcggtcggggtctttgtcgtcagtaatgctcgaagtaatcgctacgagcagaaggtcactcggtgacggccttcttcagcagggagccagcggagatacgaacgccgtaggaagccggaatgtcaatctgctcgccagtgcgcgggttgcggccggtgcgagcggcgcgcttgacgcgctcagcggagaacaggccggtgagcttcaggccttcgccggacttcatggcctcgacgaacacatcctggaaggcgttaacagcagcctcggcctgagccttggtcaggttggacttctgggcgatcttcgaaacgaggtcagacttgttgtatgccataaagcatccttcttgggtcaggggacaagcacttttgcttagtccatgttgtcatcaatgatactagcgcatgtttctgcgaaaacccgcgttttataagggttttcacatctatttccccgaagggggtatgaaaatagacgaatcagacaagattatgcttgtcaagccacttcatggccgccgcgcccagcggaatgcgcagccagtagaacaccacgcggtgcagcaaagtggcggaaagcgccacgccctgcggcactccgaccgccacgaacgcgaatgtcagcgccgcttccacaccgcccagaccgcctggagtgggcactgcggaacccaatgcataggccagcaggaagacgaacgtcgtttcgatcggattcgatgaatggccgaacgcttgcagggccgcccagaaagcgagcccagtggtcgcgttctggaacagcgcgcccaggcagctgactgtgagctgtcggggctgggaaagcacgtccagcagctggttgatatacgtcttggccagcggcataagacgacgggtcacccagtggcgcaacggtggaatcatcatcgcaatggacagcaccacgaccacaacgcccagcacgataaccaacgtgtttgtcgggattgcgccggagaacatgttgcggccggtgaacaggccgatgatgaccagcatggagaagtacacggcgtaatacaccacgagcacggcgctcataattgcggtcgcctgggtgttgcgatagccggatttgcgcaggaactgcaggttgacgaacgaggggcccacgccggctggcatggatacggtggcgaagccgcctgccacctggctcatgaagacgcccatattgtcacgcttgtgccgcgccatcagggaaccgagcgaaatcgacgagccgatccagccgcagacaccgaacgcgagcgtcaccaccgccatcaacgggttggcgttggtcagcgcggtgatgatctcctcgggcttcagttgggtgaagaccacgaccacggccacgatgaccagcagcatggtgatcatcgaacgccaggagaatcgggccagcgtcaccggttcggcggattccaccgtctcctcgtcagccagcgcggtgatacgactcctcaggcccttgagcagctgcttgtcccaggattccagcgcgcgcgtgggggaggggaccgcgaccttctgaatgaacggggccaaggccgtcagagtcgtgtctccccacgcctcgcgggcggcctccaccgccggttccacgccgatcagcgcggcgaacagcactagcagctgaactttgtcgagcgcggtgttggccggaccggaagcgttgtcgccgttgagccagccggcaatcacggcggtgccgtcttcaagccgggcgagcgtgtccggcgtgatgcgccggtgcgtatagccgcgccggctcgccacggacaggtagcgcatgtaggccacggcatccgccttggtaagcgtgttcaggttggcgggcagttcgatggtgtgtgcatccagcaccagaatcgcggattcgtcggtatcggcgatgccgtagggtgcgggcgcgggcagtttgatattgtgcagacccagcagcatggcgaaatgatgctggacggcgtcacgcacggaacggtcacgtcggatggacacactggtgaaacgcacccagtcccacaactgcttcagatagccgacggtatgggtctgcgcgtcgatgacggaaacgatgaaacgacggttgtccgtggtatccagatcgtagatgcgcgagccttcggccagatcgtcgtccagcgtgacggccagtgaaccgtggccgacgccgggctcctgatgccgaatcagcgaggcggtgtccagtccgatgcctttcagggcggcgaccagatcttggccccacacgcccttgttctgcgtgccgaccacgaatcggatcagcatgcccactgtgcggccggcggccatcgacaccagcatgccggtgaccgaatgccacgacagcaccaccatcaccgcagcgatggcatacaggatattccagctccatttgaccgtggagcgggtgcggcgtggcccggcggcggtcaggaaggacgccatgccggcgtagatgtcgggcaacagcccggagccgtatgaggtggcggctgagactagtgccattggcagggtgaaatcgttcagactgctgattgccgtcgatacgacccacaccatgccgtagccggcgaacatggccagcgcggacaccgcggcctgcagccattcccgggccagtagcaattgagcgagcacgatgatcacgatgacgatggtggccagctgcgtcagcacggtggaggggaagtcagccaaccagttgatgacctgggctgcggtgtgtgcgtcggattcgacgccgcgcgtcatgccgcccagatacacggcgaacaccatgaccacggcggccatcaacagcgacagaccggcccgggtcaaatcgccgaagtcgcgcgtgcggcgcggagcgatgtcgtcgatgtacggtccggaatcgttgctgtcgtcggttgccgggctgtccggtccgctgacagcaaaactggccgaccggccgtcaccagaggcgatcggccggtcggtagtggaggaggtcgccttgtccgggcgatcttccgtagtggactgctcctgttcagtagtcatgaaatggttacctgacgcctgtccttgttcggttcagtttgcggtttggtttgtgactcagcgcagtagtgtggtggatgcgatgggctcgagggactcgcatcgcacctatttcagcggtcgaaagcgacgagctggctggccacaccggtgtaggtggcgggggtcagagccttcaagcgagcggcggtttccgggtcgaaggactgctggtcgatgaactgctcgacctgttccttgttgatggtgtggccgcgcataagctccttgaccttctcgtacggcttgtccatgcccggcaggcccttgagctcgcaggcgcgcatggcggtttggatcggctcgccaagcacctcccagttctcatcaagctcacgctcgatgacgtgggtgttcgggtggatggactcaaggccgcccatgaggttggtcagggcgagcaaggagtagccgagcgcggaaccgatgttgcgctgggtggtcgaatcggtcagatcgcgctgccaacgggattccaccagcgtggcggagagggtgtcgagcagcgagcagctgatttcgaagttggcttcggcgttctcgaaacgaatcgggttgaccttgtgcggcatggtggaggaaccagtggcacccttgaccggcacctgggcgaacactccacgggagatgtacatccacacgtccacacacaggttgtgcatgatgcggttggcgtgggagacggtggagtacagctcggcctgccagtcgtggctttcgatctgcgtggtcagcgggttccaggtcaggcccatgcggttggtgacgaattcgcgggagacggcgacccagtcgacatccgggcatgcggccaggtgggcgccgaacgtgccggtcgcgccgttgatcttgcccaagtactcctggttttcgatgtgcttgagctgacggttcagacggtagacgtagacggcgagctccttgccgagcgtggtcggcgtggccggctggccgtgggtgagggagagcagcggcatatccttgaattcctcggccttgccggcgaggtggtcgatgatgcgcttgaactccggggtccacacgttttccatcgcgttcttgacgcaacgggcgatggagaggttgttaatgtcttcggacgtgcaggcgaagtgcacgagggtcttcagctcgtcgttgatgttggccagctcggccggagccttgtcgatctgatcatcgatgtagtactccacggccttcacatcgtggtgggtgatggcctcatgagcggcgtgctgcttgatgccttcggcgccgaagtcctcgggaatggcgcgcaggaaggcctgctcttcggcagtgaacggcttgacgccgtcaacgattggctggttgccgttgccctcaaagccgttggccagaagaatcatccattcgacttcgacacgcatgcgttcgcggttcagggcaggttcgctcatgtattcgacgagcggggcggtggccttgtggtaacggccgtcgagcggggtcaatgcgattgcgggggaaatatcggtaagcttcataacctccaagggtacttccagccgtgaaccgagcggctatactgtggtgtggcgttcccgcccgagccgtacaggtcaaggaacgcccgtgattcgattactgtgtgcggcctttaaggctaggagatcaccatgcctgcaaccaccattcatactcttccgaaacgttcggtcgccgtatcgtcgctgaaatggcagccgttggacatcgcggtcggtgccacactgggcgcggcctgcggcgtgatcttctggggattcaacttcgcgtacatgccgatctcttcggtgtttggtgcgattctgcccggtttcgccagcatcgtgcacgccgtctggtatttctccggtacgctggcggtgctgattctgcgcaaacccggagcggcgctgtacgtgaaccttatcggcacgctggtcgaaacggtgattggtagccagttcgatttgggcttcgtgattatctcggcgctgctgcagggtgttttcgctgagattccgttcgctttgacccgttaccgcatgttcaatctgccgatttccattgcatccggtgcgttggtcgccttggaatacggcacatatctgatgctgtttcgctacgtgggtgtgtcattcgtcagcccgcgtggcatcgtgcacatgatttccgaggtcaccggcggcgtgcttatcagcggcgtgatggcctggtatctgatgctggccatcgccaaaaccggtgtgctcgaccgcctcgcatccggccgcgcactcatcgagcgacgcgcctgacactctttgcgcgccactgcggtgattgcattgtgggggtagccgattgatgctaagcattgacagcattgacaagttgatgtgcccgttgccgtgagaccccgagtatatcgcctatttgctgtagggcgagacccatgccatgtagttcttgtgccgcggcgcgagtttcccgcgctgcgttcgatctgcattccgcttcttccttgcgcagtcgccgagcttcatcaaggtgctcttgtacggattgcggcagttttgtctctatggtgagtgcgaaatcagcatcttgcgtcatgacggtgataaggtcgcgtgccatactttcaatctctgctgttgttcttgcctgcgtgaaaccgataccgggaatctcgagaatccagtatttttcgccaggacgaacgatgacctgatatgttttcactgctgataccagcctttcccgagtttggcttctgcttccttacaaatgatgttcgcgaggtcgttgtcgatttcgttatggcgtgggatgggaatcatgagtccatcgagttggaatatctcatgactccctctttgcctgatactctcaaacgtaatattcttgcgtttcgccgcttgcttcatcagtttgatgagccatctcctactcatcattatattgttaactcctttcttgacaactctgtcaagtgtggtatttacttttaaccgccgaacgtgctgaactcggtggtgcgctcgccgggagcaatggttgtggactgggtcatgcggccttggtaatagcgggtttccttgagttctccgttgatgacttcctgaaaatgcgcttcgtggcgctgcacggcgggggagccgaggtcggtggcgttctgataagcggcctgatggtatttgagccaatgcgacaactccctgccgttggtcgaaccagccacggatgcggcgtcatatggggtcagaccgttgatgggcgttgcgccgggagtgcatgagacgtccgaatgcactgtggatggtgttgccgcgggcgcgggcgatacatgcccttgcacggtgagccaattatcggtgaccgggttggcggcaccatccagcgcggcgaccagttcatcatcgatttccacgctggtgacccacgtgcgttgcggaatcggatgattggccaccggcgatccggctgtcaccacatgctcgatggtatattcctctgcccaatccgaggcaagcgtggcggcaacgatgccaccttgggagtggccgatcagtgccacgggctcgtccttgccgataccagcctgacgcatcgcctcggcaaccgtgcgagcgctgtccgctttcctgcggcgctcctgatcggcgctcatcagttccacgttctgcgcccagccgaatggtgagtcaggttgtccatcggtacccgggatggtgaccagccaggagttggttccatcagcccgttcatagcgttgaatggcgatggtcccatattcgagtccgctgttcagctcgattttgccgagccgttcttcggcgagcctgcgcagattctccattgactcggccaccgatccgcttgcacggacgacgtcggcattcgcctgcacctcgcgcacgttcagatgattgccttggacgacgtctttcgccgggccggagaaattggcgattttccccgcagccttgttgacctcatcggtgtgcgcaatgctcttgccgataggtacgccgccaatgattccgcccgcgccgctgagcactccttcctggaacggataggtgaacgtggacatccatgctgggttcggtttgccgtcaatagcccagccggccagaaagccgcccgccgccacagcggcaacacccaccgcggcatatcccggtttggcctgtgtaccggcctgcaataattcggtaaacatgcgccgagccgtcatctccgcctgagaatacagagagtgtgcgcgaatcagcagatcggccgcgccacgcagatcatcgctcaaccgctgacatgccgttgcatggtcataacaccgattgcccagcgcggcatatggtgcagtgacatggccgggaacaacggcgctcggatcgcccgactgcaaggtgacgcacatcggcgcactatgccgatgtgactgcaactgtaatgcggccgattcccaagccgtggctatggccgcaaatcctgccgcctcgtcatcgagagccttggctatggcggcatattcttcaagagtggctggcgcatatcccactccgccgtaaacggacgattccacctgccagtaatcgtgctcgctcatgatgacccccaagccaatcggtgggtggtctccatgtcttgcgcgagactggccgaatactgtgcggtgcgactgagccgcgatcggaataggtcggcggctttaccggtccacacgatgttgcgagagcggttcacggccaccgccatctggtccgattgcgccagtgtggccgcacgttggacggacacgaggtcgcgactacgctgtaccgccgcatggcaagggcaagtgccgtaatcgaacggcgtcaccgtattgccggcaaagccgccggcgggatcgatgggtgctggggtgctggtgtaggtattcatatatccagctaaaaggacaggactcatgcttgtccagccggaacgaccaatgtggttctagcttgccgattttgggcgaagttattcacaagtgttgtgtatagccgtaacgattatccacaaatagcctgtttgggcacaccttggatcagccatgggctatcgggatcagacaaacgccaaagccgacagccgaaaccgggaaacagccgcgataaggccatgacccgtgaggatgtgagaaaaagagcaaccgtgaacgactgcttaccacggcttggtggccccggtacccttgttctgcgtcgccttctgctcggattgggtggtgttcgactgggtatcggtggattgctgattggccttcatcagctcctcgacctgcttcttctgctcgtcggtcaacgcgccgccctttttggcattggctgaggaactctcggattgctgcgccgactgggcttgcccggaatcggaaccgctgttctgcgcctcggcctgtttcagggtgatcttcgtcagctcggaagaaatcgaagcattggtgtcgatggcgtccttgacttgcggcaacagaagcgtacgcattcgcccggcctcggcgaattgcgcatcggtctgctgctgttgcgccttgagcgtggtgatatcagtcgactcatcctgagccgctttgatattggcattcaatgatgcggtggcctgattgaacgtaatcgaagcggacaggtttactgccgccacgccggcaaccagcagcagcaatacggtgccacaagccaggacgatacgtgcccaaagcgggcatttcgcccgcatccgaatattcgccgagccatcgttctcgtggatttcgttactgttcctcacagcagcctccttgaggtcgcgatccatgcaccgacttccatggcaagcaatatcgccaacgcaatggccaacggccataccaccggcgtggtgcgtgtgcgctccttgaccgtggtggtcatgcgccactgcttcgacgacctggccgaaaccgaatccgccaaagtctgtgaagcgtccacggccacatacgtgccactgatctcgtcggcaatgtctttaaggttcttctcatccatcttggagatgccgggttcgccggtatccgggtcgaccacccagtggtccgtggtgttggaatcgccggcactgacgccatcggcgatgacgggaatcttgccgccctcggtcgagccgacgcccacggtaaacccatcattgagatactgtcgcagtgacgagaacgtacgacgcgtcacattcgaggtctgttcgccgtcagtgatgaggtacagcacaatcgcatcatccgggtgcgcttcacgaatcgacttcgcggtcagcagcaattgatcgatcggagcatccagactggatcccgccgacacggatgtggcttccaccgccaatgtgttggcccaattatcgatggccggcgcatccggggtcagcggcacatcaagtgttcccgaagcaccgaaccgtaacgccgcgaaactggcgtccgggtaagcagcggtcacatcatgcacggcctgacgcgcggcatcgatgcgggtaatggtcttctcggacccgtatgtggcatcagccaccgccatcgacccggtggtatccaccgccacgatgacgtcggtggcattgatgacctgtgaggtggtagacgataccacgctgggagtcagtaccatcaccgcgacaatgagcagcataagcgtacgtcgtatgcaagcccacacggtctcgtcactggaagcacggcggcgaacaaacaatacgatttcgagaatggccagtacggcgagcccggccgccagcagtccgtcggcgacccagcccaaggcgggggagaaggtgaatccgttcatcgcctcaacctccatgcacatacgatccagataatgagtatcacggccagagcaagcgtccacagaccgggagcgtccaccattgaggatttcgccttgttctccacatccgtatctctacgcgactgaatatcccgtaccagctcatctatcgacgcgccattcgattgggtgaggaagatgcctccatgcgactcgatcgcggacttcatatccgttgtggtttggtccgattcactggctttcggcccggaatacaggccgtccacggtgattttggtctgctgggtcaagtccaacgcttcggtcagcgaataggtgggtttgcctgacacgacgttgtcggtggccagcacgatggatgccgcacgctgacggtcggcattcgcatgattggcttcgccataagcgaaaccggggagcatcgccgcgcaagacaccacgccgtcgccaatcaaggaggtggcgtccttgcggttctgcgtgccttcgagccaattggcgatgtcctgatattcggcatcggacatcttatcgatgtcatcctgcgactcgacgcctttcagcgccttgctggcggaggtcaactgtttggtgaccagttcgtagtcgtcggtcagcgggaacaccgtgcgtgaggtcgagttgaagatactcaaaccgatacgttccccctcgaaatgcttgaccagctccaaataggtatcgatgacctcgcgatcataggggagcgtggatcccgacacatccagacacaggacgatatctcggctggaagcgcgttcgtcaccggcatccacttggctgggacgagccaccagcacaatggccagcgccagcgcaagcaccagcacgctgatggcgagacggcccaaagcgcgccattgacggaacagacgggaagcgtgctcggtattgagatcgtcgtccatcgagaatacaggggtgtcgtcggcggcgttacggcgggcgaacacgacaatcagcacgataatcgccagcgctgccaagacgccggccagagcggcccaaggccaatgccatgccagcatcatgaacgccacctttccaccagattcgccacccactcggcggcctgctgcacgctggtcgtctgggcgattcggttgcgggcatcatcggcaaattccggtggatacaacgcgctaatggtctgcttcaatgcgtccaatccttggcgattcgcgggcgtgcgattcaggtacgccaaatcggtcagcgtactggaactaagctccttgcctgatgcggcaccggcgaaatcacgggcgatgacggccaattcgacgaaagcctcatgccggggcagtgctccggattcatgacgggccaccacatcgtcgatgcgggcacgccactcggccttggagctggcattgctatgagtgccacgcgcacggtcgctgttccgaggtttgcgtgcggggcgagccagcatgatgatcaacgcgatcagacctaccgccagcaacaggcatgcgacgatggccatcactaggggagtggtcaaggccaacgactccacgggcctgagatcgccgggatcagtggcgagcgggatgatggggaacatgctgtgcatcatagatcacccgccaaagtcagtccgaccagttcgggtgcagtgcccagtctattgcgtgtggtgcgggccaatgcccgggacaccagggcgacgaaacgatcgaacatggattcgctggatgcggctcgaatgatatgggaaccggcacgggtgagctcctgttccaaagccgcggccatatacgcgcgatgagtatcgacctcggccgctgccttggcgttgcgcaggaatgccggcacacgccgtgcactcaagccgtcggcgggagcgtggcgggatgagacggccttgaacggattcatcgtcgccacatcgatcagcaccatcggatgggtgcgggtaatacgacggatcgtggtgatatgccgctcctccatcgcatgctcatcggtggccaatacgatcaatgcctcacgatccttgatacggcgcgcatattccagcagcgcgtcgatattacggtgatgatcccaatcacgatcaagcgccttgtccagcgtgcgttcgaactgcgcgaacccaccgttgaacggcacgcgggtgatgctggactcatcgccgaacaccagcgaaatatcgtccgaccggcgcaacgacagtgcggcgaacatacgcagcgcattggcggcaacctgccatgcgcgttctccggaagggcatacgccagtcatctccaggccaacgtccatcagcaaccagacccgtgacgtcgacaggcgctcgcgctcgaccaccatggggcggccttggcgggcgctggtcttccaatcgataagacgggattcgtcgcctggctcataggcatgcacatccatcgcatcgccgctgccgccacgacgcccggatgcgtgttcgccctccagcacgcccaaagccttccttacggtaggcaggctcagctgagtgccaagggcctcgattttcttgcgaacggaatcggaactcacggaacaggaaccgtttcgacgatcttgtcgacgatctgatcgctgaccacgccatcggccagtgcctcgaacgtcagcataatacggtggcgcagcacctcatgagcgaacgccttgaggtcctcgggcaccacatagtcgcgcccggacagcaacgccttcgcctggccgatacgggtcaaggcgatggtggcgcgcggcgaggcacccaaacgcaccaaggacgacagtcccttgatggggcgggagccggcacctcgtgacgtggcggtgatatcgaccgcataacgcatgatcgcgtcggaaacatgcacgcggcgtgccgccttgcgcagaaaatcaacgtcagacacggaaatgcgttcgccggtgatggtgtcgggaccgatcatatcggagccacggtgggtgagcatggccagcatgcgagcctcttcgtcgggcgaaggataggtcatgacggccttcatcatgaaacgatccatctgggcttcgggcaggttgaacgtgccctcctcctcaatcggattctcggtggcgatcaccatgaacggcttgggcaaggcgatacgctgcccgccgatggtcgtggcaccctcggccatggcctcaagcatggcggactgggttttggcattcgaacggttgatctcgtccagcagtacgaaattggcgtgaatcgggccgatctgcgtggtgaacttctgcgacgcaaaatcgaagacctgcgtgcccaccagatcggatggcatgagatcaggagtgcactgcacgcgtttgaacgagccggatacgcaggtggcgagcgtctgggcggccgtggtcttggccaagcccggcacggattcgataagaatatgcccgccggccaccaaggtcacgataagcgattcgcgtagattatcctgacccaccagtgtctgggcgaacctcgcccgaatggcgtcggccaggatacgtgcgcgtttggcgtcatcggcacccagcggagccgacacgccgggcgcgggaacggtgaccggtcgtgcggcggtggtcggcgaaggtatgttcggttgcgtggggaacaaagtcatgccctcactgtaactactcacaatgactgttggtctgtctaaagagtccaatccaccgggtcggcacccatggtgactagggcttgattggctctggagaatggtttggagccgaagaatccgcgggaagcggacagcggactcggatgaggcgatttgataatgaaggcattggtcagcaatggctcgaggctttgcgcattacgcccccagagaatcgccaccagcggcttgggcttgccgtcggcgtccgtgcgcgcgttcaacgcacgaatcgcggcctcggtgacttcctcccagcctttgccctgatgcgaattcggccgcccgacgccgacggtcagacatctgttgagcaacatcacctcacgttccgtccacggtgtcagatcgccgttggtgggcatgggcaccccaaggtcgtcaaccaattccttataaatattgaccaggcttttcggcagcgggtgaacattcggcgccacgcagaagctcaaacccaccgggtgacccggggtcgggtaggggtcctggccgacaatcagcaccttgatggaatcgaacgggatggtgaacgcgcgcagaatattgtggcttgccggcagccacgggcgcccggcggcgttttccgcacgaagaaaatcgcccatatggtggatggcgggctccacgtcggccaaggcatgggcccaccccggctctaccagttcgctcaatggtttgatcatgactcaccactgtagtcaaacgtgcatatccggtgcacgaggcgtggtgtggtggactgatgagttgtttgccgattacactcatgggtagttttgacaggaagaaagggcgattatggcacgcgacatgatgacctacgaatcctatgaaccggattccttcgacaatcctccgaagggaccggtgggagttcaccgtggcgctcgttcggcagtggcccgcctctgcccgttcatcgtcgttattctggtggccgcactgtgcggtgtcggggtctgggcatggatttccggggaatacaggaatgcaataggaggatcgtcccagactgcgaccacgtccgggactgcttccaagtccgattcgtccagcaaggctgagaccaaaaacagcaccaaggatgattcctcgtccacttcgaccgatccgtccaaggactcgacttcggattcggcaaaatccgataccaacagtgatacgacatcctcgaatgagaatcaagactccgatcagcagtctcagcagtccggagccaccgcgactgtgaataaggccacgcaggtgcgtgtggtcaacgccacaggaatccaaggatatgcaggtcagcaggccgatgtgctgcagaccgccggttacaccagcgtcgaggcgaccaatccgcgcggcacattgccggcttcttccgtggtatggtatcagaatgaagccgataaagccaccgccgaagatgtggcgaccacgcttggcatttcggctgtggagcaggtgcaaggactcgccgttcccattacggtggtgctgctcaactagcgttgttgatgcgtccctgatatcggcgtggaatacatcgaaaaccgtgagcgttctcacgtctatgaaataattcgtaccgaaaatgtgccactgcggttgggattgttccctcgtcactgtacaatcgtcatctagtcgcgaggtaggggagcgcgatgcggttctttctacgttccctataggttttgtgtcgcgacgcctaagggaacaaaggaaagatcagatatggcacaaggtaccgtgaagttcttccttgccaagaaggggttcgggttcatccagccggacgacggcagcgaggacgttttcgtgcactacgcggaaatcaaggacgacggcagcaccaataagttcaagatgctgtacgagggcgatcgcgtggagtatacgcccgcttcgtccggcaaaggcacgcaagcaaaggatgttgtcaagctgtcttcgggtgaagcccgctccgagtgagcaacacgcacgcaaggatgtgcattgaaggccctgaccgtttcgacggttggggccttttcatgcccaaagcgcaatcgccgccgatgatgttggcactcggcggtcgcgagtgctaatgtctgggttagcactcggaggtcgagagtgataatcggcggctgacggctggtcgtcacgactcgacgcttgcgagtgataaccggtatacctagccatttggaggaatacgcaaccatggcaaagatcatctcttatgatgaggaagcccgtcagggcatgctggagggccttgacaagctcgccaacaccgtcaaggtcaccttgggcccgaagggccgcaacgtcgtgctcgacaagacctacggcgctccgaccatcaccaacgatggtgtgtccatcgccaaggaaatcgaccttgaagacccgtacgagcgcatcggcgccgagctggtcaaggaagtcgccaagaagaccgacgacgtcgccggtgacggcaccaccactgcgaccgtgcttgctcagtccctggttcacgagggtctgaagaacgtggtcgccggctccaacccgatcgccctgcgtcgcggcatcgagaaggccaccgaggtcatcgtcaaggaactcgtcgccgccgccaaggacgtcgagaccaaggaccagatcgctgctaccgccaccatctccgccgccgaccctgaggtcggcgagaagatcgctgaggctctggacaaggtcggccaggacggcgttgtgaccgttgaagacaacaaccgcttcggcctggacctcgacttcaccgagggcatgcgtttcgacaagggctacatcgccccgtacttcgtcaccaacgctgacgaccagaccgcagtgctcgaagatccgtacattctgctgacctccggcaaggtctcctcccagcaggacatcgtgcacgtggccgagctggtcatgaagaccggcaagccgctgctgatcatcgctgaggacgtcgacggcgaagcactgccgaccctgatcctgaacaacatccgtggcaccttcaagtcctgcgccgtcaaggccccgggctttggcgaccgtcgcaaggccatgctgcaggatatggccatcctgaccggtgctcaggttgtctccgacgaactgggcctgaagctcgagtccgtcgacacctccgtgctcggccacgccaagaaggtcatcgtctccaaggacgagaccaccatcgttcagggcgctggctccaaggaagacatcgacgctcgcgtggcccagatccgcgctgagatcgagaacaccgactccgattacgaccgtgagaagctgcaggagcgtctggccaagctggccggcggcgtggctgtcatcaaggtcggcgctgccaccgaggttgaggccaaggagcgcaagcaccgcatcgaagatgccgtgcgtaacgccaaggccgccatcgaggaaggcctgctgcccggcggtggtgtggccctcgttcaggctgctgccaaagccgagaaggccgaggccgtcgcctccctgaccggcgaagaggctaccggtgccgccatcgtgttccgcgccatcgaagccccgatcaagcagattgccgagaacgccggcgtgtccggtgacgtggtcatcaacaccgtccgttccctgcctgatggcgaaggcttcaacgccgccaccgacacctacgaagacctgctggccgccggtgtgaccgacccggtcaaggtgacccgctccgctctgcagaacgccgcctccatcgctggtctgttcctgaccaccgaggccgtcgttgccaacaagccggagccgaagcctgctgccccggccgccggtgccgacatgggctactgatccgcaagcgatcgctagctgattgagctgaaaggggactccttcgggagtccccttttttgtattctggctcccctctttggggggagctgtcgaacgcagtgagactaaggggagctgcggtgtagggatactccctcagtttcgcttcgcgatcgagctcccctcagggaggagagccaagaaactagctggcaaacaggcgcgaagcttggatttcggcgtcagcgtacacggtggaggcttgcgtcagcgagcgttggatggactcgagtgaggcctccatctgctgttgggccgcacgccactgttcggctaccgcggtgaactgggtggccgccgaacctcgccatgcgtcctgcaaggcattgagattggtgtacatgccgcccacggcctgcctgatctgcgagatcgaagtggccactgcggccgaggatgattggattcgctcggaatctacctgatattggggcatcgttgctccttttctagagggttaatggtatgtatggcggccgcttgccaataccggccgctaaggtggaggatatgtcaacaacgaatcgggaagacggaaaaacaactattgtggtcctatcttcggagccgtcctgttcggccttcgggaatatggtccgaaaatggcttgtttgtgccatttgcgcccttgctgcagtagcgatgaacgcaatgtggataaccgcaaatgcctatggggataactcgggcgacagctctgacagctccagcagcagcaccgacagcggcgtgaccatcaccgagaacatcacggatacggaaaatctcctgggctcccatgcggccgaagtcgcggatgccatcgccaaaaccgagaaggaaaccggtgtacacgtgcatctgctgtatctttccagtttcaatagtcaacagaaaccggaagactgggcggcaaccgtgatggagtccatgaatcccaagccgaacacagtgatgcttgccgtggcctcgaatgacggcaacctggtggtcgtcgtgtccaagaactccgataagtggcttctcgataacaaaaccgtcgataagctatccgaagccgcacagcagccgttactggaaaacccgccgagctggtctggcgcggcaacggcaatgatggatcaaatcgtgaaatccaaaaaagcctccacctcatcatccacggtgaccgtaggcataatcatcatgggtgtggtgttggtggcgctggtcatcatcatcgtggtcatggtggtgattcgtcggcgcaaggagatcaagaaggattccaaggccgaactccaagatgacattcaggaaacgcccagaagagcgcgacactctaggaagcatgagtaagcctattgaagcatcgattgttgttgtcgacgacgagccgtccatccgagaactgctggtcgcttccctacacttcgccggattcgaggtaaacaccgccgcttccggttccgaagccattgaggttatcgaaaaagtgcagcctgatctcatcgtgttggacgtcatgctgcctgacatcgatggatttaccgtcacccgccgcatccgccaggaaggcattaacgcccctgtgctgttcctcaccgctcgtgacgacacccaagacaagatcatgggcctgaccgtcggcggtgacgattacgtcaccaagccgttcagcctcgaggaagtcgtggctcgcatccgcgccattctgcgccgtacccgcgaacaggtggaagacgacccgattattcgcgtcgccgacttggaaatcaacgaggactcccacgatgtgacccgtgcagggcagccggttgacctgagccccaccgaatacaagctgcttcgctacctgatggacaatgagggccgagtactgtccaaggcacagattctcgaccatgtctggcaatacgactggggcggcgacgcagccatcgtcgaatcgtacatctcctacctgcgcaagaaagtcgacggcatcgaggtcgacgacggcgaaggcggcaagcgcaaggtgacttcgctgattgaaaccaagcgcggcatcggatatatgattcgcgaaccgaagaactagtcgccccatccataacgcatcgcaatctcatgagtatccccgataagcagtcaggcggcgtaccgccgagcagcacgccgaacgccgccccgaacacgaatcccatgcctgcaatgccgccgttcgccgcccatttccaagagcggcgcgagcgtaagaaaaacatactgatgcggcatatcgaccgtatctcgttgagcagcaagctggtggcctgcaccatcgccgtgctgcttatcggcgtgtcggtgatttccttctccatccgcgcgttggtgaacaactacatgctgcagaaaaccgacacccagttaagctcgcaaagccagctggtggtcaacaatatcgatctgctgtcaaaaaatgactcatcggggccgaactcgtactttctgcagattcaatataccgacggcaccaaagacaaagagggcaatcctctggtcgtgaccccgctgatgccgcagatgcaggacggtatcgtatcggtgccgattcttcctacctatggtgataccagtggcatcacgctcggccaggcattcactacgcaggcagtggccaagcagatcatcacggtgcagtccgacagtgcggacagccagaacgatccggccaacggaaactccaattcctctgacaccatcgccaaggtactggccaaccccactgtcaatgccaaccatgccgccatcgtcacggcgagggcaccatggcgtattctgccggtgaccttccagcaaaacggcaaggaccgtgccgtggtgtacatcggcttgtcactggccgaccagatcgacaccgtcaacacactcacccgatactgcattgtggtcggcatcgccgtggtgctgctcggcggctccctgtccacgctgatcatccagcacacgatgacgccgctgaagcgcatcgagaaaaccgctgcaaagattgccgccggcgacctgagccaacgtattccttccgcgccggaaaacaccgaggtcggctccctggccgcctcgctgaactccatgctcacccgaatagaatccagtttccatgaacaggaggagaccaccgacaagatgaaacggttcgtctccgacgccagccatgagctgcgcaccccgttggccgccatccatggctatgcggagctgtataagatgcagcgcgatatgcctggtgccttggagcgtgcggacgagtccatcgaacatatcgaacggtccagccagcgcatgactgttcttgttgaggatctgctgtctttggcccgtctcgatgaggggcgcggcatcgatgtgaccggcacggtgaaactctcgtcgctggtcaccgacgccgtcgacgacttgcatgcgctcgacccggaccgtgccgttcgccgcatgcagatttccctcgaaccggcgcgcgatttgaaccatcccgccgaattcaaccttgccgaaggcgattggcccgaggtcgtgctgcccggcgacgcctctcgactgcgccaggtggtgaccaacatcgtgggcaacatccaccgctacacgcctgccgattcgcctgccgaggccgcgctcggtgtgatgccggccgccatcgatccaagacagctcgctcgcatgcccgccagcgacgcgtcaatgcggcggttcatcgacgccgccgaagtaggtgcctcgatgcagaccggctatcgatacgccgtattgcgtttcgtggaccatggccccggcgtgccgcctgaatcgcgctcgaagattttcgaacgcttctacaccgcggacccatcccgtgcccgcgaaaagggtggtaccggtttgggcatggccatcgcgcaatccgtggtcaaagcacatcacggctttatctgcgccaccggcaccgatgggggaggcctgaccttcaccgtggtgctgccgattgagcagatcgtcgctcctgagcccaagcggcccaccggcaaaaccaaggacgccaaacagaagacttcttggttcagctctgagcgtaagactcaggcgactcagcccaaagcgtgaggtcaagccctgtgaggtaaactgtaccttcggtttactatttccattgaggattaaggaaggttcgcaatgcccaccggtcgagttcgttggtttgacgcagccaagggttatggcttcatcaccagtgaggaaggcaaggacgtgttcctgccggctcaggccctacccactggcgccaccacgttgcgcaagggggccaaggtggagtattccgtggtggacggccgtcgtgggccgcaggccatggatgttcgcctgatcgcctccactcccagcttggtcaaggccacccgcccgaaggcggatgacatggccgccatctgcgaggaccttatcaagatgcttgatgcggccggcaatacgttgcgccgtcaccgttacccatctgctgccgacagcaaaaagctggccacgttgctgcgtgcggtggcggatcaattcgatgtacaggactgatctgatctatgactgataccaccgaaaccatcgtgacaccggaccctcacgccatcgcgcgcgccgtgctgctcgaagtggccgacgagagcgatcaggtgggggatttcgttacctcatatgatcttgaggatcacgtcactgacttccgcttcgccgcgaatatccgtggctacgaaggatggcaatggtcggtgacgctgtatcacgacgaggagatcgactcctggaccgtcaacgaatcctccttgatccccactgagggcgcgttgatgccgcccaagtggattccttggaaagatcgccttgagcccacagatctggctcccaccgattcgatcggtaccgatccggatgacgagcgcatcgaggaaggcgaagtcgaggaatcctcgctgcgggatgtcaacgatgccgtcgagaccttccgactgacccgccgtcacgtgctgacctcgttgggtcgtgcgcaggctgccaagcgctggtatgaaggtccgcgaggccccaaagcgttgagcaccaaaaccgccggaggcaacctgtgctccacctgtggtttcttcgtgccgctcgcgggcgaactcgaccgtatgttcggcgtgtgcgccaacaagtggagtccggatgacggccgcgtggtttccttggaccacggctgcggcgagcattccgaaatcgaacctcccgagccaagccagctgtgggtgcagtccaagccagcctttgacgatctgcatatcgacgtggttgccaaccgtccgtgcaagcaggagcaggttgcccaggacgaggccgaaggcgaaaccgacaagacaggcgagcctgccggtgatgatatcgaagcacagaagactgttgacgggaacgccgtcgatactgagcccgctgaggaggcggcaggcgacgggacctcgcaatcccagtctgccggtgatgagtctgttgcacagaacgcatccgattccgttgtggatgttgatgcagctgattccagcgacgagtccaagtctgatgctgacgacgaggccaccgaagaggacatcctcaacaacaccgttgccgatgatgatgaggatgatgagatggacgacgaagaggataacgttcgtccttcagacgatgtgactcctgaactcgaaaccgtcatcgatctcattgagcagctgcgccagaacagggcggacgaggaataaaataaacgccaatcctgctccccaacagcagaatgtactctcggatcaacttataggtctcagcgaagatgtttcctaaaaagtagatggtgatggggttataacctgctagattgattatttgctttagtttgttttcgtgtgatataattaagtcatgcgtgtcagggaatgggcgaggcgtgagggcttcaacgagcagacggtgtggcagtggtgtcgcgagaac

SEQ ID NO: 3358 - DNA, 3638 bp, Unknown
  R151_18m  MAG No. k141_21306
cggcctcctcggccgggaattccttgtcggcctcggcttcctgctcctcctcggccacgtcgcccgtggtcttgttggtgcccggaatcagtgtgccggtgccggcgtgggccttgacgatcaggaagccgtcaaacccaccctcgatgatatgcggttcataaccgatcttcttcgtgtattccatggtcggatggtcgtacggcaccagcacgcggtcgttctcgaccttgagactcaggtggcggttgcccagttcgaagcacaggcgtcccatttccttcatcgagttaaccggaatctcaatcagctgtgcggttttaatgcgtgcgaaatagcgcttgtcttcggtttcggcgagcacatcgccatccttgatggtcttgccaaccatgatgccgaactcggtgccgtcctcggccaccttgcgcatgcgcttcttatcggtttcgaaccagtcgaaggcaatcgacacattaagtttgccgtcgctgtactgctgactgatgatgttgccggtgatttctttggcgatcatccgttctccttggagaaaattgcttgtggcgtgagaatccccacgtccttcatgccacagtgtagagagcctgttgcgtcactttgtaacgaatgatcgaaatatgcaaaaaatatagcggaaaaatatccgaaaacacggaaaccggatatatggtacacggtgtgtcgctagtaattgcaagctattttgcatggttgtgcattagacgaatcacagttgtgatattacatatcacgttcctggagcgggaggttgtggtcgagctccgaaatcaacaaaaagagggaagttggatataatcgaagtacctgacaccgtcacattggcgatgcacattccggataatttcatttcgccgtccaccggggcgttgttctacgtcatcatgattccggtgtgggtgctgtgcctacgctacgtgatccgcaacagcacgccggagaagatggcctacctgggcgccggcgcggcgttctcgttcctcatcatgatgttcaacgtgcccacgcccggcggcaccaccgcgcacggtgtcggcggcgcgctgatcgctctgctgctcggtccccagtacgcgacggtctccgtgtcggtggccctgctgctgcaggcgctgctcttcggcgacggcggcctgatcacgctcggcgccaactgcttcaacatggcgttcgtgctgccgtttgtggcttacggactgtacgtgttgctacgcaaggtgctgcccgacggctggaaggaacgcgtggccgaattcgtgtccggctatatcggcatcacgctcgccgcattctgcgtggcgctggaactcggcgtgcagccgctgctgttcaaagccgctgacggccaggcgctctacttcccgttcacctttaacgtgacgattcccgccatgctgatcccgcacctggccgtagccagcgtggtcgagggtctggtgaccgtggtggttgtcgaattcgtgcgccgcaccgcaccggagattatcgaagacaatgcccgtgtgaacttcgccgagaccgccggtgctgacggcaaacaggtcgcgcacgccggactgcgcaagtctgcgtggattgcgctggccgtggtggcggtgctttccccgatcggcctgctcgccaccggcgacgcctggggcgagtggggcgccgaggacttcatgagtgccacggggctcaactacgtgccgcagtacatcgcccatggcttctcgtgggatgcgctgttgcctgactactcgctgcagggtctgccggacatcgccggctacattctctccgcagtgattggcatcgccgtgctcactatcgtgttccgtctgctggcgctcgcggtgagcggcaacggcaagacatccgcgcgttgacgatacctgcatggatgcgtgagtcggaggattacgatcctccggctgacaagtcatccttcatcgaacacaacctggggcatttcggcagcgtactcgagcaggttggtcatgcgttgccgattgagtcgagcccggtcgacaaggtgctgggctcggtcaatccgggcgtgcggctgctgggcatactggccgcgattgtctgcgtcaacatcacatgcaacatgctgttctcgtacatcatgctggcggtggtgctgctgatgatggcgacccggccggcgcgcctgatgagggcgttgctcggcccggtgctggccgtatgcatcctgagcctggtcgtggcggtgccgagcctgctgattgggcagtacagtgcgccggtccggctggtggtgcgtgcgttcgtggcggtgtcgctggtgatcgcactggcgcgtacggtgccgtggaatcgcctgattgccggactgcgcgcagttggctaccctgattcggtgatttatatctgcgacgtgacgattcagttcatcgatattctcggtcgttcgatggtggagttgctggatgcgctgcggttgcgcagcgtgggccgcgaccggaccaagctgacgtccgccggccagttgatgggcgcgctgtttctgcgtgcgaatacgcaggcgcggcaaatggctgaatcgatggtgtgccgggggtttgacggtacgtatcatatccaccacgagcgtctgctgacgtggcgcaacggggtgtatgccgtgtgcattgctgcaatgattgcgctggcggtgtattcgggatgagggtggttcgaatgaatggagcccaataatgttcggattaaagcgtaatcataaacaaactgcaaccatgcggccagataactcatggttccgcggcgacccgctggtcgaactgaatcacatcgacttttcctataaagattacggcgacgccgacgatgaaacctcgtcgcacgccgtgctacgtgatttttcgctgaccgtcgaacgcggtgagcgcgtggcgctgctcgggccgaacggcagcggcaagaccacgctgatgcgcatcatcaatgcgctggaatttccggactcaggcgagtatcggtttggcggtactccggtggttcgcgaggaagtcgaggcgaagaacagcctgttcgccaaagcgctgcatcagcgcatcggattcgtgttccaaagctccgacacccagctgttctgcccgtcggtggaagaggagattgcgttcggtccgttgcagatggggttgccggatgccgaagtacagcgcagagtcgatgacatggtgacgttgttcggcttggatcggatgcgggagcgggcgccataccgtctgtctggcggtgaaaaaaagcgtgtggcgattgcctgctgcatgtcgatgaatccggacctgcttgttctggacgaaccgaccgacggcttggacgagcgcaataccgacgtagtggttgaggtattgcgcgccttcactgatgccggcaagactgtactgttctccacgcatcaccacgacatcgtggagcggctcgacgctcgcatcgtgcgcgtgcatccgtcactatggcaatgacattcacgtggcgtctattggatatcttcatcgaaaaaagcagaaaggcatcggcgaggatcgcgagtccggcgagaactgcgatagtcgctttggtgatggttgccttcatgagagtttccc

SEQ ID NO: 3359 - DNA, 8536 bp, Unknown
  R151_18m  MAG No. k141_21415
caccttccacgtctcctcccgatgaccgaatcgctaattcccgcccgccagaaccccattgcatcgtgtagacgggatatgggataatccacaaggtgcttttgcgtaggaccaaggcaccggcgatgacacgggacaaccacaacagcgaatgacgcacaacgggccgtccgggacacccccgtaaacggtcgcgtcgttttccattggtgtcattacggggtccaagtcccgcaaaacgttggaaaatcagcatttcttgaacgataaggtaacatatggctgagtttatccaccagatagttcgtagtcactgagccttgctattccaacgtttttcccgcatgtcccgtgacacaacagcatgtcactcatcggctacgaatcggcttgtgtcaaagttgcgtcatccgacgctaatccgagacccagcattgctagaatcgatgtaagtgatgccgacgcgacggcattccacatcacggaagattcattcactttcgatgaggcaaggaggcgagacatgacgaagctcgaacgcaaccagatcgatttctccacgtttatgctgtatcggctcgccgagcattggggcaagtccgtgcccgacacctatcgcattctcgataaggccaacgctatcgacggctaccttgtcccctgctacgacatgctgcacacactcggcagcgaatacctcgtcaacgacctgacggactacgtgcgcgagcggggaatctgcatatgaggctgtaccacggttccgacgtcacaatcgaaaagcccgacgccatccacttacgcaagaaccttgatttcggctcggggttctacgccaccagttatccgaagcaggcggaacgctgggccttgcgacgttcattgcgctcgcatggcaaagcgctggtcaacgtgtacgaattcggcgaaacggcgaatctccatattctgcgtttcaacgagaacgacgccgaacgggttcgattcgtatgtaactgtcgtcggggcgggcagcctcccctgggaactgacctcatcatcggaggcgttgcggatgacaaggtctacgcggccatagacatgtacatgcgtgagctatgggacatggaacgcaccctgcaggcccttgccttctacgaacgaaacgaccagtaccgcttcctcacaccccggtcgatcgcagccctgcgatacgtcgagacctacgaggtgaaacaatgacgatcacgccacaaaccctgacgaagctcgaaacgctacgcaaggagcatctcgaatccgatctcatcgcgctgatagccgaccaatacgacatgacagccgccgatgcgatgaaactctattattccagccaactcagccaacaggtggccgacggctcctacagcatcgaacaactcgacgcgcgctacctactcgacgaccttcaacgatacgagccgcaactcttcagaaccgtcaacgcgactgaatagggcacggctgccgagttccgacacgagcaccctcgcatcccatcacattccgtagcgacgcggtgtggacgacaaggcaacagctcgtcccgttactcggacgcggcatcacgacgatcagcaaaacacatcggcaatgccaagcgtgaggaattggacggaatcgcccccagcggcacaacccacgagctacatctcgcctactcccctgcgtcgggatcgtatttgagaatgtcgcccggctcgcattccaaggcctggcagatattggccaacgtggtaaaccgaatcgcgttgaccttgttgtttttgatcttggataaattgacgttagtgataccgacctgctcggcgagatcgcccagtgagatgtgccgcttcgccatcatcacatccagttccagaacaattttgcccatatcaaccttccctgaatcgcgcaatcatcagagcaggccgtcgacgtcatgctcaagctcggcgccgtatgcgaagaattgcgccaggcacagcacgacgagaccgaaggcgatcggctgcatattcacgaagaattccaccttgcggctccccaccacgagatcgacgacaaccatgaaaatggcgttgatgatgggggcgatgatggatagttcgccgatgcggcggacgcgttgcacgttggccttggtgaagggagattcggtttcgctggtactgaagatcagatggatgtttctgaacaccacagccatcatcccaagcatcgccaccatggcgattgcggcgacagcgaaaccacgggcgagcacagtggcatccgatgccacaggcagcagattcgggtccccaacgataaacagattcccggaatccaagccttcctgaacccaccgcaccagcggagcaccggcaacgaccagggcgaccagcatgcccgcatacaccgccgttgcgatccagagcatcacttccacaatcttcgcgatgaccttgaccgccgcgttaagcttcattgccttcatcgttatcacttcctttgacaataatgaaaatatttattatttgataattttttatcgttttacgataattattttatatcagacgaatactttctatgcaatgctcaaagcatcggcgtgttccgcgatcgaaagcacctgcgccatgcgctacaaaccgatcaccgcaatatgcaacctgccccgcacctcgtcaatccactgttgcggcatgacgatgggatatgggataatccacaaggtgcttttgcgtaggaccaaggcgccggcgatgacacgggacaaccacaacagcgaatgacgcacaacgggccgtccgggacacccccgtaaacggttgcgtcgttttccattggtgtcattgcggggtccgggtcccgcaaaacgttggaaaatcagcgtttcttgaacgataaggtaacatatggcagaattcgtatttcagatgatcaaggcccgcaagtcttacggcgaccgcgtgattctcgatgacgtgaccctgagcttcctgcccggcgcgaagatcggcgtcgtgggcccgaacggcatgggtaagtccaccctgctgaagatcatggccggcctggagaccgtgagcaacggcgaggccacgctgaccccgggcttcacggtcggcatcctgcagcaggagccgccgctggatgacaccaagaccgtgggcgagaacatcaagatggcgttcggcccgattgccgagaaggtcgcccgattcaacgagatcggtgaagaaatggccaacccggacgccgacttcgacgcgctgatggaagaaatgggcaagctgcagaccgagatcgacgccgccgacggctgggacctcgactcccagcttgagcaggcgatggacgccctgcagtgccccgatccggacaccccggtcaacgtgtgctccggtggcgagcgccgccgtgtggccctgtgcaagctgctgcttgaggccccggacctgctgctgctcgacgagcccaccaaccacctggacgccgagtccatcctgtggctggaacagttcctgcaccagtacaagggtgccgtcatcgccgtcacccacgatcgttacttcatggacaatgtggccgaatggatctgcgaggtcgaccgcggccacctgtacccgtacaagggcaactactccacctacttggagaccaaggccaagcgtctggagatccagggagccaaggacgccaagctcgccaagcgactgaagagcgagctcgactgggtgcgctcctcccccaaggcccgtcaggccaagaacaaggcccgcctggaacgttacgaccagatggagaacgaggcacgcaacaacaagaagctcgacttctccgagattcagattccggccggcccgcgcctgggctccaccgtgcttgaagccaaccatatccataaggctttcggcgatcgcgtgctcatcgacgacctgtccttcacgctgccgcgcaacggcatcgtcggcgtgatcggcccgaacggcgtgggtaagtccacgctgttcaagaccatcgtgggcctggaaccgctgaccagcggcgagctgaagatcggcgacaccgtcaaaatcagctacgtggaccagaaccgtgaaggcctggacccgaacaagaacctgtgggaagccgtgtccggcggcctcgacttcatcgaggtggccggcgtggaagtgccgacccgcgcctacgtggccagcttcggcttcaagggcgccgaccagcagaagctgaccggcgtgctgtccggtggtgaacgcaaccgtctgaacctggccctgaccctgaagcagggcggcaacctgctgctgctcgacgagcccaccaacgatctggacgtcgagaccctggaatccctcgaaaacgcgctgctcgagttcccgggctgcgctgtggtgatctcccacgaccgttggttcctcgaccgcgtcgccacgcatatcctcgcgtgggaaggcgacgacgacaacccggccaagtggtactggttcgaaggcaacttccaggcctaccaggagaacaaggtggcccgactcggtgaggatgcggcccgcccgcaccgcctgcacaagaagcttgtgcgcggctgagatacgccggcattagtgccacaacgcgctttatacgtcgaaagccgtccctcaggggcggctttcccataattgctccatggctgccccgcaccgcatcccataaaatcccacagtcgcctacggcaacacaccggcagcgcagcagcaacgtagcggcaacgtagcgacaacgcaccgcataaccaaccgtttaccttccaaacagtctcgttacatttcgctcccggaactcttaacccccaccggatagactgccaaccataggttggaatacgataaccgaatatcgaacacagcagaacaggaatcgaggaacgccatggctcaggcaaccaccgtaactccattggaccatctggtgaaggtgctgaagttgggcgagccttccgcttaccgcaatcacacatacatcaatggcgagagtatgtacttccccactggccgcgtctacggtggccaggtcatcgcccagtcggtgatcgccgcgtccaaaaccgtgggcccttcacgcctgccgcattcggtgcatggctatttcattgccgccggcgatattcgtcaagacctgctgtttgacgtcgagaaccttcgcgacggccgctcgttctccgctcgtcgggtcaacgtcacccaagccgaggggtcgattctcacggccatcgcctccttccaagagaccggtcaggagggtgtggaatttgccgatccgatgccggaaaacctgcccgatcccgaaacgttgacttccgccaaggaactcatgcagccgttcgccgaaaagtcgccgttcgccaatttctatgtcgagaaatcgccattcgatatccgccacgtgacgccgaccgtgatgctgcgcgcagacaaggattccgccgagcatgattccggcaagcagatggtgtggatgaaggccgatggccacgtcgatgtgccgcaggtcatgcatcgtgcgatgctggcactcggctgcgatcaggtgatgatggagccggtgctgcgccgcgccggactgtcgatttccacaccgggcatttcctatgcgtccatcgaccattcgatgtggtggtatcaggatatcgatatcaacgaatggcatttatatgtgcaggatacgcctatcgccgcgcacggacgcggactcggcatcgccaaagtgtatgcgcagaatggcgacttggtggcggccatcgctcaggaagctatggttcgcgtgccgcaggaatagtgggaatcggcttggccgatggtgtggtttttcttcttctctcccccagtcggctacgcctacggccccctcgtcagagggggcttatcacggattatcttttgtaggcctgggctatgtcgctacggcgcttggcttccttgattttcgggttttcggggccttcgttcggcggtagctggcacaaccattcgccgataatgccgatgatcatgtcggcgatgcacaccacggccacgattgcgcactcggtgacggcgtgtgcatagaaatccgcctcgatatggctcaggctcatcacaatctgaccgccataccagccggcgagcgttgcgcccgccaatcccagtgccttagacagcaccagcgtatacaccgcgatagtgggattgatgaagctatgcggacgcttcttggggtcggtattcgcgtatttatgcacttgcagggccaagatcagcacgataacgcccagcacggccagcaatccggtcacaatccaaggcgcaccaatcagcgacagtcccgagctttcgccgtaggaggccagaccgatacccgccaacaggcccagcacagcaccgatcacatactgccaccatggtgttcgccgtgttttcatgtccggcctccttatcgttgcgttgctgtttgctgtttgcgaacggccctcgcgcctgggctgttcatcttgatttggttttcgtcactgccgtgcccggctgttcgaggccggagactggtccgtcaccgtctggtttctagcctaccgttcgtaactggttctgccatcagctcaactgttcgacagtatccagttgtccgatagcaatccgacctgtccggcatccggtgccatggccaaaaggaaagccaccgggtcgccgcccagagaagcattcgggtccatatccagccaaggtgccaataccgacgcatggttacgggccgacggccaaggaatgctgcagttgggctcgtcggaagtcacgccttccatgtcgacaaggtcaaggtcgactgccagatcatgaacactttcgatgctgcccaatacggcaatcaggtcggcgggcggcaacttggtttcgatttggatgaccgcgctcatcgcgtccgggccgtcgaaatggctgacatggtagagcggcgagatgccctgtacctgattgccaggaacactgtcgatggaaacgatggtttcgcggaacagccgttcgacatcctgcgaggtggaatccagcgaaataatcgccttgcgtgagacgggtgccgactccgacgctgatttttgcttgactgcatgcccgccgagcatccagtcttcgctctcgagctgcacggcgttacggtccggtgcggcggccagcaaatcggctacaggcccctcatgggctccggcaagtttggcgttcggattcagcgccgcccagggagccagcacaaacgcgcgctgccaagcacgcggatggggcaatgccagatccggatccgcgctggtgatgccatcaaagtcgataatgtccaagtccaacggcctggaatcccaatgattctcacgaattcgcccatggttcgcctcgatgctttgcaacgcggcgagcaattcgtggctgcccattgtggtttcaagctccaccacggcgttcaggaaatccggcgtaccgtcggccatgccccacgcggccgtgcggtaaagcggcgaaataccggtcacctgtgtgccgagcagcgcgtcaatctcccgaacggcggctcgcaaggtggattccacctcgcccacattgccgcccaaggccaccaccgcgttatggatggcatgctcttcagcagtacgtccattatcggtggcacgcacgcgcgagatggagaccgatacatctgcaaaagccacgacgatgggtgcgtgaggcttgtgcacggtgacgtcgatggaggcgacggccggcgcatcggcaaggatcttatccgcgatacgttgggccagacgctcgatcaggtccacatgagggccttcgatgacagccgcgatatccttggccacacggccgtaatcgatggtgtcgttgagatcgtcggattgaccggctgcggccagatcaaggtgcagggtgacatccacgacgaaggtttgtggccgttcgtgttcgaaggcgagcacaccgtgggtgccgttggcatgtacgccggtaagtgtgatggtgtccattggtaaggctttctgctcaaatgctcccctcagtcgccttcggcgccagctcccctcgcccgaggggagccaaggcctagaagcaaccaaaacagggagccaggggaatcatgcgtattcgcgccaggtgttgccggcgatgacggcggcgcggcttttggccacgtcgtgtacgcgcacggcccatgcgccatgttcggcggacagggcggacaaggctgcggtcacgtcatcgcgctgggccatggtcgggccatcagcaccggcagtacccgccccggtaagcatcgccgaaatgaagcgcttgcgggactggccgatcagcaccggatatccagtggcgcggaaggtctcgagcccggtcagcagcggtaggttatgctcgatgccgggcttggagaagcccagacccgggtcgatgataatgcgctcaggctttacgccggcggccagcacgccgtcgacttggcgcatgagttcgtcgtgtacgtcggtcaatacaccgtgctcgtagac

SEQ ID NO: 3360 - DNA, 3353 bp, Unknown
  R151_18m  MAG No. k141_22363
gcagcaggtcggtgctccgaccgagctgtatgatcgtccggccaacgtcttcgtcgccggcttcatcggctccccgtcgatgaacctgaacacccacccggtggtcaacggcaaggcgaagatcggtgaggacaccgtggacctgccggctgaggccgtcaacaagctcaccgccgaagacaacggccagatcgtggtcggcttccgtcctgaggacgctggcctggccccggctgacgacccgaacgccttctccctgaaggttgtgaacgtcgaggatctgggctccgatggctacatctacggcaacatcgtcaccgatggctccgccgctgaggcttcccaggtcatgtccgaccagaacaagctcaccacgattcgtgtgaatccgcgtgcgctgccgaaggttggcgcgaccgtcaagatcaagatcgacccggccaagatgcacctgttcgctccgtcgactgagctgcgtctgaactaatagatacttggcgaggtctaatcgcttcgtcaaccattaaacgaggttattctcttcctctcttatgacctcgttggaaaagccctgcatagctgcggggcttttctttttgccttctagacggtctgagggagagaccaaacggtgttttcccgtaaacataacgcgccgaagtcgtggccaaggagcacacatcgcgaacgacacgtaaaatcgaacacatggagttgaacgaattgccccagatggatccgcgtgcgctgaaggccacgtctgtcaaagccgaagacgaacacgccgattcagcggaaccgcaagcactgaaaatcaccgccgccagctcgaacccaaagatgttcacgctgccctggcacaagcccttggccacctggcctgaggacctgctggccaacctgccgcgaggcatctcccgccacgtcgtgcgattcgtgcacgtgggcgacgaggtgtacgccatgaaggagatcacgcgccaggtggccgagcgagagtacgagatcctgcgtcgactgcagaagctcgaactgccaactgtgaccccgatcgccgtggtcaccggccgtcacacccgtgaaggggagccgctggaggcgattctggtcacccggcacttgaagttctcactgccgtaccgtgcgctgttcgcccgcaacctgcgcccggacaccgccgaacgactgatcgacgccctcgccgtgctgctggtgcgcctgcacctggccggcttctactggggcgatgtatccctgtcgaacgtcctgttcctgcgcgacgccgacgctttctccgccttcctggtggacgccgagaccggtgacctgcaagtccagctcaccgacggccagcgcgaatacgatatcgacttggcccgcaccaacatcatcggcgaacttatggatttggcgtccggcaagctactgcccggcgacgtggatgagatcgaggtgggcaaccgcctggtcgaccgctaccactcgctgtggagcgctctgaccgacaccgacaagttcaacccggacgaaatgtggaagattgagcagcgcgtcaacaagctcaacgagctgggcttcgacgtggacgagctggaaatgaagaccgccgaggacggcaagcgtgtgctggtccgcccgcgcgtggtggacgccggctacgccaaccgcaagctgctgcgcctcaccggccttgacgtgcaggagaaccaggcccgtcgtctgctcaacgaccttgacgcctaccgtgcctccacgtggcgtgagggcgaggatctggaaatcgtggccaccgattggatgcgcgaggtgttcgagccgaccgtgcgtatgattccgcgcgaatatcgctcccagatcgagcctgctcagttcttccatgaggtgcttgaccatcgctggttcctggcggagaaggccggccacgacgtgccgatgggcgaggccgtgaccagctacatcgacaacgttctgccgagctacaaccttgattccaaggcactcgccgaacttaacgaagaggccgattccggcgtcattgacgacgaatccacctacagcgacccggacgacgacggctacaaccccgatgacgatccggatgcggcagtgtggagtcattaagcggacaatccaatggactgtctgtcggtgagcccatcacacaaagaagcccctcaaatagaggggcttccgtgtatgtacaacctattacggcctcaagcgacaatcactccgccgcagccttgcgccgtgcgttggacaccgcgtacaggctgatacccgccgccactgaagcgttcagcgactcaacagacgagctgatcgggatgccggcaatcgcgtcgcaggtttcgcgcaccagtcggcccaaaccgctgccttccgaaccgagcactacaacgagcggatcggattcaaagccagtctcgccgacgagcttatcgccgccaccgtcaaggccgacaacgtagtatccacgctccttcaagccctcaagtgccttagtcaggttcaccacgcgcgccaccggcatatgcgcggccgcaccggcagacaccttccaagcggcggcgttcactgaagcggaacggcgttccggcagaatcacaccattggcaccgaatgcggccgccgaacgaatcacggcacccaggttctgcggatcggtcacgccgtccaatgcaatgaacagcggtcgcgcagcaatacgggcggccgccgaattcgcggcctccattgccttggccttcttctcagcacgatcggccagctcgttcagcgaggagtactggaacggatcgaccttcagaatcacgccctgatggttgccggagcgggcgatacgatccatctccagacgatcggcctccagcatgtgcaggccgttcataccagcgattttcacgatttcgcgagtacgatcgtcatgttcaatacgagacatgatgtacagcgtggaagaaggtacgcctacgcgcagtgcttccagcacggaattacggccgtacaccagatccgaagtatccgccgaagcgaacttgtccactcgacggcgggctgccagacgcgggtcggccatctgccgacgttcggccgctttcttggccttatacgccttgtgatagacgcggtcctcggctttgggagtggggccgtaacccttcagtttgttgcgatgcttgccacccgaccccttggtcggtccttttttgatagccataggtgctattgtcccagcaccccgcgccaaaacgcggctattccgccgtcggtagccggtaaggtattgagagtgaagaagcagcgcatgatattcggactgtccctgctgtattggggattatggttggcga

SEQ ID NO: 3361 - DNA, 20113 bp, Unknown
  R151_18m  MAG No. k141_22474
gccgcaaggcctgaccggccattccggacacacattctggccgacctcgagttccccgcccatacaactcgaacaggaggaacgcccaccgccacaaaggaacacaagccaaaacggacacacattttggcctataacccgccgaatgctttcaggcctggtcccgcgaatacgaaaagacctcggtcgctatgaccgaggtcttcaaagaagtacccccagagagagtcgaactctcgttgtcagattgaaagtctggtgtcctaaccgttagacgatgggggcgaacaactcgagttactttacgggaggttgttcggttatgcaaatcgacggcatttcggcgtgtcgcaatcagttcagggcgacggcctgataggtgaagtcgtggatcgcgcggccggcggccaggcccttcttctcgaagttggtgagcacgcggccctcgaaccgctcggattcggtgaagtcggcgtgcggcatgtcggcggccatgtcggcattgcccttgcccacgtgctccagcggcaggctgacggttacgctgcccaggttcttccagccatcgaggccgtccatcacctcgtgcacgtgcagggcgtagtcctcgatgtcggtggcgatgcgccagacgccgtctgtgaccagcgcgcgatgaatgtcgccggccatggcctcctgcacgatgcggcgcttgtggtgcttcttcttgggccatggatcggggaagaaggtccatacctcggccacggtgccgggcgcggtcaccttgaacagctcgggcgcgttgacctgggccgtgcgaatgttggtcagcccctgcttgccggcgagcagcagtgtgtgggccacgccggggtcatagacctctagggcaaggaagttcgtctccggatgggccgcggctgcggccgccacgttttctccctgcccggtgccgatttccacaatgagcggattgtcgttgccccatgaggactccacgaacgcgcggtcgagcgtgacgccttcgcgcacgtccagcaggttgccggccgcaatgtccaacagatatgtgtcggcatagttgtcccaggcgcgctgcaggcgatcgtccaaacgtccggagcggcgcacgaaggaaagcaccttgtgcagggggtgcgccggtgcctcggtgtggtccgcggccatcgcggtgacggaatcgattgctgtggattcgggatcggtcatatattcctcggattttccttgtgcgccgcaccgctgttcattcgttaggtcgatttggcgttcattaggtgggtggtgtgcgataccaaccaccatatcaagccatttacccggtgttcgtgcgggccggctccgggccgacctacctaatgaacgccagatcgacctaatgaatgcagatattgccggacgacaccaccgttttgtgcgattatgttcgtgtgatatactcaaattgtttcaaaaggtaacaaagcggaccaaaagtgaacagccgctgaactccacacggccgacacttgcaacccgcataaggaaaggtcaactatgacagttctcgtcaccggaggctgcggctacatcggcgcgcatgtcgttcacgcacttcatcaggccggcgaaaaggtcgtcgtcgtcgacgatctgagctacggcaagcccacccgcatcgaaggctcccgtctgtacggcatggatatcgccgctccgggcgccggcgagcgtctggccgaaatcctcgacgccgaaggcgtcgactccgtgatccacttcgccgcgcgcaagcaggtcggcgaatccgtggagaagccgctgtggtactaccagcagaacatcaacggcatgctcaacgtgctcaccggcatgacccagtccaagaacgccaagaagctcgtcttctcctcttccgccgccacctacggtgtgccgccggtcgatgtggtgcccgaggacgtcgtcccgatgctgccgatcaacccctacggccagaccaagctgttcggcgagtggatggctcgcgcctgcgagcagccgttcggcatccgcttctgcgcgctgcgctacttcaacgtggccggctgcggcccggtcgaactcgaagacccggctattctgaacctcatcccgatgctgttcaaccgcctcaagcagggcaaggcccccgccatcttcggcgacgactacccgaccccggacggcacctgcgtgcgcgactacatccacgtctccgacttggccgacgcccacatcgccgccctcaagtacctcgaccgtgacgagcgcaagtacgacgccttcaacgtcggcaccggcgaaggcacctccgtgcgccagatcgtcgacgaagtcaagaaggtcaccggtctgccgttcaccgaggctgtcatggcccgccgcgccggcgacccgccgcacctgatcggctccccgaagcgcatcaacgaggagatgggctggcacgccaagtacgacgtggaagacatcgtcaagtccgcgtgggatgcctggcaggccaaccccgaacaccatatcgacgtcgacacctggaagcaggctgactgagattgacgattgctttgcggtggatgccgtgaagtgcttctgttcataagggcgtgaccggggttccggtcgcgcccttcgtcgtttgtggatgtttatggcagacgtgtccgtgtgctggtgatagcaaaaaccttgaaattacgcggaacacgccgaaatttgcacgaccggcgaatttcagtaatatatacatctgttgcctcacgcaagtgagaacaatggccccgtagctcagttggttagagcgccgccctgtcacggcggaggtcaccggttcaagtccggccggggtcgctggaatggttatgaaacccggattatccgggtttttgactgttcatggctctgtagctcagttggtagagcgagcgactgaaaatcgctaggtcaacggatcgacgccgttcggagccaccacaatgaagccccgccttgtgcggggcttttgcatatccgtcacgtacctactccggcgggctggccagtcaatgcaaaggctcgcgttcgccaacaactgtcctcctcgccgcaactacgcacgccaacagcaccaatgcgaacatcgggttagggttaaataaagaaacgtgggtcttatccgcgcgtgtcatggtcggtgcgatcgtccgccccagccgtttctggggctgtggcgctcatagagtcagtattgcagaaaaagcacctgcgaaatgcgcgtgcgaagggaatcgtgtgggacggcacgtgattttgccgattttcgacgtgccgtcccacagcgttcgaagaacgccctcagagctgagggcaaagaatggctctattctgcggttctcggcttatgtcatgcgggatagcagatacgtcaaacgattgatgtatctgctatcccacacttctgtgggacggcagatgaacaatggtaaaaaccgcgtgccgtcccacagaaacggagtcaggcctgccaccattggcgcagagggtaccacttgccgtccgggtggcccacgcgatccggcttgacagccaggaactggtgaatctggatgccgtcgagctcgaagttcagagcgcaggcggccatgtacataccccataccttggcgcgttcaaagccgacctgcttgaccgcgtcgtcccaatgctcggagaggttctggttccagtgatgcagggtgagcgcatagtgctggcgcaggttctcctgatgcaccacgttgaagccggcgtcatggatgcacgattcgatgaagccgggcgcgccgaggtcgccgtccgggaagatgtaacggtcgaggaattcgtcggtgccgggcttgccgtgaggcttgtcatggctgatggtgatctggtggttcagcagtcggcccatcggcttcaggagacggaacatctcttcgaagtagctctggtagttcttgacgcctacgtgctccatcatgccgatcgagcagataccgtcgaagtcatgctcgggcacctcgcggtagtcctgtacgcgcacttcggccagatcctgcagcccctcacgggcgatccattcgttggcgtacgcggcctgttccttggagagggtgacgccgagcgccttgatgccgcgacgggcggcggtgatgaccatcgaaccccagccacagccgatgtccagtaagcgctggccgggctgcaagtccagtttgtcgagaatcaggcgcagtttgttggcctgtgcgtcttcaagactcatgtgctcgttgtcgaataccgcgcaggtgtacgtcatggaggggccgaggaagtcggcgtagaactcgttggacatgtcgtagtggaagctgacggtttccgaatcggccttttcggtgtgcggcatcaggccacgcttgatgcgggcgaacttgctcgggccctcggtggcgggcaccggcggcttcttgaagccgtgactcagaatgccggcggatacgcgggcaatggatgcgggagcgagcgggcgaacgtatttggccagcgacaccagcttgcgcatcgccggatacgggtcggcgtagtcaatgtcgtccacgtcgaaatcgcccagaatgtatgcgcgcacgatgccgatttcattcgggtgcgcgagcagctggtacatgcagttcggcgcggcgattttgaccttcaaatccgcgtctgccgggccgaaatgcgagccgtcaaaagcgtcgatacgaacgggagtgtcggggtcgagaaacagggatgccatctcgccgaccgtcatagccttgccatttgccattatctgcctcattctcttatgatgatcaccccaattgtcgaggtatcttagtcctcttcaggagactgaaaccgttgaatacaccatctggtgaaccagttcgcgttcggctgatgaaacacgaatggaattaggcatctcgcatattgattgtgtacgcgcgaagtaagcagatgagagacgagtttctcggagagcaccaagcgactccggaaaatggtcttatcgttgagatctcgggcgattgaactggtttggtcaatggacaataattcgacaagtgcggaattccgccatttcttgccattattttcagtgttgttctttcagcgtgttttcaggtgaatgctcatgcgcggagtagactggggaaccgttggaccactcaaagagtgagtggaccaccagttaagacactagctcaaaaggagagtccctatggtataccgcatgattttcaaccagactgcatacttcggacgtggcgcgatcaaggaaattccggccgtcgccaagcagcacggcttcaccaaggcatttatcgtcactgatccggtactgctggagaccggcaccgccgagaaggtcaccaaggttctggatgaggccggcctgccctacgaggtgttctccaacgtcaagccgaacccgccggtagagtgcattaaggacggcgtcgccaagttcgccgagtccggtgcggacttcctgattggcctgggcggcggctccccgcaagacacctgcaagggcatcggcatcatcaccgccaacccggagttcgccgacgtgctgtccctggaaggcgttgcggataccaagaacccgtccgtcccgatcttcggcgtgccgaccaccgccggtaccgcttccgagacgaccatcaactacgtggtcaccgataccgccaacaagcgtaagttcgtggctgtcgacccgcacgatatcccgatcgtcgccttcgtggacccggatctgaccgactccatgccgcgcggcctgaaggttgccaccggacttgacgccctgacccacgccatcgagggttacattaccccgggtgcctggagcctgtccgactgcctgtccatgcagactattcgcatgattgccaagaacctagccaagtccgccgacggcgacattccggctggcgagcagatggcgtacgcctcctacatcaccggtatggcctactccaacgtgggcctcggcctggtgcacggcatggctcacccgctgggcggccgtctgggcgtggcccacggtgtggccaacggtattctgctggccccggtcatggaatacaacaaggactacacgggcgagaagtaccgcgacatcgccgacgcgttcggcgtcgaggacgcctacaccggcgacctggagaaggtgcgcgaagaggccgtgcaggccgtccacaagctgaccgtggatctgaagaacccgaccacgatttccgaagtgggcgccaccgagggcgaccttgagccgctggctcacgacgccttcaacgacgtgtgcacccccggcaacccgcgtcaggcaaccgaagaggacatcctcgccatctacaagtcgctgatgtgattcgtcgatgacgccgacgatgccggtgggttcccctcgtcgggaacccaccggcatcgctatctctcgtgcctttcgtcgtagacttcgtcggtgggggtctcgtcgtacagctgcttgccttgcgcctccgccagtttcatctgctcgttgatccacgcggcttcagcaggattgatatccgcggaattcagcactttctgccacaccgggtagaacatatgcatcgccggatacatggcggtgaacaacacctccggcttatgcgtgcgcgtatgttgcggatgcgcatcaaacgtattcttaaaacgtcgcatgtagctcaggaacgaactcaacgacgtatccatccgtcgcgcactcatcgcggcgatcatgcgcggcgagtacacggttttcagattcttgcccatcagatgcagggaaatatcgatatcctcgtgcatcacatcggccttatctcggcagacctcattcgcggtctgatgccaggccgaagcgcgcaaggccatattcgagccgaacagcagcggctggccgccatcggcacggtagattcgcttgcgtaaggaattgtcgcctttcaacccgaaatgacgtgagggcatgtcgtaatacatcaccggaccagtggcacccatcgcggccgggtcttcggtgaagatgccggagaccacctccacccagtcaggccggatcatacagtcggcgtcaaaacggcccagcacatcgccggtcgcggcgttcaggccaaagttgcgggtgggaatcagcccctgttcatcgttctggtgcaacagtttgaccggggcctcgggatgttcggcgatgaactgttcgacaatcgcgcaggtgttgtccgtagaacgattgtccaccaccagcacctcatgcggcatgatggtctggcgagtggcgttcagcagacagtcgcggatgcgttcggcttcgttccacgctgggatgatgatcgaaacgttgagcataacatcaacaatagaaaagcgggtgtacgccgccggcgtatccgagcttcaaacccctcgctacaatggggagccatgagcgaacgcgcgcgaaacataaacagcaccgacacgtcgagaagcggtgccgcagaagccggggcagacccggacgacgagaatcgtatcgactttggtactttgttccccgccaagggagattcccgcaggccaccggaatggttcggtcgcgcgctgctgtatgtggccctcgccgtcatcgtattcatgttctgctggcgctcgtggggcgacatctcctatctggtgttcgacatcatcatctcgctgttcctggcgctggccgtcgaaccgctggtggtggcgctggtggctcatggctggaagcgtggcgtggcttccgccgtcagtctggtgggcgtggccgtggtcgtgggtgtgctgctcacgctgttcggcaatatgtttgtacagcagatgattgccatggtccgcggtttgccggcaatgtatgggcagattcgtgagttcgtggaccagcacgccacgttcaagatgccggaaatcagcaatcttggcatggaaatcttcaacaatatccagacctcgtgggtcaccgatttcgccggcaccgccatgagtacggtgggtggcctgttctccttcctgctgaacctcatgaccgtggtaatgaccacgtattacatctccgccgccggcccaaagctgcgccgctccttctgccagtggctggcccccaacacgcagcgtcgattcctgctggtgtggaccgtggcccaaggccagatttcgtccttcctgttctcccgttcgattctggcgctgatcaacgccacctgcaccgccatcttcttggagatcctgcatgtgccctactggctgccgttggccctgttctgcggcgtggtatcccagttcatccccacggtcggcacctatatcggcggtgcgctgccggtgctgttcgcttggggcaaccgcgggtggacgtacgccgtggcggtgctggtgttcatcatcgtctaccagcagatcgagaacctgattctctcgccgaggatttcgcagcgcacgatggatatcaacgcggccgtcgccttcctctcggtgctggcgttcggctcgctgttcggcgcattcggcgcgttcctggcgctgccggtcaccgcatcgctgcaggccatcttccgtgcgtacaccaagcgctatgagctgattgactcaccgctgatgaacgatccgactccggagaagaagtccaagatcgtcgaggcgtccgaggcgttcggcgagcacgtattgcagccaatcggcgagcacatgccgcgtgcggccaggggatccaccaaccgcgtgccgatgaatgaggaactgcgtttgctgcaggaacagatttatgcgattccgtcgcacgagacgaaagaatccgatttggacgattccgccaccgtggcgattccgaagaacgtgctatcctccagcgctcgcaagggattacgcggcactgagccggatacggcggcgattccgcagcgtggtgccgcggatacgcagcagtctgagcagcccgagcagcctgagcggtccgccgaacagcctgagcagcccgagcagcctgagcggtccgccgaacagcctgagcagcccgagcaacgcaagcaaaccaagcagtctgatcaatctgcctccagcaatcctagggcagggtggcgctgatgactctgctttccgtactcgatattcttctgatgatcgtcggcggtgccggcatgatatatcagggactgtgcatcgtgatgtccctgttcgccaagcccgtgcgcttccccgacgccccgatgaccaaccggtatgccgtgctgatctccgcgcgcaacgaagaaaaagtgatcggcaaccttattgggtcgattcgcgatcagacctacccgtccaacctcatcgacatctggctggtggccgacaactgcaccgacaacaccgccgacgtggtgcggtctttgggctgccatgtggtggaacgccacaatcttgagctggttggcaagggatatgcgctgacgtatctgttggggcatatgctcgacatcggtgtggccgatgattatgaggcctacttcgtgttcgatgccgataacaagctggacaagcactacttcgaggaaatgaacaaggcgttctgctccggattcaagattctgaccagctaccgtaattcggtgaatctggcggataactgggtgtcttctggttctgcgctgtggttcatccgtgaatcgcgattcctgtctaactcgcgtatgattctcggttcctcttgccatgtgggcggtacgggattcatgttctcccgcgaggtgatgaagcggaacaagggatggaagttccatctgctcactgaagatcttgaattcactatggattcgattctgcatggcgaccgcatcggctattgcggtactgcgattctctacgacgagcagccggttaccttctcgcaaagttggcgtcagcgtttgcgttggagcaagggattcctgcaggtattccgttattatggctcggcattgctgaaacgcgcggttcgcgaacgtgatttctcctgcatcgacttcaccttgatgctgtgtccgtttaccgtgttgggcgtgattcgcgcggtaatgggcttgctgttcgccgcgtgtggcttcgtgagttggccgagccagctgcaatcgctggccagttggtccagtggcatcatcatatcggtgttgggcctgatggcattggctgcattgaccatcattgtcgagcgcgaccagatcggtgccacgaacaaggagctgctcgcctatgtgctcagcttcccgatttacattctcagctacgtgccgatctccttccaggccctcttctccaaagcccagtggaagcccatcgcgcataagggttgaccgagtccgctagttggagctgctcagcggggcaatccaacagcaacccgggggtttgcttcgctgagggttggctggtggggtagagtggatgtatgagcttagacaatactcaaaggaatgtcggatttcagccgccgatgatgccagctgccgcccccgcgcctgcacggccgtcgcaaccgcagccacaagcatggccgccgaatccgaatgcggcggtgtccattcgtggcctgttcaagcacttcgaccggaagatcgccgtcaacggactcgcgctcgatattccggtcggctcgttctatggacttgtaggccccaacggcgccggcaaaaccaccacgctcaatatggtgaccggtctattggtaccggacgccggcaccgccatgattttgggccatgacgtgtggagcgacgtgaacacggccaagcgcatgatcggcgtcatgccccagcccgaccagatcctcgaccgactgaccggtttgcaattgctcgtctactccggcatgctgcgcggcatgagccgcgatgagaccacgcgtcgcgcccaggacctgctcaatgctttcgacttggccggggccgccaacacgatggtcaccgattattcggccggcatgaccaagaagatctgcctggcctccgcgatgattcatagcccgcgcattctggtcctggacgagccgtttgaatccgtggacccggtgtccagcgccaacctcaaagacatcctcatcgaatacgcgaagaccggcggcacggtgattatctcttcgcacgtgatggcattggtcgaaaagatgtgcacgcatgtggccgtaatcaacaacggtctggtgtgcgcggccggcacggtggacgaggtcgccgccggcgaagaactcgaagaccgcttcctgcaactggtcggcggccgccacgaagccgcccatctcgcatggctcgacggcgggcaagcccaagcccaagcaccaacttcggtccagccggtccagcccattccgcttacaaccgccacgcccgccatacccaccgatgaggcccgccgatgatcagcagcgccatcaccctggtccgcctgcgctggacgctcacgctcgccaccctgcgaaaatcggcgtggcagaccgtcgcctatgtcttttccgccgtactcgcggccggcaccatcatcggcaccggcgtgctcgcatggttcatcggcatactgccgcccttcaccgtgaacgcggatggctttccgctgaacatccttggttccggaggcatcgtcaacatagtcgtcgtgctggtcggcgcgaccatgaccatcttcatcggcttcatccagctcatgatgcttggcgaaggctccaccatgaacccacgcaaattcgcgctctacggcatcgccgaccgcaacctgcaattcggcttgctgctttccggcctgtccggcatccccgcccttaccggcgtggcctcactgatgctctggacactggcctatcggcatatgggaccagccgtaatcatcagttccctcctcgccgcagtgctggccgtcatcaccatgatgagcatctccaaactgctcatcgccctatccaccacgctggtgaccagcaaacgcggcaaaggcgcgttctatatcttcatcgtgctgacgttcgttatcatctgtcagttgccgaacattctggtcaactccggcgtggccttcagcctcaacaccgaaacctggggcgcggcgaccaccatcgtcgcatggacgccgttcggcgcggccttccaactaccgttcgacgcgcttaccggagcctgggcggtgctgctcgcccgcatcgccatccttgccgtcacatggattgtctgcttcgccgtctgcacctggtgtctgagacatgaacggctcaccatcggcgcaaacagtccgtccgagaccgccaaaggcatcggcgcattcgcatggatgcccgattcggcatccggcgcggtttccgcacgcctgatcacctatctcaaacgagacccccgtcaagccatgaccttcgccatgccggtcctgttcctgatcatcttcgccttccaggcacacggcatcagcgcggtcgtctggcagtcgctgatctggtgcggctggttcatgtccgtcgtggaaagcaacgggctcgcatatgacggccgcggcttcaccatggaagtcatcgccggcgtgcgtggccggaccgacagaatcggccgcgtacgcgtctacgtcggcatcatggtcgtctacatggtgctgctctatctcgccggcatcgtgctggtcggcgcactgaccggacgctgggcgcagcccgatgacctcgctgccggcctgatcttcctcgccacgggcatgggcatcgccttgagcggactgggcgtggccgaagtcacctcctgtgtactgatgtacccggtcgcctcaatggacaagccgttctccgcgcctcaaggccgcgccatggcccaaggtttcttcccgttcgtctacatgcttggcagcctgctgctcatgctgcccactggcatcgtggcgctggtcatgctgctgacaggagccgaaggcggcatgtggctggcgattattccggtcgcgctggccaatggcatcggcattctggcactcgggacatggctgggcggtaagctgatggatgcgcgaatgctctcgattgtggcaacactcgactcgttcgcctcattgcagaaatgattgccttggcataaggagcacgatggtatctacagcggtatcacgccgtcagcgacgtgaagcgcaacggcggacccaacgatcgcatcgccgaacactgaccgtcatcatttccgcactgaccaccatcgccctgttcgcggggtactgcgccgccgacatcaccgacgtggcccccggattgttgacgttaaaacctgtcaccgcacctgttttcgccaatccggccaccgccaaatcaggcggcaccatcgccggtgccctgaacgcgaacaaggccattgattccacggccgcttctgcactggtcaacgaattgctgtccgcgcaaggcgtgggaaacgatacgtcggtgatcattgaagacgcccaaggcaccgtcgccgccgaacacgagtcgaacactccacgcgagcctgcatccacactgaaaacgctgaccgcgctcgccgcctcatccaccctgaatatggcatccaccttggatacccaagtgttcctcacccaatccgatgacggcaccaatacgttgaccctcaaaggcaatggcgacatgctgctgtctgcaggcgattccgacgccaaccataccaacggacgtgccggtctgaacaccttggccaaggccaccgtggccgcgctcgcccagcgaggcatcacttccgtcaatctcgagtacgacgacaccctattcggcgactcacgcattcccgcaggtctgtcggaaggcggcgcggtcttaagcgactacaccgtctacttcacgccggtctcatcaatggcgattgatggaggccgccaatacaccgccgatacgcctgcgccggccgaccctgatgattcggccggatacccggaactgtcccagcacaccgccagcgacgtggccacgaaattcgccgaactgctccaatcgaacggtgtggccgttaccggagacgtgacggcaaacaccgctccatccggcgaaacgcctttggcctcggtgagttcggcaacactgtccgaaatcatggcatacacgttgcgacattcggacaatacgctggccgaggagttcggcagactcaccgctttggcgaaatcagcgacaaacagtcctgaaggcggcacggaagcggtcaaatccactctgaacgatctcggtctcgacacatccggtctgaccatggccgattgctccggcctgtctcccggctcccggctcaccgtacgcacgctggcggccgtccaacaacgtaatctgaccaccgagagcggtgctgctggtgcggaaggtctatccatcgcggggttggtgggcacggcgcaggatcggtatacggatgatgccgtggccggtctgttgcgcgtcaaaaccggcagcctcggcacggtcacgtcgatggccggcaatgtgtcccgtaccaatgggggagcgttgtcgtttgccgtggtggtcaacaatcctgaggattatgccgccgcgcgtagcgccatcgactcgttcatcaccaagctcgcggggctgtaaaagaggcatcaagggccatcaagggctacaaaggccgtaaacgtccataaacgcacgagtgcctataaccagaaaagggtggtgagtacatggcatattccgcacgattgcgcaaggccgtaggcgcggtccgaacaacgctgagcgccgtggaactatgcgatgtgcaggctcccgaattcgcgcagcatggggaccatgccgttgcctccgatgcaccactcgtgctcgtggcctgttcaggcgggcgcgattcgatggcgctggccgcggtaagccatatcgtatgcacgtccatgggcgtgcgttgcggtgtcgtgattgtggatcacggcttgcaggagggttccgaacaggtcgccggcgaggccgcggatcgttgccgtgcgttgggactgggcccggtcatcgtgcgcaacacaaccgtgcaggcacgcggtgagggcctcgaagcggccgcacggcaggcccggtacaacgagctgtgcaccgcggcgcgtgaatcaggtgccattgccgtgctgttggcccacactatggacgatcaggcggaaaccgtattgatcggactgctgcgcagccgtggcgtggatgcgttggccggcatgccgcaggtcttcacacgcagtggcgtgacttttgcgcggccgctgctgacccttactcgagacgaaaccaccggcctctgtgaagacttgggtgtggaatattgggatgaccccaccaatggcgatgcggtagacggcgagttgccggacgactatccgttgcgctcgcgggtacgccacgacctgctgccggccatcgaacgattcgctggattcaatgtcacccgccatttcgccgaaagcgcacggttggccagaatggataaggagtatctggatcagcgatccgacgaggtgatgggggaggcggttacgacagttgattggctggcatcgtcggcagcggtatcgaccgatacgccacgagcctgtgctgcagacgataccaacgattcgggccatggcatcggcctgatgatcggcgtcaaacgtattgcacgtgagccagaggcgattcggttgcgggtcatcgctcacgcgctgagccaggccggtgtgaacgccagtgccgcccagattgccgccatcgaccggctggtcgtcgattggcatggccaaggcggcgtctcacttcccagaggttattcagccaatcgcaagaaacacgtcattcgcgtgtgccaagatggagcgcatgcgaatcgctgacgttgaggaagatattgaccacgagctggtcagcaaagaacagatcgatgccaagatccacgagatggccgctctcgcgagcgaggattaccgcgataagaatccgctgctcgttgcggtgctgaaaggggccgtgaatacgctggtcgcgttcacccaggccatgagcattcctgtgcagatcgacttcatgagcctttcgagctatggctcgggcacagtgtcgagcggtgaggtcacagtcaggcaggatttgtccgccgatgttcgcggacggcacattttgattgtggaggatattgttgattcaggacgcacgctcgcgtggctggtcgcagaactgaaacgtcgtggtgccgcttccgtggaggtcttcgctttgctgagcaagccttcccgccgagaagtggacgttgatgtgaagtacgccggctatgagattccggacgagttcgtcgtcggcttcggcctcgactttgatgaacgctaccgcaacctcgattcgatcgcggtcctcaagccgtccgtctaccaaggagtgcaagcatgagcttcccgcaagggccgggtaacggcaataatccgaacccgaacaacaaccgtaacaacggcaacccgttcactaacccgttcaaccgtggcaataacgggaccaatggcaaaggcaacaacaacgagaaccgcccgatatggcagtccccttggctatggggtgccgtgctcgtggtcatggtcgtgctgatgttccagatgttcgccggcggtggcacgaagaccattgacaccaaagatggtttcgcgctgatcaatcagggcaaggccacctacgccgagatcacggacaacaagcaggtcgtccgccttaagctgaagaacgactacaccaagaaaaacgccgacaccggcaaggtgaccaactacggcaagaacgtgcagttctactacaccttcgcgcagggcgcacaggtggccaaggccgtggagaacggtgatctcgaaaagggttggacctcgaatatcgagcagaccagcatgctgagctacctcgtcacctcgatcctgccgttcatcatcttcttcgccctgttctggttcctgatgagccgcatgggtggtgccggcggcatgctcggcatgggcggcaggaagaacagcggcaaactgctcgacgggcagacccccaccaccaagttcgccgatgtggccggtgaagacgaggccgtggccgaagtcgaggagatcaaggacttcctcaaggatccgtccaagtacaaggcgctgggtgcgcgcatcccgcgcggtgtgctgctgtacggccctcccggcaccggtaagacgttgctggcccgagccatcgcaggcgaggccggcgtgccgttctactcgatggccggctccgacttcgtcgaaatgttcgtgggtctcggtgcctcccgtgtgcgcgacctgttcgatgaggccaagaagaacgcccccgccatcatcttcatcgacgagatcgatgccgtgggccgcaagcgcggttccggcatgggcggtggccacgacgagcgcgagcagacgctgaaccagctgctcgtcgagatggacggcttcgacaacgacaccaacctcatcatcatcgccgccaccaaccgtcccgacgtgctcgaccccgccctgctgcgtccgggccgattcgaccggcaggtgggcgtggcggcccccgatctggaaggccgtgaggcgatcctgagggtgcatgccaagggcaagccgttcgtgccggacgtcgacctgcacatggtcgccgtgcgcacgccgggcttcaccggtgccgatctggccaacgtgctcaacgaagccgccctgctgtgcgcccgtgccggtgcccagttgattgacaaccgcgccatcgacgaggccatcgaccgtgttcaggccggaccgaagcgcaagtccaagggcatggctctggaagagctgcgcaacaccgcataccacgagggtggtcatgcgctggtggccgccgccctgaacaataccgatccggtgaccaaggtgacgattctgccgcgaggccgcgccctcggctacaccgccgtcatgccgacctccgaccgctactcgcagtcgcgcaaccagctgctcgaccagatggcctacgcgatgggcggtcgcaccgccgaggaaatcgtcttccacgacccgaccaccggtgcctcgaacgatatcgagaaggctacgagcatcgcccgtacgatggtgatcgaatacggcttctccgacaagctcggtgccatcaagtggggttccgacgatgaccagaccactgtgatggacggtctgcagccgcgcaaatactccgaccgcaccgccgaagtgattgatgacgaggtgctgaagctggtggaaaccgcccacaccgaggcgtggaccatcatcaacgacaaccgcgatatactcgatgagttggtccgccagctgctggtcaaggaaactctgaacgagaaggagcttgcggagatcttcgcgccgatcaagaaggcgccggtccgcccggtgtggctgtccaacgaccgtcgccccgactcggacaagccgccggtggagattcccgaaagccttaagcgctcggtcggcatgaagccggaagagtagacacgatgacgattctgcccgacctgttcatgtggtttctcacgtacgcaggccgggccgacgtcgttgtggacaatgacaagggagagatgagatgaacgaatatatagagtcttgccagcgggagaaacgcacatacgacgaggaaggcgtgcgcgaggccgtacgtctgttcctgaagtcgattggcgaggatcccgagcgcgagggactggtggaaacgcctgaccgtatcgcccgagcgtgccgcgagctgttcgccggtctgcaggcttccccggccgatgtgctggagaagcacttcgacgtggataccgacgagctggtgctggtcaaggacatcgaactgtattcggtgtgcgagcatcacctgctgccgttccacggcgtggcccatgtgggctatattcccgccaaggacggggtgatggggctgagcaagctcgcccgactggtcgaggtgtatgctcgccggccgcaggtgcaggagcgactgacccagcagatcgccgacgcgctggtcgagtacgcgggcgcacgtggcgtgattgtggtgaccgaatgcgagcacctatgcatgtcgatgcgcggcatcaagaagtcttccgcccgcacggtgacctctgcggtgcgcggcatgctgcgcaatccggccacccgggccgaagccatgagcttgattcttgacaagtgacgcaacctaggctcccctctctgaggggagctgtcgccgtaggcgactgaggggagcgaagggaaacaacgaaggggagataacctatgactgatttgcaggcgttgcatgacagtacgcgcaccatggtgatgggcgtgctcaatatcaccgaggactcggtctcggacggcggcctgtggctggacccggccaaggcggcccagcacgggcgcgacatgatggccgccggcgcggacatcatcgacatcggcgccgaatccacgcgccccggcgccaagcgcgtgtccgaggccgacgaactggcccgcatcaccggtgccgtcaagacattgattccggccggtgccatattgtccatcgacaccacgcgcgcatccgtggccgccgctgcgctgagcgagggcgcccagatcatcaacgacgtctccggtggcacgctggatgccgaactgccgcatgtggtcgccgaccacgactgcctgtacatcgtgcagcattggcgcggttggctcgccggctccaagggcgcgaaccccgatcaagacacctccgtctacgagcacggtgtattgaccgacgtacacgacgaactcatgcgccaagtcgacggtgtgctggccgccggcgtaaagcctgagcgcattatcatcgacccgggcctgggtttctccaagcccggcatcgagcacaacctgccgctgctgaccggactcgagaccttccgcgccactggatatccggtgctgatcggcccgtcccgcaaacgcttcatctcggcgatgcttaacgaggcgggcgctgccggtgctgatgggccgatcatggcccagcgcgatgacgtgaccgcagccttgtccgccctgtccgccgaacatggcgcatgggccgtgcgcgtacacgacgtggccaaaagccgcgccgccgtcatcgccggcaaca

SEQ ID NO: 3362 - DNA, 8893 bp, Unknown
  R151_18m  MAG No. k141_22773
cgctcggcggggtcttcgagtggagcggacaacgggactcgaacccgcggtctcaaccttggcaaggttgcgctttaccaactaagctatgtccgcaaaggaatccgccgtgagaagcggaatccagtgggcgatgtaggaatcgaacctacgaccccttcggtgtgaacgaagtgcgctagccgctgcgccaatcgcccgaatactcggttcttcagttatatccagtcgaattgcttcgactttcgtgggcgatacaagattcgaacttgtgaccccttccgtgtcagggaagtgcgctaccactgcgccaaccgcccgggtcatatttcatcccattgaattgcttcgccggtctgagaggtgggtacgagagtcgaactcgtctatacggctttgcaggccgctgcctaaccgcttggctaacccaccgtaaggtctgtcaactcacggacctagagcggacaacgggactcgaacccgcggtctcaaccttggcaaggttgcgctttaccaactaagctatgtccgcgtgtgtttccttggcgaggtctccctgccgaagcacgagtgtttactatacacacatgcgtgtagttcgtccagctgcggcgtgtcgcctgtaattgcatactctcgcttatggctaaagcgtgcgcttcgggcaatgaattccagttactctagaggtatgagtgaagcagcgaaggacaccggcgcagtattgatcgccgcattcgagggatggaatgatgcctgtcaggcggcgacgaacgcggtgcgccatctggtcaagcgatatgagtcccgcgagattcgtcatattagatgtgatgatttctatgactatcaggttgcccgtcctatgctgtgccatgttgcgggacgcaccaatcttatctggccgcagaccacgttctacgacatcacgttggacgcaggcaagcatatctatgcgcagatcgcccccgaaccgaactatcggtggaaggaatactgtagccagagtctggccattgccgatgagctggatgtcaatcggatcattacgttaggttcgatgttctccgattgcccgcatacccgtccgttgcccatcgccgtcagcgacggagactgtcaatgcgaaggagaccggtcgtataacggcccggtaggcattcctaccgttttggatgtggccgccgcgcagcaaggttttgctcattcctcgatgtgggtgtccatcccccaatatttgggcagcgacgaatgttctgccggcactatgcgattgctggatgcgttggacaagcatatcggcttcaccttcgatacggcagatctgaagcagaaagccgaacagtggaaggcgcaagcctcgatactggttcgttgtaatgaccagcttcacgattacgtggagcatttggagcacgactacgacttgcagcagaaagccgaggcggaggcttccttgggagcgccccaggccgaacaactagtcaaagaagcagaagcgtttctgcgccagatgggcaattagcccatatatggtgtgctcccgctggatgaacagccctgtggacaattcatagcagtgcaccatgtgcacgtcgcacaaaatgtcgggagctggctcgcgtagcgagactgagggtggttctgctggcatattccagtgaccacccccagtcagcttcgctgacggctcccgccagcgggagcaccattatattggagtcgtctatcgacccgtcttatgccgcagccgccacggagggatcgatggccggcagcacgcccacaatcagcagcaaggcgacgaccacagccaaaccgatgcggtagatggcgaaggccttataggagaagttcgatacgaacttcaggaatccgatgatcacgatgtagccgagtacgaagctgatgaccatggctacgagggtcggcccccagccggggaacatcgcatcggttttgtagttcttcacggccttgatggcttcgagcaaacctgagccgaacaccgcggggatggccatcaggaagctcagacgtacagcggcctcacgcgtgtagcccagtgcgcgaccgacggtgatggtgccgccggagcgggacacaccaggaatcagcgccatggactggcccaaaccgaagaggaacgcatcacgatacgtcatatcattcatggttttgttctggcgagccttggcatccaccatccacagcagaatgccgaataccaacagcacggttaccgtaatccacaggttgcgcaacgaggtctcgatgacgttctgcagagtgaagccgaggatgataatcggaatcgagccgacgataatgttccagccgagtgtggcgtaattgtcgccgcggcccatgcgggccttccaatccttgccgttcttgccgaacaggcagctgaaccagtgagtaaggatattgatgatgtcgtgacggaaatacagaatcaccgcaagttcggtgccgatttggatgatggcggtaaacgccgcaccgggatcagagcccagcatcaaatcgccgaaaatacggatatgcgcgctggaggataccgggagatactcggtcagcgcctgaacgatgccgagaatgatcgcttggaaaaaattcataacccctcgtgatttctaagtatttgatgtgttatgacgatgaacaccctacccaagggggtgtagaacaacactaagaatcggtaacatccacggcttctacaatgaaagtggatatagtacgtaagcgacgaagggagcattatggccacgtatcgcaaaagcagggcattcgcaccggaaggattcttcgaatgcgagggtcgaggactcgaatggttgggagcggctcatgcgcagggcggcccgcgcgtggtgcaggtatacggctggggcaaggattatctggatatcgaacgtgtgggcagcgcgtcccccacgcctcaggcggcacgagcttttggtgcggctctggcccatatgcatgatgtgggtgccgaatatttcgggtctgcgcctgacggatataacggcacatgctatttcggaccattgcaggacccagtgaaaatggataccggcgagtggaccgacccgatcagctatttcgctgatggacgtctgcgcccgatggtcaaccttggtgtgaggcgcggcgagctggataagcgcgatgtcgaactgaccgagcgcgtgattgaagcgttgccggatctgatgggccgagccgcgtccgacaagccggcgcgcatccacggtgatctgtggagcggcaatgtgatgtggaccgccgattccgggcagcccgaggctgtgctcatcgacccggcggcacatggcggtcatcgcgaggaggatctggctatgctgcacctgttcggcatgagctatctgagcgaaatcaccgagggctaccagtccgtgcatccgttgaaggccggatggcaggagcgtatcacgctctggcagctctaccccatcgccggccactgtgtcttcttcggcggcggctacgtcaacgaataccgctccatgtgccgctccctgctgaagtaacagacttggctcccctctctgaggggagccaagaacgcatccactctcagctcagcgcgtccttcaacttgctgaagaagcctttcttttggccagcctgtggacgggatgcctgggagacgtgcgtggcgcctgaatcatgtgaggcggcgaactgttcgatgaggccgcgctcggtttcgttgagcttggtgggaatcagcacattgacgtgggcgatgaggttgccgcgctcgtccttgttgcggatgttcgtgacgcccagtcccttaagcgtcacagtgtcctcaggctggcagccggccgggatggacacggtcttctcaccatcgaacgtgtcaatggacagatcgtggccgagcacggcccagctcatcggcacctgaatccagcagtgcaggtcgtcgccatcgcgggtgaactgcttatccgccttgatgcgaatgtcgatgtacaggtcgccggcagcgccgccgccctcacccacttcgccctggttggccaaacgtagacgcgcgttgtcgttgatgccggcgggcacggtgacgcccacggtacgtgtggtacgcacacggccgtggcccatgcagctggggcacgggttcttgatgatggtaccgtggccctcgcaacgttcgcagggggcggaggtcatcatctggccgagcatggtgcgcacgaccttctgcatgaatccctggccgtggcagtcggggcaggtgaccggctgtgcgccgccctgggcgccggagccgccgcactcctggcacagggagaacgtgctgatcttgacgtgcgcggtgccgccgaacacggcggtcttcaggtcgatggacgcggaggccagggcgtcgcggccgggctgggtacgcggcaccgggccctgtgagccaccaccgaacgcggaaccgaagaacgtggagaacacgtcgctcatatcgccgaagcccgccccggagaagccgccggcaccggcgttcggatcgttcgggtcgacgcccgaatcatacatacggcgcttgtccggattggacagcacatcgtaggcgttgttcacttccttgaacttgtcctcgaattcagggcccgcgatgtcggggtggtacttacggctgagcttgcggtatgccttcttgatctcgtcgtcactggcgccgcgttccacacccagcgtctcgtaataatctgccacttgattgatcctttgtgttcgtttggtctgcgggtcattgtgccacagacggcggtcagtcttgggtccggccctcggagaggaaggcggtcaaatatctggctacggccctgacggcggccatagtggccgcatagtccatgtgggtcggccctatggagccgacgaaggcgatgggttccgtgtcgttcgtctggctctccgtctcggattcggtttcgggttcgcctacgggatcgttccccgccggttcgcccgccgcaccgctgcgcccatagccactgctgaccacggaggcatgcagtaggccgggggtgtgcatttcggagccgatggccacgcccacgccggatgcattcgtctcctcgcccaggttgctcatgagcttcatcagcacgacctgttcttccagcgcgtcgaagagcggggccagatcggccagggaccgggagtgggccaggtgcgaggtgccggacatgtacagttcgtccgcgcgttcgtccaatgccatcgattcgaaggcgtcggccagcgcgtcggccacgccgcgcaccgactcgtagccggcgctggcggcgatggatcgcacggtctccgcggatttcgatagggacagtccgacacattgttcgttgacggtgttggagagccggttgatctcgtccacggcgggcatggatgcgatggtcaggccgtgctgggccacgcggccggtgtcggtaatcaccaccgcgagcaacgtggtcatggcaacgggcaccatctccacgtgccgcaatgtggccttggccagcgatggcgaggtgactatggccacttgaccggtgatttcggacaacagtcgtgccgaacgctgcagcgcgtccttgagactcaccgatccggacaggaagctgttgatgccgcggcgctgcgcctcgctgagcggcaccacggtagcaagtcggtccacaaagtatcgatagcccttttcggtgggcacacgaccggccgaagtgtgcggctgaatcagatatccttcatcctccagagcggacatgtcgttacggatggtggccgaactgacgccgagatcatggtcgcgcgtcagcgaagtggagcccacgggctcctgagaacggatgtaatcctccaccacggcgcgcagcaccagcatgcgtcttgattgcgtcatgcgcgcctccttatatatgcatacatattcatatcagtcacggttcactcagggcgtaccccgacggtcggttcgccacgccgcgacacgcgggaacccagaaatattgcctctttcttggctccgccacgtgcaggtggcgcacttcaccttagaacattgtattagcactccttaggcttgagtgctaatgcgttcgtttgcagcgtagcaatgttcactgtgaacgctaacagaacacaaactaccaaaacacgccaaaattgcaccgcaacgtcgcaaaccgacgctagcatggtaatcgcaatgtgagggcgtcaagcgcccggcacaagccggatacgcggcccgaccaattggaaggaaagtaatccatgaccgaattcaaggagaccgagctcgacgagcgcgccatcaagatggcgaaggtcctttcggctgacgcggttgagaaggcaggctccggccaccccggctcccccgtctccctggcgcccgtcgcctacacgctgtaccagcacttcatcaagcacgatccgaatgatcccaactgggaaggccgcgatcgcttcatcctttccggtggccatgcctccctcacccagtacgtccagctgtacttctccggctacggcgtgaccctggacgaccttaagaacttccgtggcggcgctgccacccgcaccccgggccacccggagtacggcctgaccccgggcatcgaaatgaccaccggccctctgggccagggcttcgcctccgccatcggctttgcctacggcgagcgtttccagcgcggtctgcttgacccggagaccccgaaggaagattccccgttctaccacaagatttgggccatctgtggtgaaggcgacatcgaggagggcatctccggcgaggccgcttccctggccgccaaccagaagctcggcaacctgaccgtgatcttcgacgccaaccgcatccagatcgaaggcgacaccaacctggtgctggccgaggacgtgctcaagcgcttccaggcctacggctggtacaccgacgagttcagcttcatccagcccgacggctcctacaaggaggacatcgagggtctggccgacgtcatcgccaaggccgaagccgccgccccggaccagccgaagctcatcaaggtccactccctgatcgcctggccgaccccgggcaagaccaacgacccgtcctcccacggctccaagctgggcgccgaggccgtcgccggcctcaagaaactcctcggctacgatccggaggagtccttccacgtcgacgaagaagccctggcccacgcccgcaaggtcgccgatcgcggcctggaggcccacaaggcctgggacgagaagttcgacgcctggcgcaaggccaacccggacaaggccgccctgtacgaccgtctgaaggccggcgaactgccggaaggcttcgacaaggcccttgacgaccttgaggccaccttcgaagtcggcaagggtgtcgccactcgtggcgcctccggctccgtgctcaacgccatcgccgccgtcatgccggaactctggggcggctccgccgacctcggtggctccaacaagaccgacctcaagggcgctgccaccttcgccccggccgagtgcgccaccaagcagtggccgaactgcaacgagttcggtcgccagctgcactacggcgtgcgcgagttcaccatgggctgcatcaccaacggcatcctgctgggctcccacacccgtccgttcggcggcaccttcttcatgttctccgactacgagcgttccgccgttcgtctggccgccctcatgcagatcccgaacctgtacatctggtcccacgactccgtcgccgtcggcgaggacggcccgacccaccagccggttgagcaccttgcttccttccgcgcgattcctcagcttgaggtcattcgcccggccgacgccttcgagaccgccgaggcttaccgttacttcttcgagaagaagaacaccctgcctggcgccatggttctgacccgtcagggtgtcccggttcttgccgagaccgctgccaaggccaaggacggtgtcaagaagggcgcttacgttctggtcgacaccgagggcactccggacgtcatcctcatggcttccggttccgaggtccagtgggctgtggctgccgccaagaccctggccggcgagggcgtcaaggctcgcgtcgtgtccgtgccgtccatggaatggttcgaggagcaggacgccgagtacaaggaggctgtgcttccggccgctgtcaaggctcgtgtctccgtcgaggccggcgttgccatgccgtggtacaagtacctcggttcctacggcaagcctgtctccatcgagcagttcggcctgcagggtgacggcgctcagaacatgatcgacctcggcatcaccgccgagcacgtggtggaagccgccaaggcctccatcgccgaagtcgaagccgccaagtgagcaactaagcaataattcaataattgttggctcccctccctgaggggagctgtcaggcgaaagcttgactgaggggagcaatgcttgagcccactcccctcagtccgcgttgcggacagctcccctctcccaggagaggggagcctagggcttgaatccaaggagaaaataaatgactgaagcaactcagcgtacgtccgacaacggcgtttccatctggctggacgacctgtcccgctcccgcattgagtccggctccctgcaggacctcatcgccaacaagaacgtggtcggcgttaccaccaacccgtccatcttccagaaggccctgagccaggtcggcccgtacgacgctcagctcaaggagctcggcaaggttgacgttgagaccgctgtccgcgagctcaccaccaccgacgtgcgcaacgccaccgacatcttccgcgagatcgctgaggctaccgacttcgtcgacggccgcgtc

SEQ ID NO: 3363 - DNA, 5118 bp, Unknown
  R151_18m  MAG No. k141_22963
catcagttcccgttttacggagctggtccataagaaagaaagaatttccgccggtaaaatatatcacatctgcttcttcaaaaacagactgtatcgttgaataagcctccgttgaaatatcaatttcagttacgattgctctcaactttttgaataattttcgagccgagccgacataaccggtgtagccttcacgcagtgaagctgttggaataaatgcgactttcttattttcaatttcttcctttatcagacttcctacacttgaaaagtgtgaacataaaaatagtttcatcaatattcttctttataaattccgatttgtttctcaattttcgtattcaaattataccataaaattgtgaataattctaccgtcattttggactgtatgagaaaagtccggacagttttctgcccggacttttctcactcaatcataaatcaattccgctttcacaatctcctctgcctgtgccttgcaagcgttcatctgccgcacccattccatttggttttcggctttcagttgctcggtcacgccgttttgctctgccagtgaccgcacgatcagctccatgcggtttcgtgccgcttcgtcgatcttggcgcaatactgtcttacgtacacccagctatagtcaagcggcgttttttcgtaaggattttcggcgtatcaatcacgcatagatattgcgcggacgcatgtcctcgggcaggccgtcgagcagaatcgccacggaaccttcctcgaacacggagcgaatacccgcggccagcagcggtgcgcaagacagtacggtcatattcggcaggcgcttctcttcgggaatcggcacggtgtccataaacacgatttcatgcgcgccgcagtgagacaggcgctccacggccgggccggagagcaggccatgggtggcgaccagcgtcaccgacttggcgccggattcgttcagggtgcgcacggcttcgcagatagtaccggcggtatcgaccatgtcgtcgatgaccacgcagtcgcggccgtcgacatcgccgataatgccatgtgcctcggcatggttcggacgagtaatatcacgctgtttgtggatgaatgccagcggcagattgcctagcttggcggcccactgttcggacaccttgatacggccggcatccggggacacgatggtggtgttgcccagatcaagggtggaacgcacgtaatcgagcagcaccggcatggcggttagatgatcgaccggaccatcgaagaaaccctgctcctgagcggcgtgcagatcgaccgtcataatgcggtctgcaccggcggcgtggaacagatcgaaaatcagacgggcggtgatgggctcacgaccgcggtgcttcttatcctggcgcgagtagccgaggaagggcgccaccacggtaatcgacttggcggaggcgcgcttcaaagcgtcgatcatgatgagctgttccatgatccacttgttgatatcgcccgaatgacactgcagcacgaacacgtccgcaccacgcaccggttcggtgaaacgcacgtacatctcgccattggcaaagtcataggacgtggtttcgaggatttcggttcccaagcattcggccaccttctcagctagctcggggtaggcgcggcccgtgaccaatacgagtcgtttatccggagtgccttcaagaatcgccgacatgcgttcgcatcctttgtttgagtcgctgtgtgatttacgccttaaccagtgtacaagcaccccgccgcagcgaacgccacggcggggtgcctatttcgtaagagtgttgagattgccgaaattattcggagaactcgacactgaccttattgtctttgatggtgaaggtgccgtataccgagaaagtgctggaatcgtcttccggttcccagccatcgctgtaacggtactcgtaattcgccgtcacatcaccttcgtcggtgctgaacgagctatccgacaggctcacgctggtgaccttcggataaccgtcaatcgtccacttgaagttgcggtatcggctggaattggaggtgtagtagccgaacgggcagccctgcggttctgcatcgatggaagccgcgcattcatccagcttgctcttcaccgccgtgtcgatttccgacgtcaacttgtccgtaggctgagcgtcaagagtgccgctatcggagctgttggtgctcagagacacggtcttggcggtgtaatagtcggacttcaccacgccaactttgtagacgccggggtacaccttgagccggtagttgccggtttcgtccgcgtcgttgttcacggcgttcttgggcgttacggtcacgccattgacggtgatgctgcccagcgagcttggcgcatataccgaaatggtcttgaccaacggttcggcgacggtccagttcttgaagatcaggaacttgctgccgttggccaccatcttgatggaatcgccggtgacctccttgccttcaagcgtgtacgtcagctgggcgctcacggtgccatcggcattgttggaagtctgcgagatgcgcgcgttggtgatgtgcgtgttctcgcccgaggatgccttgctggtcagcagtgcgcgctggttcgtatccacgtgaggatcggcgatggtgttggccttgtcgtagtcgccggaggagatggcggccacatagctgttcgccacgctcttcgcgctgaacacggcggaagacagcacgccatacacgataccgaacagtacgaggaagccggccacggcaccaacgatgatgaagatcttcttctgctgctcattcatggtggtggaggtcgcgccaggtgcggctaccggtgccgctccgggagtggtgggagccgcggttgcgaatgtggtgcccggagcaccgggggttgcaggggcggccggagcacccggggcagcgggcgcgggtacaccgacaccagcaacaggaggctggccggcggacgtcggcgtgacgttgacgtgaggctgcgcagcgtttgcgcccgtacccacgccggcgcttggcgtgccccacgtgggccacttgccgaccattgcgccgctggcatagatgtagtcgaccacaggctgaggcgtggcacgcacagtgccgcctacaagtagggcccgcagtcccggcatggaaaccaccatggtcgggccgaacgtcagtgcaacgacctcaaccaggaatgcccacaggcccatgaccaggaagtaccacatggcaggtccggtggtctgaacttgcgtgacggaggtgcggttgcccatagtacccatcagcagcgtggcaatcgcccagaacaccatgatggcgatcggggctttccagcagtgctgccagcccatgtaggcacggtcgtacaggttgcgtgcggagacgcgcaatgccgtgtagaaggtgaggaccaggaacacggcgaacaggatccaaataggccatacggtaacgctgaggttgatgctgaacaggctgagatcctgcggcagctgaccggactcggtcagtgtaatggcgccgaaggttccccaggtaaagaagaactcgccgatcatcagcagtgtgaccgggaacgtcagtatcaggattccctgacctgaggagaatgccacggcgaacagggccaccaggccgacgatgaagagcaaagccagctggaagctcaagacgctgaccaccgtgcgcgtgtatccgcgaacgcggtgtgcccactgccaagtagctccgaacacattcttggaatcggaagcatattgggccagtgcatagccggccagagcgccgagcgcggagagcaggtaggccataaagaacgtacgcactgtggcgccggtcaccttggccacgatggtggtgccactggcgagtggtgccgccgcgatggccgcaagcagcgtgatgaccacggccggcagcaatccggtgataaagccggagatcaggccggtgaacttgaatcgaatgctcttggaacgggccagcatgaatgcgccgaatgcggtgccgaccagcaatgccaagccggtgagccccagtgggtacgacatcatgttgctggcgtccatgctggaggatgagaggtcgacgatgtcgaaatgaataccgccagacaggcccatgaccaacgataggaacaggtagtggaagaagttcatgccgttgccggtgatgaacatgccgccaacggcttggttcagtgttgaatcggccccgaggctgggtgctgcggtgctcatggaattcattgcgattgcagggaaaatcgaaagcaccaaggcggctgccgtaccgatgccggccgcaatgccgatggtctgcatgttgggggcgccgaacagttccttgaccagtgggctggaagagatgggttgtgccggagcggcgggagccggcgatgggccgggctgccctgggttcggaatggccgtggtcggtgcggtgaatgccggtccgcctgcgggctgggcctgcggctgtgcagcgggctgaggcgtcggctgcacagccgctgcgccgggcaacggaatcgatggtgcgggagccgcgggctgtgcggtcgtgggaacggcgccggtgggttgaccgggcgtgggtgcggcgggcgtcgctgctgctggagctgacgccgcggcaagatggttgccgcaggaaccgcagaattgcgctccttcgcgcacagctgcgccacaattaggacagaacatatagtccccctttcttctgatgcttcttcgagcactatcgtacccgcaaaatcagcgccatgaccatagggcgaggctcgaaatggacaatactgggtgatggcgcgcgggcttggctgcgcgggcttggctgcgcgggcttggccaaaatggtgggcatcgcgaaaccggcaggaatatggccataccctgtcccgccttatatatagactgtccaagttgcccgaagatgcggtgccggtttggtgctgcgtcatgggctaacacgcatacacactcctgccacggaacgtccgtggccgaatagtccgaaggaggtgggtgatgtctgcgcacaagtacgaactgatgttcatcgccgatcctgagctggatgagcgcggtctgaagaagctgaccgag

SEQ ID NO: 3364 - DNA, 24283 bp, Unknown
  R151_18m  MAG No. k141_23125
ggccatatccgtgccgccgtggcgttcgacatcgtgcgccgctggtttttgaagctcggttacaaagtcacttttgtgcgtaatgtgaccgatatcgacgataagattctcgataaggccgcggccgccggccagcgttggtgggcccgcgcctattactacgagcgcgaattcaccgaggcgtacaacacgctcggcgtgctgccgcccaccgtggaacctcgcgccaccggccacatgtcggacatgatcgacctgattcagcgcattctcgacaacggccacggctatgtggtcacggatgcggacggcaagcccaccggcaacgtgtacttcgatgtggcatcctggccgcattacggcgaactcacccaccagaagcagacctccgaagtcgacgaggccgctgccgtggccgaccgcatgggcccgtccgtggacgccaccggtgccgacaagtacaatccggtcgacccggccgacgcctcccccgacaagcacgacccgcgtgatttcgccctgtggaaggcccccaaggacaccgatcccgaggacgcccgttggtcgacgccgttcggcgtgggtcgccctggctggcacatcgaatgctccgccatgtcccaccgttacttgggcgatggcttcgacattcacggcggcggtttggatctgcgcttcccccaccacgaaaacgagatggcgcagacctgcgcggccggctacccctctgctgcgcgctggatgcattcggcatgggtgaccgccaagggcgagaagatgtcgaagtcgctgggcaccggcctgtccgtgccgagcgtgctggccgagcattccgcttgggtggtgcgttacgctttgggctccgtgcagtaccggtcgatgctcgaatggtccgatcaggcgctggtcgaggcgcaggccgcatacgaccgcgtctcgaacttcatcgaacgagccggtgtggcactgggcggtcagccttctcgcgaggaggttgctgccgtctccgccgacgatttgcccgccgatttcgtggccgccatgaatgacgacgtcaatgtgtctggtgcaaccgccgcgatcttcaccgccatccgttccggcaatacgttgctttcacagctggctgaccgcgccgattccgaaaccgccaaggccgaggtgcgtgaggcgctgctcgccgtgcgtgccatgctcgacaccttgggtctcgacccgctggccgagccgtgggtgtctgctggcggtgccgctgatggcacggccgagtcgcccgaacatgcggcgctggaggcactgattgccgagcagctcaacgcccgcgccgaggcccgcaaggccaaggacttcgccaaggccgaccagattcgcgacgccctgaccgaggccggcatcgccatcgaagacggcccgcagggctccacttggagcctgaagtagctgcttcaaacccatcaatcagtcaaacacgaagtccacgtccacgatgtgcaggcgcttggcgagctccttctccagcgagcgcttgcattcgatgaggtcagctacatcaatggtttcgccgatgccgctcagatacacgtcaacggtgtagttcatgccggtcttgaagatcagcgtctgctcgtagtcggtgttggcaggcagatggcgctgtgcctcggcctccacgtaggcgttggtctcatcgtcatcatgcacgccgccgaccaattccacgaacgcctctttgagcacgctgaacggctccttgatggtcaatgccaccaaagccacggtgatgaagaaatcgccggtgtagtgcaggaagtcaagcggaccgccggccggtagcagcatcaggaagatggcaaccacgccgatgccgaacgacatcgatccgtcgaccaacgtgctcttgcactcggcggtgagcatggtgctggaatcgccgatggagcggttggaacgccggtaatacgtgtataggctgaagcacacgattacggtcaggatctcgtagatgaccaccgggccggtttcaatgcgttcgccggacccgaacacgaagtagtcgtacgctactcggcacacgtcaatcagcgaatacaccaacaacgacatggtgaaaatggccttgcagatcgcgtagatgggttccagtgcgaacatgccattggggaagcgctcggtggttcgcaccgtgcgcgacgagagatacaccgccaccattccggacaggacggaaatcgcggtgaaggagaagtcgaggaacatggccttgaggccggtcatgaagaacacggccatgccggctaagacctgcagcacgttgatgacgataccaacgatcagggctttgcgttcgagtagtttttgggtgggcatcagtgggccttccttattgcacggcatgtctgcgttggcccggacgtcatggttcggagcgcacggcagtctgcgtataagcggtgtccagcgattttcaaaacagcgtaagcattccaaaaaacacaggattctttacggtttccatggtatcggaagcactcgattggcttcgccacgagcggacggcacggcatttgccgtctgaatgcccaacatccctgactactacgcgacgcattccccggaaagagtcgtccccaacaccgcaatttcccgcgtggcggctagactgttgcccattatggcagctttttcatctttgacagacagactctcgaatgcgttcaagcatctctagagcaagggcaagctttccgaggcggatatcgacggtacgatccgtgaaatccgccgcgcgctgctcgacgccgacgtggcgctcgacgtggtgcgttccttcaccggcaaggtgcgtgagcgtgcactgggcaccgaggtgtccgacgcgctcaaccccgcccaacaggtggtgaagatcgtcaacgaggagctcaccgacgtgctcggccaaggagtcgatcgtccgctgaacttcgcaaagaacccgccgacgatcatcatgctcgccggccttcagggtgccggtaagaccacgctggccggcaagctcggctactggctcaaggattccggccacacgccgctgctggtggcggccgatttgcagcgtccgaacgcggtgacgcagctgcaggtggtcggcgaacgcgccggcgtgcccgtctatgctcccgaaaagggcgtccaatccgatggcggcgaggccgtcgcagctccgggccagacctccggcgacccggtgaaggtggcccgcgattccatcgaactcgccaagcagaagctctacgacacggtgatcatcgataccgccggtcgtctgggcgtggacgaggagctgatgaagcaggctcgcgacattcgcgatgccgtgcaccccaacgaaatcctgttcgtcatcgacgcgatgatcggccaggacgccgtcaagaccgccaaggcctttgacgagggcgtggacttcaccggcgtggtgctctccaagctcgatggcgacgcccgcggtggtgccgcgctgtccgtggcgtccgtgaccggcaagccgatcctgttcgcctccaacggtgagggcctgaaggatttcgaggtcttccacccggaccgcatggcttcgcgcatcctcgacatgggcgacatcatgacgctcatcgagcaggcgcagaagcagttcgatgaggaagaggcccgcaaggccgccgagaaaatctccgaaggctccttcggcctggacgacttcctcgatcagctgcagcaggtacgcaagctgggctcgatgaagtcgctgctcggcatgattccgggcatggcccagcaccgcaaggaactcgagcagttcgatgagaaggaaatcgaccgcaccgaggcgatcattcgctcgatgaccccggccgagcgccgcgatccgtcgattatcaatggttcccgccgcgcccgtatcgcctatggttccggcgtgacggtttctcaggtgaacgctttgctgcagcgtttcgagcaggccgcgaagatgatgaagcgcatgtccaatcgtggcggcatgggcggcggcatccccggcttcggcggcccggctatgggcggcggcaagaagaagggcaagaacaagaagaaaggcggcaaatccggcaatccgatgaagcgcgaggccgaggagaaggcattgcgcgacaagctggccggcaaatcctccggttcgaccggcggttccgccttcgccaagaagccgcagaacccggccctgcccgccggccttgaacagatgatgggcaacgtcgatggtggcactgaactgccgccgaacctcggcggaggccttggcggactgttcggccgctgatctcacaacttggctcccctcgcagaggggagccaagttatatctcggttcaatttatatttcgaaaggaacttccatgacgacaatcttcagcgcggtggcaatcatcgcactgttatggacggccttaagcgcgctgcccgccggtctcgaggcccgtatgccgcttccgtacatgattgccctgactccgctgctgtgggttcctttgatgattctggccgcggtcgccgcatggcaacatgaatggactgcgatgtcgtcgcttattgtggtcgcgctgattgccagctcacagcgcatcaactactggggtacgtcaatcgacccagccggcaaacgcagagaatcccaccgtgaaacagcccgtgaaacaacttcgccgacgctgtcaaaaagccataacagcaatacatcgagcacctcaaacactccgaaggaaggacccgaaacagtccccgatgggcaccgtgaaacaacgcgtgaaacactctcgccccagttctcggttatgacgatgaattgtcgatacggacgcgccgacgccgctgaaatcattcgcaatattcgcgaacgcaatatcagcgtattggccttgcaggaagtcaccgacgacctcatcacacgtcttaccgaagccgacatcaacgaactcctcccctaccatcagttcggagacgccaaagagaccgataacggcggattcaacgtgatctattcccgctacgagccgagcgcagcggtgcccaacgtggtctccatccctgccgccgacgttcccgccatcaccctcaaaacctccggtactcgcacggtgacgctttgttcggctcacccgaaatcgccgatgcgcggctgcgcggattggtcggccggcattctgggtctgcgagaactcgcccgtgcaaaatccgtcagcaatcgcaacatcgtcgtcgttatgggcgatctcaactcgagcaccgaccacccgagcttccgcgcgttgctcaagtccggattcaaggacgcgagtctgattcaagccgccggaccgaacctcaccttcccgcgctggctcaagtggccgcgcatcgaactggaccatattctgttcacccaagggctcagaccgtccggcgtgacgtccttcgaagtgccggacaccgaccatctggctttggccgcaacgctcaccctgcggtagcgggcgcggcgatcgatcgggccttggccgtgtggcgcgaagcgggcgggaacgtctggaagacccccgcccgcagccgggtggttcgccgtcagaggtccatggagcggatcagattcaccatttcgatcgcgccctgcgcgcactcggaacccttgttccccgctttggtgccggcccgttcgatcgcctgttcgatggaatccgtcgtcagcacgccgaacagcaccggcacaccggtgtcgaggctggtctgcgcgattcccttcgagacctcgttgcacacgtaatcgtagtggctggtgctgccccgaatgaccgcgcccaggcagatgatcgcatcgtagcgcttgctcttggccatcttcgacgcgatcaggggtatctcaaaggcgcccggcacccaggccaccgctatgtcctgttcgcggacattctcccttttcagggtgtccagcgcccctgccagcagttttgaggtgatgaactcgttgaacctcgccacaacgatgcctatcgtgatgttttcggctaccagatcgccttcgaacgtgtgcatttattcctcctccatgttcaggatatgtcccatgcggtttttcttggttttgagatagaaactgtcgtaagcattggcttcgatttcgattggtattctgtcgcggatctccattccatagtcttccaattgatacactttgtcgggattgttggtcagcaggagcatggaccgtatccccaaatccctgagaatctgcgctccgatgtagtactccctcgcgtcaccggggaatcccaacgcgagattggcgtcgagcgtgtccatgccctcgtcctgcagacggtaggccttcagcttgttgaccagaccgatgccccgcccttcctgacgcatgtacagcagcacgcccgagccatgctccgcgatcgtccgcatcgccgcgtccaactgctgaccgcaatcgcaacgcaacgagccgaagacgtcaccggtcagacattccgaatgcacccggcacaacacatcggtcccatcgcccagattccccatgaccagcgcgacatgatgctcgccgttcaacctgttcacatagcagtgcgccgtgaattccccgtatcgcgtgggcatcgccacggtcgagacacattcgacgagcgtatcgtgcgctttcctgtattcctgcagttccttgatggtcaggagcgggatctgatgctcctgggcgaaccgggtcaggtcgggggtcctcatcatccggccatcgtcgtccatgatctcgcagcacaggccgcattcacgcaatcccgccaaccgcatgaggtcgacggtcgcctccgtgtgcccgttccgttccaggacgccgcccttcttcgccaccagggggaacatatgccccggtctgcggaaatcgaggggttccacgtcatcggagacgcacatgcgagccgtcaatccccgttcttcggcggagatgccggtcgtggtgccacggtaatcgatggacaccgtaaaagcggtttcatggttatcggtgttgtgctcgaccatgggcggaagcatcagcttgtgggccagttgctcgctcatgggcatgcagatcaatcccttggcgtgggttgccatgaaattgacgttccatgtggtggccgactgcgcggcacagatgagatccccctcgttctcccggtcctcgtcatcgatgaccagaacgagcttcccttcccgcagcgcctgcaacgccgcttgcaccgactgatggttcatgattcatacatcctttctcagaacccgcaccgggacagcagatcctgcgtcagtcccgtccgggtcgtcatcatgttccgcacgtattttcccaatacgtcgttttcgagattgaccacgccgccgacccgtttctcgcccagcaccgtctgcgccaaggtgtgcgggatgatcgataccgagaagtccctttccgtgatctccgcgaccgtcaggctgatgccgtcgacggcgattgagcctttctcgacgatgccttcgagtatctcgtttcgcgccgcgatccggtaccacacggcattgccttcgcgccgcacggaggatatgctgcccgtgccgtcgatgtgcccggtgacgatatggccaccgaaccttccgttcaccggcagggcccgttccaggttgacgccgttcccgcggcgcaatacgccaagcgaggttctgcgccacgtctcattcatcacgtcgacggtgaagcgtcgccggtcgaaatcgacgaccgtcagacagatgccgttcaccgccatgctgtcgccgatatggaggtcctccatcacgttcgtggcatcgaccgacagcgtgcagttggcggcgctcctccgtatgtccgccaccgttccgacttcctccactattcccgtgaacatgaatacaccacctcgctttccaccagataatcctctcccacccgggagcaggcgcggggccggagcatgacggcgtcggaaggcagggcgactccttggccgcccaccgggcttttcgcggtgccgccgaatatcttcggcgcgatgtacacgtgcgcctcatcgacgatccgctgttcgagggcgctccaattcatcgcgctaccgccttccagcagcacgctgtccatctgcatatcccccaggcgccgcaccacgtccgccagatcgacgtggtcgcccttccttccgacggcgagtatttcgcagccgtgccgccggtagtcctccgccttgcgttcgtcatcgcaggcggtggcgatataggtcctgacgtcattcgccgtctgcacgatccgcgaggtgaggggcgtcctcaatcgcgtatcgcagacgacgcgaaccgggttccttccgtgtgccatgcggcatgtcagcaacgggtcgtcctcgatcaccgtgttcacccccaccatgaccgccgcgacggatcgacggagctgatggacccgacgcctcgactcctcgccgctgatccaccgtgattgattggtatgggtcgctatcttcccgtccatcgtcatggcgtatttcatgatgacatacggcgtatgcgtggtgatgtatttgctgaacacccgtatcagatgccggcactcgtcggccagcacccccacatcgacccgtatgccgtggtcttcgagcatgcgcacgcccttgccggacaccacgggattgcagtccaaggttccgacgacgacccttgcgatgccgctttccacgatcgcctccgtgcatggcggcgttttgccgtaatggcagcacggctcaagcgtgacgtacaacgtcgccccggcgggcgactgcgtgcaatgccgcaacgcgttcctctcggcgtgcaatccgccgaacatctcgtgatatccctgcccgatgatccgatcgtccttgacgatcaccgcgccgaccatgggattggggttcacgtatccggcccctcgcttcgccagctcgatcgcgagtcccatgtactgcgcatcgtccatgtacgcctccaagcatgttgcgcccatacgctatccaaggcatacaaaagaaggttcatgcgaacacgaaaacgccctgaaatgatatggcatcatttcagggcgtacgacgaagcataaacgtactttcatcttctctcatccagactgtactgtcggctttggaatctcaccaaatcatgccttgcggctcgtgggctgtaccaccggtagggaatcgcaccctgccctgaagatagttattcgttttgcccgtgattgtactcgccgacgctccccctgtcaacggaagcggcctcccgcagcgcccgggccttctgcatcgtctcgtcgtactcgaagtcgaaatcggattccacggtgatgcctccgcccacgccgagcgacgtctcgcctccctcccgcacgatggtgcggatcacgacgttgaaatcgcaatcgcccgtatcggagaaatacccgatgctgcccgtgtacaatccccggggcgcgcgttcgagctcgtcgatgatctgcatggcgcgaaccttcggggcgccggtgatcgaaccggtggggaacgcggcgcgaaccgcgtccacggcgcaacgatccttgcgcagcgtcccctcgacggtcgcgacgagatggaatacggaaggatacgtctcgatggcaaagtcggggtccgtgccgacggaacccggttcgcagacgatcgacaggtcgttgcgttcgaggtccacgaccatcagcagttcgctgtggtccttctcgctgcgggcgagttcctcgcggttcgcccgatcctcgtccggtgtgccgccgcgcggccgggtccccttgatgggccgcgtcaccacatgccccgagcgaatctccatgaaccgttccatgctcgaacagcacacgtcgagacccggtgcgcgcagataggcggaaaacggggccgggttgtgggtgcgcagataacggtagatggcataggggctcccggatgtctccaggcgcaggcgctgcgccatgttgacgacgtaggcgtcgccggcgcgcagatgatcgacgagacgggccagggcgtcgccgtacccggcccgcgtgaaatcggaggagcatggggcgagcgaacgtcggcgcgcgggatgaggggcgggcgggcatgaatccaccaggtcctgcgcccatgtcagggcgtgggcggccgtcatcgtccgcccctggcagcaacagaacaacgaccgcgaccggacgtcctcgatgagcagcaggtcgtagaagaccatgctcgcctccggtgtggccgcgacgggatcgtgcctggtcggcacgccgcacgattcgcggccgaaatcgtatcccagatacccgatcgcgcctcccgtgaggggcagacgcggatcgcgcgcgccatcgcagggtccaagccgcttcttcacgacatcgaggaaatcaccctccacggcaacgccgtcgacgaggcatccgccccgcccgtgttcgatcacaagataggggaagagtcccaggatcgagtagcgcccctgcgcccccggcatcgaggagtccaggaacgcgaagcgttcctcgccgcgcacgcactccacgatgtcggcaagcggtcggaacgtcctgagcttgaatacctgcgcgctcaccgggactccttctcctgcgcccgggcccgcgcctgcgccaccatgcgggcgtaggcgtcgttcacgtcgcgcgacacgctccccggttcgaattccacgccgccgataccggccacgggcatggcacccatcagggagttggtgaggaacacctcgtcggcccgaagcagctcgtcgggcatgatcgggcgttcaacggcccccgtgaacccgatcacggcatggcgcatgaccccgggcagcagaccgcaggagacgggaggcgtcacgacgtctcccccgatgacggcgaagatattggagacggccccttcggcgacctcgccccgcgtattgaggaacaacggctcgtcgacggcgcggtcacgggcgcgacgcttctccatgatgttttcggcatacgccagcgtcttcatgcgcgcgagtggggaggattcgttcctgcgcacatcggcgaagtcgcagcggaagacgcgcttcgcccccggcgcggcatacgggttgcgtctcaacgagacgacgcggttgcgctcggtgaccgtgagcttgagggccgaatcgtccgatgcgccgagtccggcgcatgcgcggagcaccatcgtctccagatcggcgcgacgcgcctcgatgccgaggtatcgcaacgtctcacccaaacgcgtcagatggtcgtccaacaacaagggcgcgccgccggataccgcgatggtctcgaaggcccccatgccgaagaagaatccgtcatccgcatccacacgcgcccgggcaccggggccgatcacgcactcacccatcgatcagcgccccctttcccgtctcgcactgccatcaatcaggctatcattgacttcctcccctcggctgaagccgggggattcctgtcgcgtatgagacacgttcctcactcattggaggggtcttcccgtacgcgtggcaggggttggcgtttcaacggaaccttcccgtgaaacacgggtttcacgggaagcgtgtccctccacgccctcggcatcgtccatgccggttgtgtgtatcgcgcggccgaggatgttcttggccgcgttgatgtccgcattgtccttgttgccgcagttgacgcagtggaagaccgcttggctctcgcggttctcctttgcgacatggccgcaacggttgcaggtctgggacgtgtacgccgggttgaccagtatgagccgggttccggcgagacgggtcttgtattcgagtttgttctggatgtccgtccaacggttgccgaggatgctgcggttcaatcccgctttggacgccgaaccgttgcgcaggtagcgtcccctatggttggggtcctgtttcggtttcggcttgcgggtcatctgccgggtgttcaacgcttccaaggcaatgaggtcgtagtcttcgaccagtcgggtcgtgatcttcgcgacccaatcgtccttgcggttgttgacgcgacggcgtatcgaactcatgcgcttcaatgtgagtttgcgtcgtttcgactggaatttcgcggttttcccaccacgttggccgttggtcatgtcttgtcgggcgagcttgcgttgcaggcgcagatactcgcgcttctcccgttcggacggttgcggcatgtccagcatggttccattcgacaaggccaatgtgtggacgcagccacggtcgatgccggtctgcttgccagtggcattccgtcggatgggcgacggttcgttggtgaacgccagagtgcgttccgtccaattcaccgccacgctcgtgtaatccctgacgggttggctgacgcgcacgtggatggagagcatccaacggcatcccgtttcgcccggcttgcggaattcctttttcacgcttccggtgattacgaccacgccacgcttgcgtgacacctgatggtagacggcgttgccggtcttgttctggttgcgccagcatacgaaatactggggggtgcgtttgcgggatttgaaccccggaacacgaccgccattaatcttcttgcgcttcaacgcggcataccattccgaattctccacgcgcatggggctggcgaggacggcggaggggatgcatgcgagccaagaacaccggattcgagcctcgctgtccttgaacggctccccgacggtcgctccacccaagggaacgtccacccacatgcgctcacgggattccacgtcctccatgtagcggcggattgtccgatgctcccgatgctggttgaaacgggtgcgccaaccatcgcacagccagtccatgatacgttcgggattgcgcgtccaacgatggttgcggcatgaatcgtcgccaaggtacacggacgcgcccgcatgcttgactttgatgattcgtaccttctggctcatgctataaaccttgccacggaaacagtgattaatcaaagaagtggcggctcaccccagtcttaaaagacggggcttgcgccgccaaaccggtcatgaagacggcaggcgcgccgccgacacgccgtccgtccggcgattccgtgcgtcacgaccggaccgatgcgcaatatccggcttccgcgttacactagtacggttattcgcgcgcgcgtggcgccctctacaccccgagccgcgaggacacgtggattccggccggccatgccccacatggcaaaccgagaacccgcacacctagcattacaaggagagccattttggcaaccaagattcgtctgaagcgacagggcaagaagttctacgccttctaccgtgtggtggtcgtcgattcccgcaagaagcgtgacggcaaggtcatcgaggagatcggtacctacaaccccaacacccagccctcgaccatccagatcaagtctgaccgcgctcagtactggctcggcgtcggcgctcagccgtccgagcccgtcttcaagctgctgaacatcaccggcgactggcagaagtacaagggccttgaaggtgccgaaggcaccctgaagaccgttgaggctggcccggacgccgaggcccgcatcgcggccgttgagaaccaggctcagaagctgaaggccgccaaggccgaagctgccgccaaggccaaggctgaagccgaagccgctgccgccgctgaggaagccccggctgaagaggccgccgaagaagctccggccgaggcctgagcggaaacgaaaggctagctatgcttgcacaggctgtggaacacctcatcaagaacatcgttgattttcccgacgatgtttccgtcaagtcccatgagaacgcgcgcggcgaactgcttcgtgtacgcgtgaacccggaagacatcggccgtgtgatcggccgtggcggccgcaccgccaacgcgattcgcaccgtgatccaggcactgtctgatcacaaggtccgcgttgacatcatggacgtccgtcgataaccgataaggaacgattcacagcatggcacagcaagacatgcacgacgaccctcagcagctcgagttgctgagggtcgctcgtattggccgcgcacagggcctgaagggcgaagtcaccgtgcgcctgtacaccgatgatcccgagtggcgcttcgagccggactccgtgctctacagccaggatggcgagaccgagtacatcgtcgagggctcgcgcacgttcaaggatcgttggattctcaagcttgagggcgtcgacgaccgcaatgccgccgaggccctaaacggtgtcgaactctacggcgaggccgacgacgcagaagatatgctcgaagccgacgaatggtatcccaaggatcttattggccttgaggcccgtctagtcgagggcaacggtctgggactgcccgccggccaagtggtcggcaaagtggtggatgtggtcgactcccccgctcagtccctgctcaagattcgtttgaccgagccggtggtaaccggccagaattccaagggcgaggatgtggtcgaaaagaccgcattggtcccgttcgtggaggccttggtccccgacatcgatctggaggagcaatacctcacgctcgatccgcccggcggtctgattcccgggctgtaaacagtctttcaaaccaataccgagttccacactcaatttattccatcgcaaagggcggtctttctgagattagtctcagaaagaccgccctttgattgctccttaacgtttataccgcgtaagatggctgagcctcacagataaccaaataggatgccgaagcgatcaagacccgtaccgatcagctggtatccgttgcgctaaaactactgcgactgcaataaactataaaaaatgtgcgatgcttacacatttatgatatgataaatgtgtaagcatcgcacatttatcataggatattcgtcatgaggctccagcgaaaagcactgaaaacgctcaagcagtggaagaccacacctgaccataagcctctcctgatccgtggcgcacggcagacaggcaagacatggcttgtcaacgagttcgcgaatggacaatacgacaacatcgtctcggttgatttcatgcagcggccatccctatccgggatattcgagcaggatcttgacccgcaacgaataatccgtcagctcgaactcgccgccaatcaacggatactccccggcagaacactgctcttctttgacgagatacaggaaagtccgctcgcgttgacctctctcaaatacttcaccgagcaggcacctgactatgacatcatcgccaccggctcctacatgggaatatccaagcacggcaaaacctcttttcctgtaggaaaagtcaccatgatgaacctacatccgctctccttcgccgagtatctggacagcatcggacaagacatgatcgccgacaccatacgtgaaggccggttcgaggacattccacaagctctcgaacctcagatgaatgacctactcaaaacatatatgtgggtcggcggcatgccagcagcattaagcgctcacctggataacgggattccgcaggatgtgcgaactgtccaacaagatattctcaacgcctacgatcttgatttttccaagcatgccgcatatacgctgggcgagcgtatccggcttgtatggaacacactgccatcacaactcgccaaggagaaccgcaaattcgtttacggtgttgtcaggcaaggagcccgcgcccgcgaatatgaggaagcgctcacttggctgacggactacgggatcattaccaaagtcccccgcctcgatgctctgcatattcctctgcccggatatgagagtcttaacacgttcaagatctatctggaagacacgggcatactgggcgcactgtccggtctcgacgtgaatactctggtgaacaagtcgaagctcttttccgaattcaagggcgcgttcgtagaacaatacgtatgtcagcagctggtagctcaaggaatcagaccccgctattgggctaacccaaatcctcaaggaaatgcggaaatagatttcgtaatggaacagggagacgaggtttttcccatcgaagtgaagtcctcttccaatattcgtgcgagaagtctctcgtatgtctgcaacagatacgggctccacggtatccgtataggagaaataggctataggaagcaatcttggctgacgaacatcccactttggtgcgtggatgggctgggcgaatatctcaaacgtcagatcgaaaagagcagggaaaatccagcgaccatctgattctttttctgttttttcgggtatgtgaaataggtggttgagttttggtgattctcatacatcaattcggacgaggatgccatcgcatatctcaatggcgcactcgaagaggatgatcccgcatttgtgcaagatgcgttcggtgtggtcgcacgcgcacgaggcatgaccaatgtggcccgaaaatccggcctcggccgcgaatccttatataaggcgcttcgcccgaattcgcagccctcgttcaacaccatcatgcgagtcgcagacgcacttgacgcagaaccctattccctgccgaagcgtaatcgttcacccgcgcgcggcggcggtgacgcgggtcatgaaacggtcgaggaattccggcacgttgacgcccaatgcgacttgggtgtgtttgtcggggtcctggagccgtgaacgatcaccaatggtgcggccacggaacgggccctcgagatcgacctgtaagttgaagccgaacgtggtgaccaatgatgggtcgagcgcggcggccacggccagcgggtcgtgcagtccacatccgcgaatctccggctggttcttcaggtagaagtcgatgtagtagtcggtcatggtgacgaggaagtcgccggccggcgtccccagagacgcccattcatgggctttctcacgggtgagcgcggtctggtgggtcacgtcgaggccgatcatggtggtgcgtgcgccacacttgaacaggtaatcagcggcctctgggtcttgggagatgttcgcttcggcggccgggcttacattgccgggcagcgtcaacgcaccgcccatcaacgtcacgttcacgccggaatccttcaggtccggagcgttgcggaatacggtggccatggtggtcatcgcgcccgtaggtacgatggtcaggtccgggccgtattcgcgcgcggcggcgatgatgaaatcgaccgccgagcctggtgcttccggagcgcgcggggagtcggggatgattgcgccgccgatgccgttgggatggtggaccgccaccgagccgggagttggtgcccacgaagcgtccgtttgccagccgtccgcgccgccgttctgccagcgcgcgtaggcctgggtccgctcgtctggtgtggtgccacgcattttcggcaatgttgccggggcgatgggatggtcgactccgggatagaccggaacgtcgtcacggccgaacaagtgcaccaccgccagcgcgttgcgcgcggccagcggcaccgcgacattgccgtaggtggccgtgataccgatcagatcgatctcgtcggcactgcctagggcatatgcgatggcgagcgcgtcatcgatgccggtatcgaggtcgaggatgagttttttgcgcatggcggttccttcaagacgaatcaatcctcccgaatttgtgacgttaagccaacgtcagcggcacaaattcgggaggatggggaatgggcaatcagccgagcttggcgagctcttcgggggtgagttcgagctggtcggccttgagggagtcaaggatggtctcggggtggtgggcgccgggaatcacgaacatgtggtcgcccttggcgagctcccatgccagcacgacctgctggtagctcacgccgtgggccgccgcgacctcgcggaacgggtcgaacttggtctcatcatagggatgacggtagccgccgagcgggctccagcacacgaaggccagaccgaccttggcgcagtagtcgagcgtgtcctgggtctccaggtgaatcggcgagtactggttctgcacggccacgagcttgtcgcccagaatgccgcgcgcaatgtcgatttgctcgatggaggcgttggagataccggcctcctgcgccacgccctcgtccaccagctgcttgatggcttcgacggactcgttgtacggcaccttcgggtccgggcggtggaagtacagcaggtcaatggtgtccacgccgagcgccagtgcgctctccttgccgcgccgaatcaggttctccgggcgaccgtccacatcccacgtggggcggccgtcggtgaagttgcggaagtggcccaccttggtggccaccagcacctcgtccttcggccccttccaggtctcaagggcctcgcgcaccagcttttcaccggtctgctcctcgccgccggagcagtagtaggcccaagcggtgtcgatgtggcggcagccggcgtccagcgaggcatgcagggtttcgatgccgacctcatggccgcggttgttttcgatggtcagcggcatttcgccgtggccgatggcggtggtggagaacggtccgaggttacggaacaatgccatggtgattcccttcgtgaaacttatggaaactcgatatccacaatcaagcctaagcatcccgttggatttcacactctcggcctgcccgcacaatcaatctatgaaatttccgcaacttcacggaatagaaaacgcaacttactcatacccagttcagtgaaaacgaggggccggaaccccatggattccggctgttccgctgatagatcagtggcctcgtctgagactcattcccagcaataccagtgcggcaatgatgatggccgtcgaccgcccctgtccaacttgattggccagggcgatcaacaggccggtcatcagaccttcccggtattgccggtcttgtctcggacggttgtcatggttgttgcctaccatgagaacctcctcttgaattttgagacgtcattatgccggttgacacaacgacaccgcgccaaagtggcacgctagtagaccttggtttggtcagtccagtgtactgatgagcttcggtggaggctggtatgctgtgttgtagcagaaaggtcacgctagcttcgaggcaatcttctcggcggcgccacagactttcgccccgttggacctgactgttgaggtctcctcacctcgattttgagagaaaggcccgatgtcttatgacaccgggccttttactttcaaagctatagggactttcagaagcacatcgcttaccgcccaccgaacgaaccgccgccggaaccgccgctgctaccgccaaagccgcctgagccaccggatggcgaggccacattgattgtcgcggtgatatccgcaaatccgtacgacaattgcgtgccgaggtcagagaacccagccgcgaacgacgtgcccccgaacgctggcaccgctccggccaatccgctgtcagccacggaatccgcgaacgccgagccattgtagaaacgcaacccataccagtcgtacggacgataattccaatagaacaccgtgtcggaggcattggcatcaagccattccggatcggatacttgcggataggccatggccagctcccgcatcacccggtcggatatgccaaatgcggcagcgtagaccatataccaatcccacagcgtcgaatccgcgactccacggtacttgaagttcgagaagccttgcatatatcgtttgagacccaagcattgcccggccatctgctgaccatgatcggtcagcacgtaggaattccccatcaggaagcagaatatgccgaccgtcatcaggggaatgccgatgagggccccggccaccagatatccggccaaaccgttgatgaatatgctgacgccaccgatcagcacggtgattgccccgggaatgagccatccgttctcggttttcggcgcgatatccgccgtcgcgaattcggtcttgcacgcattggtgaacttttcgagttccttgtagccatctttccaatccttgcaggcgtctttgatgtcatccatgtcaaatgccgtacgacctacgcgctcggaaatcacggtgagcagatagagcaatgcccgctcagaagcactgagatcgggctggtgtgcatcggacacgctagatgcggcagatccagatccgccagatccagatccatcaaatacggattcgacgaatactgattcatcaaatccctcagatacgccgtaatcggactgccacagcatcacaatcgtgctattggtacgcgcattattgcgcttgtatggatcggacccgattcgctgactgagctccaccggagaaacttgtttcagatccacgccgatatacaggtccgccgaaccggggaacacagcaatgactttcttcacggccagagaaagcaaggtcgcgacgagttggcgctcggaaatgtcgggtttgtcgccggaagtcacgatatcgatgagtttggccgccgatgcggggctcagctcggggcgatcgcgccaatattcgatggagccacggtaacgtgaacgtccggaggagcgtaaggctgcaacaacaccaataatcccgaatatcaggccggccgatatggtggtcatccagttgttcaggcgccttgtggcgcgttggcgttccagattgcgccagaaccgttcgtcgtcggcttcgtcttccttcaactcctgcagatgatcgtcggtctcgacacgagccatatctcccgccttggccgcgtcgaaagcggccaccacgtctaggtactcgccgcttttcacatcatttacggtgaaggtgaagctgccatccttggttcggccggtttccgaggtttgttcagtgtgcagccaagtccacgagttgctcgcggtcacccctttggggaaatgcaccgtgccggtgaccgtaccaatcggcacctgattgttctcaccgaatggctcccattggaaggtcgccacgtccttccacttggtggccacgtcatgcatggtgaagctcaccgtgaacttgatgctgttggtttttacggtggtgggaatattccagccgatctccacggtttggtcttgccatcgtcatccttgcgtttgcgcaacttgatatcgatatgctccgtgctttaagatcgccgtcggcggtggcggtcacatcgtaatcaagcgtgcggtagctcaggtcggcaccatctgtgccgagaatcaaggcaccggcacagagtgcggcaagaatcagcgcaccgacaaggcttaagcccagggcacgaacaatgcgtttcgacataggcatgcgctaccgcccgccgaacgagccgccacctgagccaccgaacgagccgccgaaaccggagccgccgcccgaaccgaagctggagaaatcgccaccggaatcggcggatggtgctgccgcgctgatggtcgagctgatgtccgccagaccggagttcagctgcgagccgaggtcggagaatccgccggcaaacgacgtgcctccgtaagccggagctgggccgccaacgcctaggtccatctgcccggcagcatcgtggtcgaatggaccattatgacggtggctgtaccagccatacgggcggtagttccagtagaacaacgagttggaggcgttggcatccagccaagccgggtcgttgacctgaggatatgctttggccagttcacgcatcacgcgatcggaaatgccaaacgcggcggcgtagaccatataccaatcccacaaggccaaatcggcggtaccccggtcggtgaagttggagaagtcttccatataacgcttaaggcccagagtccggccggcgatatcctgcccttgatcagtgagcacggtcatcgcgccggccatcgagcagaacagtccgaccaggaatatcggcagcccgataagaccagccaccgggtatccgataaagctgttggccagcagcgaaccaaatcccagcacggcggccaatacgccgggtaggatccattgccagcccacagagcgcgtggcacccagccgctggtattccatgctgcatgcaccggtgaatttgccgagctcaatatagccgtcttgccagttctggcaggtcgccttcatctggttcaggtcgaataccgggctgcccacgcgctgagaaatgacgatgagcaggttcagcagcgcatcttccgattcgctcaatcccaactgttgcgcgttgggtgcctcatcaatggcgagcggcagaatcacgatggtgctggtgatgcctgccgcatactgcttgccttggtcggcggcaatcatttggctcaagcccaccggcgtggcctggctcatgtcgatgccgcgatacatgtccgacggccccggataaatggcgatggtcttcttgacggcgagcgacagcatggtggcggtcagctggcggtcttcatcggattggcgcgtcgacggatcgaccacgcgaatcagacgggctgcggaagccggactgatgccgggctggtcgcgccagtattcgacgctgccactgtattgcgcacgccggttgctggagatcacagcccagataccccacgcgcacaacgcgatgccgagcacgatgctgacaatccagaacacgagacgagctctggcagcgaatcgttgcttgtcgagccagcgctgctgttgcttatattcgtcctgtttcaggtccgtgagatgattgccggttcccttgcgggcgatgcccttggctttggcggcatcgaacgccgcgaccacatcgaggtagtcgccattgtggatgttgtaggccgtgaacgtgtagctgccgtcgctgttgcgcttggtttccgaggtgcgctcggtgtgcagccatgtccatgaggttttgccggtgatgccgttggggaaatggacggtgccggtgaccgtgccgataggcacttggttcttcttgccgaacggctcccattggaaggaggccacgtctttccatttggtggccacatcgtgcatggtgaagctcacgtcgaacttcatactgtcggcctcggtggtgaccggaatattccagccgatctccacggttgtgtcatcttcggtggcggaggcgctgggcttgaggccatcggtaccgggcgtgtatgcctttggatggtcgctgccatcgctcacatcggcgacataccaatggttggcgtagtcgctgttccattccttgtcggaagagacgtcactgggcagcttgggctcgctctgttgtgcgtagtcgatgccgtcggtgacgttgcgcacgctgatatcgctgatatcagtcaaggtgccggagttcagcgtgtattgctggaacagctgcttccacggcttggtgttgtcgtcactgtcggtacgctcacgcatcttgacgtcgatatgctgcgtgaccttcaaatcaccgttcgcggtggcggtcacgtcatagtccagcgtgcggtagctgaggtcggccgaatcgccgaacgcggaagtcccgattatcgccaaggtgataactgccaacaccaccgtggcaacaatgctgatgattccggcgcgaatgaatcgtatccgcatatcttccctcttttaagacaatacgggcccggccggcggcttaccggacgggcctgaagcgggtcagaactggacctgtggcacctgacgggaagcgtcatcggcctcgaagtattgcgcctgctcaaagtggaacagaccggcgatgatgttcgtcggcacggtttcgatggcggtgttgagcttcaggaccacgtcgttgtagaactgacgggcgtaggcgatcttgttctccagttccttgagctggttctgcagatccatgaagttctggttggcttgcagctgcggatatgcctcagccgtggcttgcaggttgaacagggcgcgggacagctggttttcggcggcggcgcgctgagcagtggtcgtgctcgggttgctggccgcagccactacgccggcgcgggcggcggtcacctgagtgaagacttcagactcgtgggatgcgtaccctttgacggtattcaccaggttcgggatgaggtcggcgcgctgcttcaactgcacgtcgatttgcgcccaaccgttcttcacacggttcttcagcgtcaccaggttgttataggcgctgacgccccaaccaatcaagacaacgataataacgacaacgac

SEQ ID NO: 3365 - DNA, 7797 bp, Unknown
  R151_18m  MAG No. k141_23357
cgaacggaccacggcggtcttgtcgtttggcgccatatcccgtgtttgccgcgttcgtcggcggcgaaagttgccgttatgttaacagacgtcagatgtcttattgcagaatggtaaacaaacattttcggaacgataacggtcggcgaagcccgaaatattgccgatattcaaggctggtgaagtataggcagatcagcgcggaggggccttgacgagtgaattcctcaacacgccgatttgaaatcagacatcagacgtcttaccattaaggaggttcgacaacgatgttggtggttccccgcaggagtcccgcacaaaccgcaatggtccgccgtaacgcggaaaggccgaagcggacgcaggccggggaacggtcaatgaagcaattaggaaaggatcgcgtcgtctgtcggacggtgattcgaaattcactcaatgatgaggagatcgcatgatcaagagaaacggaaagttcaaggccgccgtggccgcggccgtcgccagcctgatgctgctgtccggatgcggtggcggcacccagaccgccgcgaagaccggaactgccgtggcggacaccattaccgcccaggttgcctatgcgagccgcgacttcagcccgtccaccacctccggcgccctgccgatggccgcgaactggcacgtcaccgaaccgctgtacgcgctggactacagcacctacaagccctatgccgctcttgccaagggcgatccggagaaggtctccgacaccgagtacgtggtcaccctgcgcgacggcgccaagttctccgacggtaccgccgtcaccgccaatgacgtggtcagctcctaccagcgcaccaccgccaccggctcgctgtacatttcgatgcttgacttcatcgattccgtcgaggcgaagtccgacacccaagtgacgttcaagctcaagaaggcgttcccgctcttcaagcagcgactggcgttgatccagatagtcccgtcgtccatgagcgatgccgacctgaagaacaagcccatcggctccggcccgtggaagtacgccgagatcaccgaccagcaggtcaaattcgagaggaacgacctgtacaacggctcctacccggcccaggccaagaacatggtgtggaacgtgaccgtggacgacaccgcccgcgtcaccgccatgcagggcggcaagaccgacatcatggaaatggtcccggcccaggcgctccagaccctccagtcgtccggctccgagctgaagaccgcgcagggcttcaacctgccgttcctgatgttcaacaccaagaagaagccgttcgacgacaagcgcgtgcgccaggccgtgttctacgcgatcgacgtggacaagctgatctccaaccagatgagcggccaggccgaagcggccacgagcttcctgcccaaggattcgcagtactaccaccaggcgaagaacgtctacaccaaggacacggccaaggccaaggaactgctcgccgaagccggggtcaccacgccgatcagcttcacgctgtacaccaccgaccattcctggatcacccagctcgcaccgcagatcaagaacgatttggccgagatcggcatgaacgtcgacatccagtcgatgaagtcctccgcgctgtacccgtccatcacggacaaggacgacgctgactactcgatggtcctcgcccccggcgatccctctgtgttcggcaacgaccccgacctgctgatgaactggtggtacggcgacaacgcctggaccaagcagcgctccttctggaagggctctgacggctacaaccagctacatgagctgatggacaaggccactgccgcttcttccgattccgaacgacaggagtactggaaccagtgcttcgacctgctctccgaagagctgccgctctacccgctgttccatcgcaagacaaccacggccgtcaggaagggcgcgttctcctcttgggaggccattggctccaccggcatcaacctggtcaaggccaagctgaactgacgcaatccacatatgccatcaccggctgaaccgaacggacggcaaggcaaccggggcgtcctgcgaacgtgcggatgccccggccccgcccgcggcgcatctgaaccgccgatggcgcacgcataggagcttttacagtgagcaatctgttacgactgttgggcaggcgtctgatcgccttgccgttcatggcactcggggtcacctttttggtgttcttcctgatgtccttctcccagtacgatcccgccgtcgcggcgcttggcgagaactccacccccgaggcgctggccgccttccgccacgagatggggtatgacctgccgtggtggcagcagttcttcaactacatcgtcggcttgttccacggcgacatgggcgtgtacggcgtcaacaaggattccgtcgcggcccgcgtggcccaggcgttccccgtcacactgcagctgaccttcatcggcctgatcatcgccatcgtgttcgccatcgtgttcggcgtgctcgccgccctgtaccgcgacacctgggtcgaccagatcatccgcgtggtttcgatcatcgccatcgccaccccgtccttctggctcggtgtgctgctgatctacgtgctgcagatcaagatggcgtggctccccggctccggcgacctcgtcccgttcacgcaggaccccggcgcgtacctggcccgcatggccatgccgtccttcgccctcggcctgcccgtggccggccagctgacccgcatcatccgcacctcgatggtcgaggagctcgacaaggactacgtgcgcaccgccatcggcgcgggcgtgcccaagagcgtggtcgtctcgcgcaacgtgttccgcaacgcgctgatcaccccagtcaccaccctcggcatgaagatcggctacctgatgggcggcgcgatcgtcatcgaggtcatcttcgccctgcccggcatgggcaccgcgatgttcgacggcatcaacggcaaccagccgatgctcgtccagggcgtggtgctcgtcgtggccctcgcgttcatcatcatcaacatcatcgttgatctgctctatgtgctgatcaacccgcgaatcaggacggtgtgacgatgctattcggcaagaacaaggcggccgaggccgcaagcaggcccggcgtcaaattcaatcgcttcagcaagatgaccgtgggaagcaagatctccttcgtggtgatcgcgctgctcatcgtctgcgccgtcttcgcacccgtcctttccccgcacgatccgctcgagatcacgatgagctaccaggcgcccaccggcgaacactggttcggcaccgacaatctcggtcgcgacgtgctctcccgcgtgctctacggtgcccgctactcgctggtcatcggcctgagctcgatcgtcttcgcgctcatcgtcggctcactgatcggcgcgcttgccgccgtgacccgcacgtggatctccgagctcatcatgcgcgtcatcgacgtgttcatgtccgtgcccggcatcgcgctcgccgccgtgttcgtctcgatcctcggccagtcgatggtcggcatcatcatctcgatcggcgtgctctacgtgccgcagatcgcccgcatcgtcagggcgaacatcatcagcgagtacggcaaggactacgtgcgcgcggtcattgtctccggcgcccgcgccccgtggatcctcttcaagcacgtcacccgcaacatcgccgccccggtcatggtgttcaccaccctgtccgtcgccgacgcgatcgtgttcgaggcgtcgctgtccttcatcaacgcgggcattcccgagcccaccccgacctggggtaacatcctgtcctccgccaaggccggcgtgatcttcggctactggtggcaggccatgttcccgggtctggcgatcatgatcaccgtgctgtgcctcaacatcctgtccgagggcatcaccgacgccatggtggccgccccgacggccccggtgaccaagtccgccgccgacgccgaggccgagcgcagggaggatcgcctcctgaccgacccagtcgccgcctacagggagcaggccgaatccctggccgattccctcgccgcactcaaggaggccgaacttaagcgcaccgaccggttcgagccgacgagcacggccgccccggtcatcgaggtcaaggatttgtgcatcaagttcccgcgccacggcgacgtgaacgtggtggaccacgtgagcttctctgtgcgtcccggcgagaccatgggcctcgtgggcgagtccggctgcggcaagtcgatcacctcgctggccatcatgggcctgctggacccgaaggccgagatcagcggcgagatcctgttcgacggcaagaacctcgtcggcatggatcccaaggagcacaacgccctgcgcggccacgagatcgccatggtctaccaggacgccctctcctcgctcaacccctcgatgctgatcaagtcgcagatgaagcagctcacctcccgcggcggcacccgctccgccgaggaactgctcgagctcgtgggcctcgatcccaagcgcacgctggaatcctacccgcacgagctctccggcggccagcgccagcgcgtgctcatcgccatggccctgacccgcgaccccaagctcatcatcgccgacgaaccgaccaccgcgctcgacgtcacggtgcagaagcaggtcatcgacctgctcaacgaactgcgcgaaaagctcggcttcgcgatgatcttcgtctcgcacgatctcgccctcgtggccaaggtggcgcattccatcaccgtgatgtacgccggccaggtggtcgagcagggcttcaccaaggagatcctcaccgatccccgccacgagtacacccgcggcctgctcggctcggtcacctcgatcgaggcaggggccaagcgcctgcaccaggtgcccggaaccgtgccgtccccggccgacttccccaagggcgatcgcttcgctccccgctccagccacccggacgttggcctcaacacgcgcccgatcttcgaacgggtgcccggcacgcatcactattacgccgccctgccggccgatgccgacgtcacgcccgccgcggcgacagtttccacccaggaaggaggtgcccgatgagccacgccgccgaaacccccaggaaggatcccaacgttccgatcatcgagctcagggacgtcgaggtggtgttcaccacccgcgccggatcggggctgttccacaagaacaggatcaccgcggtcaacaaggtgaacctgaagctcatgcccggccagaccatcggcatcgtcggcgagtccggctgcggcaagtccaccacggccaacgtgatgtgcggcctgcagcaggccaccagcggcaaggtgctgttcaagggccaggacgtcacccaccgcaccgccaaggagcgcatggacatcggccgcgtggtctccgtggtcttccaggacccggcgactgcgctgaacgcccgcatgagcgtcatcgaccagctgctcgacccgctggtggtccacaagctcggttccaaggaggagcgcgacaggcgcgcccacgagctgatccgcatggtcggcctgcccacctcggtgctgggcgccctgcccgggcagctgtccggcgggcagcgccagcgtgtcgccatcgcccgcgccctgtcgctcaagccggacgcgatcatcgccgacgagcccacctccgcgctggacgtctcggtgcgcgcacagatcctcaacctgctctcggacctcaagaggacgctcggcctgtcgatggtgttcatcagccacgacatccaaaccgtccgctacatctccgacgaggtgatggtcatgaaccacggcaccgtcgtggaacgcggcaagacgatggacgtgatgcgcaacccgcaggacgggtacaccaggatcctcatggacgcggcgccctcgctgctgcatcccaccgcggccgaatgcgcgtgaggccttcctcgcgttgaaatcgcgttcgcccgattccaacgccgaataatttcagcagtccatttttaatcctcaaagacaatcctcaaagaagggacacatcatcatggcaacccaattccgcggggtcattccccccgtcgtcaccccgctcaccgcttccggtgaagtggacaaggccagcttcgcccgctcgatcaaccgcatgatcgacgccggcgtcgacggcctgttcacgctcggctcgtccggcgaggtggcgttcagcaccgatgcgcgtcgccgcgagatcatccagaccgtgattcaggtcgtggacggccgcgtgccggtgttcgtcggctgcatcgacaccgaaaccaaccgcgtgatcgagcatgcgaaggaggccaaggagctcggcgcgtccgccatcgtggccacgtgcccgttctatgccctgggcggcatggccgaggtggagcgccacttccgcctgattcacgccgccgtgccggacctgccgctgttcgcctacgacatcccggtgtgcgtgcataccaagctgccgggcgacctgctggtcaagctgggcagggacggcgtgctcgcaggcgtcaaggactcctcgaacgacgacgtggccttccgcttcctcgtggacgacaacgccaaggccggccatccgctcacgctgctgacgggccaggaggttgtggtcgacggtgcctacatggccggcgccgacggctccgtgccgggcctggccaacgtggaggccaccggctacgtacgcatgtggaaggccgccgaagccggcgactggaccacggtcaggaaggagcaggactggctggccgcgctgatgcgcatcgtcaccgtgccgcagggcgtggcgggcttcggatccggagtgggcgccttcaagaccgcaatggcgctgctgggcgtgttcgacaccaaccagatgcctgatccggtgctgccgctcaagggcgagaatgtgaaacgcatcgccaccgtgctcgaggagtgcggcatgaagctggaacgcacccccgaagaggtttccgcctccactgaggcctgattgccgcacaaccatatgcgttgcgcgaatgcccgcccgcatgcaagcgcgtggcggcgttcgtgcggcgcaacgccaataggctcatacgaaaggaattgccatggctgaagtgatcatcgtcaaatccgagcaggaggccggcgaactgtatggccgttgcgtggccgatctgatcaaggccaagccggacgcggtgctgggactggccacgggctcgagcccgctggcggcgtaccgggcgctcgcgacaatcgtcagggacgagggaatcgacgtatccagggtgcgcggtttcgcgctcgacgagtacattggcctgccgctgacgcaccccgagtcgtaccatgcgaccatccaccgcacggtggtcgagccgctgggactggacccggccaaggtgcacgtgccgggcgacgcgctgaacggcaccgcgctggaggacggcgacaaggtcgccggcgccggtgcggcatatgacgcggcgatcgaggccgcgggcggcatcgacgtacagattctgggcatcggtaccgacgggcacgtgggcttcaacgagcccggatcgtcgcttgcctcgggcactcgcgtcaagacgctgaccgagcggacccgcatcgacaacgcgcgcttcttcgacaacgacatcaaccaggtgcccacgcactgcatcacgcagggcatcggcacgatcatgaaggcccgccacctcgtgctgctcgcgttcggcgcgggcaaggccgaggcg

SEQ ID NO: 3366 - DNA, 12892 bp, Unknown
  R151_18m  MAG No. k141_23394
cgtatatctcaggcttccgcggaatcctacggtggatttcgcggaagtttttttacggtgattacagttgccggctcagctcagcagcgccgcgatgatcgcgataaacaccgggctggtcatggtgctcatcagaatgccgtcgcgcgcgaaggtgaggcccacgttgtagcgggccgcgtagttgtacacgttctggccggtgggcagagcggcgagtaccacgcaggcgtacagctcggagccgcggaagcccatcacgaaataggcgagcaggaacgcgatgattggcatgatgatgttcttgaggaccgcgaccgtgaagatggccgggcgatcgcccttctgctgcagcggcttggtgccgtgtagggacatgccgaacgccatcaggatcattggcaccgctgaatcgccgatcatgtcgatcgggtcgaaaatgaatttcggcactgggaaccagccgcttttagcggaaatcgcagagaccacaatgcccagcagcgaaccgataagcagcggttgatgcagtggctgcttggcgatttccttgatggagaccttgcccttggtggtcacgtccagcactgtcaggcccaccggtgtgaagatggcctgctgcatgaccagaatcggtgccaccagagccggattgcccagaatgtaggtggcgattggcaggccgatgttattggaattgaggtacagcgaattcagggcgccgatggtggcgtccggggcgttcaggtggaagaacatgcggttgagcaccaggaacaccacgcctaccagcacggcggagaagaacgccacgataatcgagggatggaagatgtcgaagatcggttccttggagaggatggcgaacatcaggcacgggctcgatacgaagaaggagaaccggttgagcaccatctgagcggacggcccgccgattcgcattcgtgcggcgacatatcccaccgcaatcacgatgccgataacgcagaagccttgcatggcgctgattagacctgacataatcctccctttcgccaccccagtgtggcacataaaaatgtattcggccgcaaaatctcatgtagtgggtgtgctgggcccgccgcccacgcggtacgctgttcacatgacgcttgaattgaaccgcaccgcatccactgccgagcagctgaacagcctgctcacccagatcatggagaacttctccgtgtccgaccacgagggccccctcaccgacgaggtcgaggccttccttaacgagcaagagcacctgaccgtccgccgtcacggcgacacagtggtggccagcaccgacttcggcgagccgaaccgtgtgatcttggccgggcacctcgatactgtgccggtcatcgacaatttcccaccgaagtggctggagcccggcgattcgctgattcgcgaagaaatcgcccacgctcatcccgaagaccgcgtgctgtggggccgcggtgccaccgatatgaaggcctccgacgcggtgatgctctacctcgccgccacgctcgacggccgcacgccggaaaccaccccgaaagtcgacctcacctacgtcttctacgaccatgaggaagtcgtcgccgaaaagaacggccttcgcaaagtcgtcgaggcccatcccgattggatcaccggcgatttcgccatcatcggcgagcccaccaacagcggcatcgagggcggctgcaacggtacgattcgcttcgacgtcgtgacccacggcgtggcagcgcactccgcccgcgcgtggatgggggagaacgccatccacaaggcggccgacatcctgagccgactcaacgcttacgagccggccaccgtgaacgtggacgggctcgactatcgcgagggcctcaacgccacgctgatttccggcggcaaaggcacgaacgtcattccggatgaatgccgcgtacacgtcaactaccgcttcgccccggacaagtcgctggccgaggccaaggctctgatgatgggcgcggatgccggtgccgaactcggcaatggcgagcatgtggccactggcggcgtgttcgagggctacggcatcgaaatgaaggacgaaagcccctccgcgcgcccgggcctgaacgccccgctcgcccaagatctggtccgactggtcaaggagcgcaccggccgcgacccgttggccaagctcggctggaccgacgtggcacgcttctcccagctcggcatcccggccgtcaacctcggtgccggcgacccgctgctggcgcacaagcacgacgagcaggtgcccgaatccgacctggccgccatgaccgcaattcttaccgactggctggtctgacacctctccagctcccctctctgaggggagctgtcaccgcagggaggggagccgagagaacgtcagcctcgccgggccacgcccgcacaaaatatgtggcatactaaaggatggtggttctgcataaccatcagcgtgcgagatggcgtcgatccccttgcggctctcgagaatgagacaacgcaagcgccggtgtccgccacccgcaggacagacttgagacgaagttgcctttacgcggcgcgttttcgcgcggccacggtgagagcgtggtgtgagtcaagcgtataggcctggaaataggcgtcgtgatgcagcgcgccgcgaggagcattgtgcccactgacaaccgtgaaggtttcgtcaacgacggaaccgataattcaaccgtatccaatgccgattcggctgcagccgtgaacgctgcgcctgccgccgcctcccagcccgtcgaacctgttcgccgtcgtcgtggcggccgccgcgtggtccgcggcaccggtgctgccggcgcctccctggaactgcaagtgcaggaacgcaccccgctgttcgaagcccccgcgcttcccaatgccagcaccgcggccgattccaagtcatccgattccggcgattccgatgaatccagcgattccaaggattccgccgaacgtccaacccgccgccgtacgcgccgcgtttccacggccgacgatgccgccgaaacgccgcgtcgcacccgtcgtacgtccgccgcatcttccagcgataccgatgatgacgacgagactccgcgccgttcgcgccgcgccgcttccgcagtggccgacttggatagcgaggatgatcgtccgcgccgttcgcgccgcacggtcagtgccgatgatttcgatgacgatgacgccccgcgttcccgccgccgttcagtcgtggacgatgacgattacgacgaggaccgttcggttcgccgccgctctcgctcccgccagtccgacgatgatgactacgaggatcgcccggttcgctcccgcctccgccgtgcgcctatggatatggatgatgatgacgaagaccgtacggttcgccgtcgttctcgccgtgcagttgcggatacgcacgaggataccccggatgagcgcctgttcgacgcggtcgaatccctgccctctggccacgagaccgtgcgccgtggcaaaccgatgacgtccctgctgttccaggaaccggtgctgcccgccgccgtggatgcgcacgataccgctgacactcgtgatgacgatgttgacgccgacgaacgcccgtctcgtcgctcccgccgctcgcgcagccacgacgatgacgatgcccagccgcgcagccgtcgccgcgacgatcgcgacgaccgcggccgcgcctccgccgaccgtgacgcttcccgtgacgccgcgtccggcgataccaacgccgatcacgacgatttcgacgccgacgacacctcggactcccgccgttcgcgccgctcccgccgtctgaacgcccaggagcgccgtgcagccgccgaagtcgagcagattgaggaagacctcgagctggacgatatcgcctactcgccgattgccgaggaggagggcgacgaggaatccgacgtcacccgcacccgttcgcgccgtcgccgccgtcgtggttcacgcggcgaaaccggtgccaacggcgagcacgataccgccgagaacgatgccgaggatacgcgttcccgccgtcgtgacgatcgcgatgatcatgaccgtgatcgcgatgaggacgatgaggagcagaccgtcactcgccgtcgccgccgccgtcgtggcggcaagaacggcgagggcaccgacgaccagagtcagaacagcgaacagccgctggtccgccgctcccgcaagcagcagtacatcgacgaaatcaccgatgtggaaggctccactcgtctcgaggccaagaagcagcgccgccgtgacaaccgccgtgagcgcagccgccagagccagcttatggaacaggacttccttgcacgccgcgagaacgtggaccgcctgatggtggtgcgcgagaaggaacaccacacccagatttccgtggtggaagacaatgttctggtcgagcattacgtctccgacattcaggaagtacagaccgtcggcaacatctatcttggccgcgtgcagaacgtgctgcccagcatggaggccgcattcgtggatatcggccagtcccgcaacggtgtgctctacgccggcgaggtcaactgggatgccgctcgtctcgaaggtcagccgcgccgcatcgagctggcgttcaagtccggcgacccggtgctcgtgcaggtcactaaggacccgatcggccacaagggtgcccgcctgacctctcaggtcacgcttgccggccgcttcctggtgctcgtgccctccggtggcatgaccggcgtgagccgcaagctttcggagcgcgaacgcagccgtctgaagaacatcgtctccaagatcgccccgaaagacatgggcgtgattatccgcaccgcggccgaaggcgcatccgaagacgccatcgtcaaggatctcgaatcactggtccgccagtgggagcgcatcaacgccaagcgcgaggaattctggcacggcaagcgcccgaaactcctgcagggcgagcccgacgtggccatccgcgtggtgcgcgacatcttcaacgacgactttagcaagctcatcgtggaaggtgacaaggtctacgaccgtatcgaggaataccttgacaccatggcccccgacctgaaggacaagctggagaagtgggacccggccgagcacgaaggcaaggacgtgttcgacaaatggtccatcgactcccagctgcgtaagggcatggaacgtcaggtctacctgccgtccggcggctcgattgtcatcgatcgcaccgaggccatgaccaccatcgacgtgaacaccggccgctttatcggcaagggcaagtccttggaagaaacggtgacgcgctgcaacttggaggcgtctgaagagatcgcccgccagctgcgcctgcgcgatatcggcggcatggtgatgatcgactatgtggatatggtcatgcccgccaaccgcgatctggtgctgcgccgcttggtcgaatgcctggcacgcgaccgcaccaagcatcaggtggccgaagtcacctcgctcggtttggtgcagatgacccgcaagcgcatcggccagggtctggtcgaggcgttctccgaggaatgcccgacctgcaagggccgtggtttcatcctgcatgatcagccgaccgtttcggccgactacgacgatccctacgcgcttcgcggtggcgacccgttcgtcaaaaccaacaagcacggtcgcggcaccgctcccgctcccgaaccggctggttccagcgccgacgtcaaagccaaactggctcagattgccgccgctgccgtcgccgccaacaatacggcggaagagtaacaggtgtgtcgtgcttgacacgcgggcaaaaatcatttgatttagtccgcatggtggtgtagatttgaaactcggtgtctgaccgcaggctcggtgcgtgttaggcaaggtagctttccaaaacataaaaggaacgataatgtacgcgattgtgaaggccggtggccatcaggaaaaggtcgaggttggcgacgtcatcctcgtgaaccgtctcgacgccaagaagggcgataccgtggaattcccggtctccctcgttgtcgatggtgacaaggtcaccctcgccgccgccgatctggccaaggtgtccgtcaaggctgaggttgtgaacgatgaagccaagggcccgaagattgacatccagaagtacaagaacaagactggtgttgctcgccgtaagggtcatcgccagaagctgactatcgtcaagatcacggcgattgcctgagttatagaaaggaccatgaatcatggcacataagaagggtgcgtccagctctcgcaacggtcgcgattctaacccgcaatacctcggcgtgaagaagttcggcggcgaagccgtcgtggccggcaacatcatcgttcgccagcgtggcaccaacttccacccgggccacaacgtcggcatgggcaaggaccacacgctgttcgccctcaccgatggctccgtgaagttcggtgtgcgtcgcgaccgcaaggttgtcgacgtcatcgcctgagcgatatagcgtcaagcttttttcaagccgcgcccgtaaggacgcggcttttttgtaaggtaatcaatatgagtgattttgtggatcgagtaaccgtccatgtcaagggcggcgatgggggcaacggttcggccggcatccgtcgtgagaaatacaagccgttggccggtccgaacggcggcaatggcggcgacggtggttccgtggtgttcgtggccgaccgtaacgccaccagcctgctcgactatcgtttcatgccgcatcgtgtcgccggcagcggcaccatgggtttgggcgacaataaggacggctccaagggcgaggacctgattctgcccgtgccctgcggcaccgtcgtctttgaggcgcgcggcgaacagggcaaagccaagcatcccggcgcacagctcgccgacttgcgccacgagggcgaccgctgcgttgtcgcccagggcggtgccggcggcctcggcaacatcgccctggccaacaagacccgacgcgcccccggcttcgccctgctcggcgaactcggcgaggaacgcgacgtgattctggaactgaagtccatcgccgacgtggcgttggtcggtttcccctcggccggaaagtcgtccctgattgcggcgatgagttccgccaagccgaagatcgccgactacccattcaccacgctggtgccgaatctcggcgtcgtcatcgccggcgactctcgatacaccatcgccgacgtgccgggcctgattcctggcgcctctgaaggcaagggcctgggactggagttcctgcgccacatcgaacgtaccgaaatcatcgcccacgtgattgattgcgccacgcttgaaccggaccgcgacccgatgtccgactaccacgcgctggaaaacgagttggcactctacgccgacaagctcgaactgccattgggcgccatcccgattcccgaacgcccgcgcatcgtgattctgaacaagatcgatgtgcccgaggccaaggaattggccgagttcgtgcgtccggagttcgagaaactcgggctgaaggtctttgagatctccaccgcctctcatgaggggctgaaggagctcaacttcgcgttgtctgcgctggtgcatgagatgcgtgaggaagtggccaaccgcgagcaggccgaagaggagacgcgcgtggttatcaagccattggagaccaagggccgccgtccgcgtcgcgctgatgagggcggcagtgcgcttgagttcacggtcgagcgccgcgaactcggcaatggcgaagtgttcttcgaggtgcgtggcgtcaagccggagcgctgggtcatgcagaccaacttcgacaacgacgaggccgtgggctatctggccgaccgcttggccaagctgggcgtggaggacgagctgcgccgcaagggtgctcaccccggcgacgaagtgcgcatcggtcgtggtgcccgtatggtcgaattcgattgggatccgaccatctccgccggtgctgaaatgctcgatggctccaacctcggtgcccgaggcaaggatctgcgtcttgaggaacaggacccgcgcacgcaccgccgctccaacgccgaacgtcgtgcccaataccacgagatgatggacgcccgtgccgccgtgcgcgacgcgatgatggccgaacgcaaggccggccactgggccgacccgaccgttgacgacgatcgccatgacgaaaccagtctgttcggccacggtgagtccagcgaagatggtgaaaccgaggaataaatgagcactccgagtcaggccgaggtgcggcgcatggtcgcagcagccggaaccattgtcgtgaaagtcggctccagctcgctgacccagccgagcggtcacctcgatccaggcaagctcgacgctctggccgccgcccttgcccaaatacgactgatgggcgggcgtgtagtactggtttcctctggtgctattgcggccggcttcggcccgctgggctttgacgaacgcccggccgacgtggctactcagcaggccaccgcagcggtcggccaaggtttgctcatggctcgctacgagactgcttttggccgtttcggtattcgcgtaggccagattctgattaccgctgaagacacgattcgtgccacccagtaccgcaatgtggaacgcacgctggaccgattgctggaccttggtgtggtccccattatcaacgaaaacgattcgctggcgtccaacgagattcgattcggcgataacgaccgtctgtccgcattggttgcgaacctagttcgcgcggaagctttggtattgcttaccgacgtggacgcgctatacacggcaccgccttcccagcccggctcccgccgtgtggaatatgtgcccaacgttatcgatgcattgggcgacatccaggtttccggctccggctccaaggtcggcaccggtggcatgatcaccaagcttgaggccgcgcgcgtggcggccgtctccggcatccccacggtgctcacttgcgcctcgaacgcgggccctgcgatgatgggcgatccggtgggcaccgtgttcgcaccggttaaggcccgcggttcgtcgcgtcgtctgtggattggcttcgccgccgacccgcgcggcgctattgtggtcgatgcgggtgccggccaggcgattcgcggcgggcgtgcctcgctgctggcggccggcgcgctcgaagtgcatggcgatttttccgccggcgatccggtctggatcgatgccgaaagcggcgaacacctggcccgaggcctcgccggcttcgattccgaagaaattccgcagatgctcgggcgtaacaccgcccaactcaagcgtttcctcggcccccagtacgcccacccactggttcatcgcgacaatcttgtacttgtgtgactgatgggatctgtcacacgacagatcccatcaccatagtgcggctctggcgatttttcgtgctgtaggtttagcatggaagccatgactatggcgcaatggcagactctttccgaccgtatcaacactgtggcaccgagcgctacgctcgccgtcgattccaaggccaaggccatgaaggccgccggacttgacgttatcggcttcggcgcaggtgaaccgaatttcccgacccccgcaaacgtggtcaaggctgcggcagatgcctgccttgacccaaagaattacaagtacacgcctacgccgggcctgcccgagctgcgcgaagcgattgcggctaaggtgctgcgcgattccggctacgaggtgtccgccgaccaggttgtggtgaccaacggtggcaagcaggccgtgtatgaatccttccagatcttgctcaacgatggcgatgaggtcatcatccccgctccgtactggaccagctatcctgaagccgtcaaattggcgggtggcgtgccggtcgaagtattcgccggtgccgacgtgaacttcgagccctcgcttgaggcgctggaagcggcccgtaccgagcgtacgaaggcaatcatcgtcaactccccgaacaacccgaccggagccgtctggaagccggaaaccgtggaagcgatcggtcgttgggccgtcgagcaccacatctgggttatctccgacgagatctacgagcacctgaactacgacgacgcgcgcaccacctacattggtgccgccgtgccggaatgccgcgggcagctgctggtgctgaacggcgtggccaagacctatgcgatgcctggctggcgcgtgggctggatggtcgcgccgcttgaggtggccaaggccgccaccaagctgcaggggcatatgacctccaatgtggccaacatctcccagcgtgcggctctggccgccgtggctggcccgctggacgaggtgcatgagatgcgcaaggcgttcgatgcacgtcgccgcgcgatcgtggctgctctgaacgatattgagggcgttaactgcccgactccgaccggtgcgttctacgcttttgcggacatcaccgctttgcttggcaagccgctggggcccaacggcactgtgtccgatacgtccgctgattttgccgccgcactgttggatgaggcccacgtggccgccgtccctggtgaggccttcggtgctcccggttacctgcgtttctcctacgcactggccgacgaagacctagccgaaggcatgcgtcgattcaaggaatgggctaactgagaagagtcgtgtgccgcgcacatgccgcgcgcgcgacacgcgatttgcgataatccaccggagccgttactataacaacttggcggtttcgccgtggcgaagcgttctctacggaatgcacgccgaggtggattttcacctagggaagtggcgcaattggtagcgcaacggtctccaaaaccgtaggttgtgggttcgagtcccgccttccctgccaagttttcaataatcaagcagctgacgcgaggtacagaatggctaagacgaacaacagcgaaaaggtagtcaagccgaatgtcttcatgcgtatcggtctgtttattaagcagatcatcgacgagcttcgcaaggtcgtaacccctactgccaaggaactgttcttctggtctctggctgtgtttatcttcgtgctgctgctgatggccctcgtcacgggcatggacttcggtctgggcaagctcgtgctgtgggtgttcggctgatccgcacaacctaaggtgaataacaacgcatgagtgatgaactgaatctcgagaatctcgacgccgtgccggctgaggagcctgttgtcgaggcttccgaagctgctgccgatgaggcagctgccccggctgaaccggttgctgacctttccgcagaatctgacgcatccgtcgacaatgcagatgttgagtccgccgctccggccgcgactgaatccgctcccgttgcttccactcagaccgagaccgtttctctggatgaggacgaggaagaagtcaacgaatccgagcaggccgaggaaaccgatgccggtcagcaggccgttgacgaattctccaagtccctgcgttcccttgatggcaagtggtatgtgctgcacacctactctggctatgagaagcgcgtgaagaccaacatcgagtcccgcgtcgcctccttcggcatggaagatcagatcttccaggtcgaggtgccgatggaagaagtcgagaagcacaccgaaaagggcaagaaggtcatcacccgcgtgcgtgttccaggctacgtgctgattcgtatgtggccggatgagaacgcccgccgtatcgttcgcgaaaccgaaggcgtgaccggcttcgttggcccgaccaaggatccggcaccgctctcccgcaaggaagtcgtggcgatgatggctccgatgatcgcttccgaggcactcaaggccgccggcgacaagcctgccgccgccaagaagcgcaaggttgaagtctcctacgccgttggcgatcaggtcaccgtcaccgatgggcctttcgccaccatggccgccgttgtttccgacgtggagcccaccactcagaagcttaccgtgctcgtgtccatcttcggccgtgatacgccggtggagcttggcttccaccaggttcagaagctggattaaccccaaactttgcagagcccgaccatagtggtcgggctttttgtgttgtccgggtggatttgcataataggaaagcttgtgtctggagggaagacccgctagcacagcacagcaatataagttgcgggaggagaccgaccacaggccgattgcctacagcatgcacggataaataacgagtcaagaccgagcgtgatagcagacagccgaacctgaggacggcgaccattcgaaccgcgttatagaaagaagaaccataatatggctcccaaaaagaaagtctcggcgctgatcaagctccagatccaggctggcaaggccaacccggccccgccgctgggcccggctctgggttcgcatggcgtgaacatcatggacttctgcaaggcatacaatgcccagacgcaggacaagatgggtcaggtcatccctgtcgagatcaccgtttacgaagatcgttccttcaccttcgttctcaagaccccgccggctgcagctctgctgaagaaggctgctggcattgagaagggtaccgagaacccgctgacccacaaggtcggctctgtcaccaaggcgcaggttcgcgaaatcgccgagaccaagatggaagatctgtctgctcgcgatatcgaggccggcatgaagatcatcgagggcaccgctcgctcgatgggcatcacggttacggactgataaggagaaggacagatggtaaagcgttccaagaagtaccgcgaagccgctgagcgcgtcgatcgcaacaacctctacaccgccaa

SEQ ID NO: 3367 - DNA, 14937 bp, Unknown
  R151_18m  MAG No. k141_24164
cggcccacgtcgcgaattctgattcgctttgctcggtcagaattcgtgattcgcgcgaccgcagctgtgctgtttggtgggcagcctggcgactgcccacgtcgcgaattctgattcgctttgctcggtcagaattcgtgattcgcgcgaccgcagctgtgctgtctggtgggcagtctggcgactgcccacgtcgcgagttctgattcgttcctctggtgccccctcgggtgagaggagctgtcagtgtagctgactgagggagtctctctcacgactagtgcccgacatcttcggatgccgggcactttgcatatacggattgctgtcagtcagatgagtcgaacatggtcatattccgcttcggcatctgtttgcaggcataaaggcactatctggccaactcacgtggctgattcgcttattcgcccttattcgcctcatccaagctcagcagatcgtcatcggcatcgtaatcgaagagttcgccgtaacggccccactccacggcgatggcgaactgctgatgcgcctcgtcgttggcgtaacgggcgcgcagcaggtccagcatgagctcgccgcggagcttgccttccgcagacttccgcagtgcatgctcaatgttgcgcaccagcggcgcgtgttctatcgccagtgaggcgaacacctgcttggcccgcagaatgtccgccttatgccaggcgtcgcccgcttcggtgatctgcacatggccgtcgcgtaccacgatgacgcgcagcatcgtaccggcatccaccagcgggaacaggtcgtccacctcgaacgaaagagccgaggccaaatctgccaagtcgatgccgtgaggatgctcggcaaccacatccagcagaccggcaagcccgcccggcgtggcgttgggcagcggatgctccttgattttctcgatggtcttggcgggctgaaggtctgatgcgtccgtgacagatgcgtccgtgacgggtgcgttcgtgagcgatgccgatggcgatagagcctcggcttgttgcgtaggctgcgaggcctgtccggtcaaaatcgcgtacagtcggtccaccatcgcctcgaattcgacactgtgacggtcgcgcggacgctgcagatcaacccgcacatcggcaatcagatgccccgggtgcgagcccaacaccaccactcggtcggccatctccacggcttcctcgatgttatgcgtgaccataagcaccgacttgatgctgcgctgttcgctcgaccacagcttgagcacttcctgacgcaggttttcggcggtcagcacgtccagggcggagaacggctcatccatgaacagcgcgtccggccgcagcaccaaggcgcgtgcaatgcccacgcgctgcctcatgccgccagacagttccttcggatacgccgattcgaagccgtccaggccgatcatgtcgatggcatccagagccagtttggtgcgttccgcacgtggtacgccgcgcgccttcagaccgagttccacattgtcttgcacggtgagccacggcatcagcgcgaaggtctggaacacgagtgcgatgccgggattcgggccggtcagggcctcgccgcgatacttgaccgtgccgctggtcggcttgaccagtccggccagcgcacgcaggaatgtggacttgccggcacccgaacggcccagaatggccacgatctcgccctcgtacaggttgaacgagatgttgtcgaacacggtgagttcggtgccgttgtcggccgtgaagcgctggccgacgtgctgggcttcgatgatggtgttctgcggggtcaccgcccgcagcgaacgaatggtttccattgcaacagtcatattattctccttaagtctttagttcagtgcgaaacggcgctcggccatgcgctgcagcgggttccagaacaggcggttgacggccgccacgaacacgctcatcacggccacaccgatgatggtcctcacggtgttgccgctttcggtggcctcggcgatatacgcgcccaagccggaggcggtcagcgtatgccgtccataacttacgatttccgagacaatcgaggcattccacgccccaccggccgccgtaatgccgcccgtgacccacgagccgaataccgccggcaaaatcaaatcgcgccaccgctgccagcgccccagctggaagctgcgcgtcatctcacgcagatcgtcgggaatctggctggccccggcgatcacattgaacaggatgtaccactgcgtgcccaacgccatcagcagaatactgccccagttgatatccatgctgcatgccacgaaccagagcgtgacgaacgggaacgtgaagttcgaggggaagctggccagcacctgcacaatcggctgcataaaccgcgaaacgcgcggattcatgccgatcatcgcgccaatcggcacccaaatcaccgagcagacgagcgtaagcagcgccacgcgcaggaacgtcaccatgcccaacacgaacgcctgcccgagctcgccgaatcccgcatcgcgatgaatcaccagcataagctgcaccagtccgaacgcacacgctgccaacaccagcactgtgaataccacgtcaagcgcgcggctgcgtgcggacttcacgtccgccgcccaacgtccaccggtccgacccaacgggcgggccagcgtgtcgaacaggtcgccgagaggcctgaacagccaggccaccatctcatcgatatgtgactgacgaatgatggtcagcaccacactggtcttgcgcaccgccgactcgctttgcgtaatgcggaacttctccgcccacgcggtcagcggcttccacagcagtacgtcgataagcagcaccaccagcaccatcgtcacgatggcccagcagatggccgcgagattctcctcggccgccgcctgtgccacgaagctgccgatgccgggcaacgcataggtgcgattgttcaccgagatcatctcggaggcggtcaggaagaaccatccgccgcccacgctcatcatgcagttccacagcagcggaatcatcgcgttcggcacgtccagtgtccagaatcgttgccagcgtgtgagctgtagtgagcgggccgcctcgtcgagttcagttggttcgctggtcagggaccgggtgaacgagaacgccatgttccaggcctgactggtgaagattgcgaaaatcgacgcggcctccacgcccagcatcgagccggggaacagcaccatccagatggtgatggtggccgaaagaaagcctagaatcggtaccgactgcagaatatccaacagaggaatcagcacgcggctcaggcggcggcagcgcgcggccgccgtgccgtagatgaacgtgaacaccagtgagaagaacagtgccacgagcatgcggaacaccgagcgcagcgcgtaatacggcaggtcggcgagattcgtactgacttgtgatggcactcctttcgggccgatcggttcgccgatcgccggcagaatccaagcgatcagaccgaacagcgccagaataccggccgcgaccagtacgtcggaggccaggcgcacggcgaatggctggcggtcggacgcggcggtggaagggttgcgggccgacgcatttggacgcgcgccgacgcgattgaatgaaaacatggtcatgaaaagacctccctatgcataggaaagacgaattatgcaagggttatccggggagccaaggaacactacaggcgagagcccgacttccggataacggaatataagaaaacatggtcatcaccaccgcaactatgactgttgccggcggcggaactactggaataatcaccgtccatcggactctcacctccttcaagccgtgcgctgaaacgccagatcaataccatcgtcggtatccatgcgaccagcaggaggggcggaaagtattcgaatccgccgattcgagccatcgttcaagcttcagcatcgcagggcggtggaattgcgttagttcatgccttgatccgacaagaactgctgacctgcgtgcagtgtctccactgttagcggcagcaacccatatccctgcggtagcctcgcctaccgacgctcccaagataaagcccgcctgcaggtctgtcaactacgtcgcagtgccttggtgttggaatgccatcaggcagccattctgtccgcaataatccgtacaattgacgattgctgtgtcgagaagtgggccgccgcataagcccacgtctccatgggtccagtccgaacggccgcaaggcctgactttcggcggatcggcaggcttcccaagggcaaacccgagggataacgagaacaggccaacgcacgtgatgcgcaatcgcgtggatggccccagatctgtggctgatatgcggcagcactgaaggaaaacaatggttaacgctgttgaggcttttgacgccaagcacatgaagccggctgaggaaatcccggccttccgtcccggcgacaccgtcgacgtgaacgtgaagatccaggaaggcaacaactcccgtatccagaccttcaccggcgtggtgatcgctcgtaagggcgctggcgtgcgtgagaccttcgtggtccgcaagatcagcttcggcactggtgtggagcgtcgcttcccggtgcactccccgtccatcgactccatcaagctcgtgcgtaagggccgtgtgcgccgcgccaagctgtactacctgcgcgctctgcgcggtaaggccgctcgtattgccgagcgccgcgacaactccgctaagtgagtcgattcgcgggtgcaatcgtgggcctgatgatgcaggtgcgcgaataaaccgtgaaattcagcccggaaccgtttcggtttcgggctgtttccgtattttccacgtatgatggacgggcgccggcacccctcatatccggcagcatgaatcgcgaggagatggtatgcaggacgatcaggataacggcgaattcccgatttccgacaatccggagagcaatcagacctcgtatgatgacgaggccgatgcccgcgattcccgtacgttccaagtcgccgaccacggcatcgccccgtccccggttcccccggcaccggcgcgcccggcgtacgccgcttcttccgctggtgcgaatgccgcggcagcatcatcgatggatgatgaccacttcaccctacgcgactttttcctgtggtgcggcgttcccgtgcttatcgtgctgctgattcgcattttcgccgtcggcttttacgagattccttcgcgctcgatgatggacaccatggtgcccggcgatcgcgtggtgaccagcaagctcacccccaagatcttcgatctgcagcgcggcgacgtcgtggtattcaaagatcccaacaactggttgaacgaggagcagagcagcgctcccggtggcgggtacctcatcaagcgactgatcggcctgcccggtgacgtggtcgaatgcaagggcgcgggccagccggtgaccatcaacggcgtggccatcaatgagacctcctacattcgccccggcgtggacccgagcgctttcccgttctcggtgaccgtgaccgagggccacgtgttcgtcatgggcgacaatcgcgccaattccgccgactcccgctatcatcaggatgacggcgatcgcggcttggttcccatctccgatgtggtcggagtcggaatcgcgaaatactggccgcttgaccggcttggtgcgattgatggccaccacgaagtcttcaaggacgtgtctgacgcttccggctcgaattcctgagtttttttgaaccgtgtgagtctttgaactgattgagttccgggccgtctgaatcctgaaccatttgaacctggaccgtctgaatcctaaccattgtgagacgatgggagccgcgcatgattaccccgacacttgacttggaacgcagccttgcggcccagggctatgaccttattactggattcgatgaagtcggccgcggcgcgctcgccggtccggtgatggtcgggtgcgccgccatctgggcctgtgatttggcgccgcttgacggcgatgattccgccgaactgtccgggcggacctacctcggcgtaccggacggcgtggccgactccaagatgctcaccgaacataggcgcgaggcgattttcgacgaactgcgcgactggtgcgcggcctacgccgtaggtcaggccagcaacaccgagatcgacgaatggggcatcacctatgcgctcggcgtggccgccctgcgcgcgctcagccaagtcgaacgcgaacttggcttacggcttggagggggattgacggcaaaaaaggctgcgggggagattgtggaaggtcgtccgggagactccgtaggggaatccattggaaattgtggggaaagcgttcgcgccctgcccaaagtcgccggaattctcgacgggccgagcgattacatcaccaaggcgctcaacacgttcgacgcgccggacgtgccgattccagccgatataacgaccaaagtcaaaggcgaccagcattgcgccaccgtcgccaccgcggcggtcatcgccaaagtgacccgagaccggctgatggtcgacctcgcgcaaagcaacccacgttacgccgcctacgaatgggctcataacaagggctatggttccgccgcacaccgtgccgccatcgccgaacacgggccgactccgctccatcgtgtctcatggcacctgacctgagccgcgtgcgacacgacagtgtgagcgctaacgcaaaactgttgtggacgcgctaaagtcagtattgattaaggtacaagcctggccgtgcacggatgccggccgccagaggggaggttaggtagcatggtgaccggccgcaagccaagcaaacgtccgtccatgttcgaagtggccaagctcgccggagtcagccaccaaaccgtctcccgtgtgatcaatgactcgccggacgtttccgacgccacccgtgcgcgagtccaggccgccattgaccaactcggctaccgcccctccaactccgcgcgcgcactggcttcccgccgttcgcgcaccataggcctgatcgccgggggcctcaaattcttcggcccgatttcctccatctcatccatcgaatccatggcccgcgaacacggtctgttcatgagcgtgatgatggtccacgaggccttgtgcatgcagtccgaattcgacaacctgtgcgacaccttcaacgagcagaacgtcgacgccttcatcttcctgaccccgaccgacgtgatgttcgccgccgcctgccgtgcgcgagtcactcagccgcgcgtcatcgtcaccgccacccacggccaaatgaccgtgcgtgagggattgggccttatctccaccgaaaacaagcgtcgcactgcactggtcggtatcgaccagtggggtgcaatggccaaagtggtggccttgctgggcgaatacgggcacaaatcggctctgtattttgccggtcccaacgaatggcgcgacgcccacacccgactggatgcgtggcgcaagctcgccgcctcccgatccatcgattcacagatcgtgcgctgtcatacgtgggatgcctctgaggcatatgcgcacatgaatcatctcattgatgagtatgggcgtcgaggcacggcgttgcccaccgcggtcgtcgccgcgaacgacaatcaggccgtcggcgtcatgcgcgcgttgcatgagcatgggcttcggattccgcaagacatcagcgtggtcggattcgacgacatgtctggcgtggataacatgtacccaccgctgaccaccgtgcatcccgatttcgaggggctcggcgtggccgccatgcgcgagacgctgcgcttgctgggggagggcggcgagccgaccttcctgaccacccagcacggcatgggactgattcccgccgaagtgcgtgctcggcggtccttggggccggctccccggcggtaaattggcgctgttatcaaaccgttatgatgcgtgacacggtataagttgtgtcgaatgcaggttatcggtagaatgtttttttgaaattgtgagcgctaacatcctccccaaggaaggggataacagcgccggcgctccaaggcaaaggaaagatatggcagcaaccgacaacgcggccgagcaggccgcccacatcgccgagaagattcgcgctggcaagaccacgctgggcatcgaattcggctccacccgcatcaaggccgtcctcatcgacgacaacttccagaccatcgcctccggcgactacagctgggcctcccacttggaggatggtctgtggagctacaccaccgaggagatctggggcggtttgcagtccgcttacgcctccatggccaacgacgtcgagaccgcctatggcgagaagctcacgcacgtcggccacatcggcttctccgccatgatgcacggttacctcgcattcgacgaggccggcgaactgctggtgccgttccgcacctggcagaacaccaacacctccgaagctcacaagaagctctccgagctgttccagtacaacatccccgagcgttggtccatcgctcacctgtaccaggccgtgctcaacaaggaagagcacgtctccgaggtggcttacttcaccacactcgccggttacgtgcactggaagctcaccggtgagaaggtcctcggtgtgggcgatgcctccggcatgttcccgattgacccgaccactcacacttacgaaaccgcattcatcgagaagttcgacgctctgcctgaggtcgcagcccagccgtggaagctggagaacctgcttcctgagccgctcgtggccggcactccggctggcgagctgaccgaggaaggcgccaagctgctcgatccgtccggtgccctgaatcccggcatcgtgctcgccccgcctgagggcgacgccggtactggcatggtagccaccaactccgtgcgcgtacgcactggtaacgtctccgccggcacctccatcttcgccatggtggttctggagcacaagctcaaggccctccaccctgaggttgacttggtcaccaccccggccggcgatctggccggtatgagccacgccaacaacttcacctccgacctcaacgcttgggtcggcctgttcggccagttcgccaaggccatcggccagtcggttgatgccggtatgctgtacggcaccttgttccgcgcggccatcgccgacgacgtggacgccaactgcggcggcctgctgaactatccgttccgttccggcgaattcctggccggtctgcctgaaggccgcccgctgttcgcccgcagccccgaagccaacatgaccctcggcaacttcatgcgcgcccagctgttctccgcgttctccccggtcaagatcggcatggacgtgatgaccaagcaggagcacgtgcaggtcgactctctcgtgggccacggcggcatcttcaccactccgaaggtggctcagaagattctcgccgctgccttcaacaccccgatcaaggtcatgtccaccgccgccgaaggtggtgcctggggtatggccgtgctcgccaactacctgtggaacaccaacgaggatcacagcaacctcgctgacttccttgatggtttcgtgttcaaggacgcccagtccaccactgagaagccggtggcttccgatgtggttggtttcgaggacttcttcgcccgcttcaccaagggcctgcccatcgagcacgctgccatcgaaaccatcaacctcgaagataagtaagcctttctgacctccctctattgagagaggtccttgagattttgaaaaaacgtccatccatcacagtggaaaggaaaaccaataatggcaactttggctgattacggccccgaggttcgcgccgaggtcaagcaggttcgtgaggtcgtctccaacctgcaccagcagctgatcaagtggaacctggtcgtgtggaccgcgggcaacgtttcccagcgtctgcacaccgccgacctgttcgtcatcaagccctccggcctgcgctacgagtacctgaccccgtcctccatggtcgtgtgcgaccttgacggcaacgtggtcgacggtgccgaagccccgtcctcggacaccgcttcccacgcctacatctaccgcaacatgcccgacgtctacggtgtcgtgcacacccattccacctacgccaccgcttgggctgccactggtcagaacatcccgtgcggcctgacgatgatgggcgacgagttcggcggcccggtgccggtcggcccgttccgtctgatcggctcggaggcgatcggcaagggtgtcgtcgagaccctcaagaagtacccgaagtccccggccgtcctcatgcagaaccatggccccttcaccatcggcaaggatgctgaaggcgccgtcaaggccgctgccatgaccgaggaagtcgctcacaccatgtgggccgcccgtcagctcggtgacatcatcgagatcgaccaggccgacatcgataagctcaacgaccgctaccagaacgtctacggccagcactgatttgatggagtgtccgccgcgttgcggaaggctcgacgtaccttcgtacgccttcgccttccgcgccttgcgggcacacacatcaaatcagcgctgactccgccagcacggtggtgtcttggctcccctctctgaggggagcctcggtcggcgaatgaaacttaaacaaacccccataaacaaagaagtaaaggaagtaaccctatggttatggaaaaccccttcgagggcaaggaaatctggttcggcgttggttcgcaggacctgtacggcgaggaagccctgcgccaggtcgccattcactccgctgaaatggtcgactacctgaacaacaccggcaagattccggccaagatcgtactcaagcccaccctgaagtcctccgacggtgtcaaggagttcatggtcgaggcttccgccaacccgaacgtcatcggcgtcatcacctggtgccacaccttctccccggccaagatgtggattcgcggcctcgaagtgctgaccaagccgctgctgcagctggccacccagcaccacaaggaaatcccgtgggagaccatcgacatggacttcatgaacctgaaccaggccgcccacggcgaccgtgagttcggttacatcgtctcccgcctcggcatcaagcgcaaggttgtcgtcggccactacaccgatcctgaggtcgtcgagaaggtcggcacctgggcccgcgcctgcgccggctgggatgcctccaacaacatgaaggtcatgcgctggggcgacaacatgcgtaacgtcgccgtcaccgagggcgacaagaccgaggccgagcgcgtgttcggcgcctccatcaacacttgggccgtcaacgagctcgtcgctgcgtacgacgccgtcaaggacgaccaggtcaaggagatcatcgaggactacaaggccaagtacgacgtcgacccggctctgctggacgccaagtacgactccctgttcatcgccgccaaggaagaggccgcgatggtcaacatgatgcgcgccaacggctgcaccgccggcgtcgacaatttcgaggacctcggcgctctgccacagctgccgggcgttggcccacagcgcttcccgtccgagtacggctggggcttttccgctgaaggcgactggaagaccgccgtcctcgtgcgcatcggcgccgtcatgggctacggccttgagggtggcgcctccctcatggaggactactcctacaacttcaccgagggcgacgagctcgacatgggctcccacatgctcgaggtttccccgtccatcggcaccatcgccaagccgaagctggagatccacccgctgggcatcggcggcaaggccgacccggtccgcctggtcttctccggcaagcccaccaaggacgccgtcgtggtctccatgtccgacgttcgcgaacgcttccgcctgctcatggacgtcgtcgacgtcgttgagccgcagggctccctcaaggagcttccgtgcgcccgcgccgtctgggagccgaagccgagcctgaagaccgccgttgagtgctggatcaccgccggtggttctcaccacacctgcatgaccacctccgtcggtcgtgaggcttgggaagacttcgcccgcatcgccggtgttgagctcgccgtcatcgacgagaacaccaccgctcgccagttcgagaaggaactggagctgtccgagatgtaccaccgtctcaacaaccagcactgattggcggagcgtataccgcctttcctcaggttcgacgtaccttcgtacgcccctcgccttcggacggcggtctccgcacgcgccaatcagcgctggcaagccagcaccgatgactaaatcagtctgctgactgctaccgctgaaaaagggctgttccggaaaaccggagcagccccttttgctgttatcggcaactccccacaaacgcatcaaaaatcgcctgcgagcatggatctaccttgtagagaaactcgggatgccactgcacggcccacaggaagtggcttgccggccggtacagggcctcgatcacgccgtcgggcgcaacggccatgacttcgagaccgggggccacatcacgaaccgcctgatgatggtagctgtttactgcaatctcagtctgccccgcgaacaatgaagccaggggagtgccggacaccaaggaaacgctgtgcccgaacgcatcgtacggcggattcatatggtgttcgatatcgctcggatgctggcttggcaaatcctgccacaacgtgccgcccagtgccgcgttgatgaactgaatgccgcggcagatgcccagaatcggcttgtcccaagccattacagctggcagcagaatcgattccattcggtcgcgctcaggagagagcacctcgctacggccggtggcggaggccactgcaccaaccatcggtcccacatccggcccacccgtaaacagaaacgcgtcaaaccgttcggcacattgcgcaagaatgtcggcgtcatcggtcagcggcaacatgatgggcgtaccgccggcccgcattatcgcctccatatatccgggcagcatccacagactatcgcgcccgtaatccatcagcggagtcaccgcaatgagcggtcgattcgtggtcatgcctgcctcttttcgcccaagtgtcgctttcgtcgttctgccgcaaatcgcttgatccagtggccaataatgccgccactgtaccgaaccaatgtaaccggtcggccagcattatttcgtcagccagccacgacgagatcgcacaatgtgccaatgatgggggctcggtgcgaccttgtcaatgttcgggtcattgcactttcagcggggaaagcatgcccctgtccgcgcatcgtgatgaacgagtaaggttgacggggagggagaatcacatgaaccaggcatgcgtacgcaacgacaccatcgacgcgggcaaccatcatggccgaccgcaataccgggcgttcctgcgatttctgacatcgcaggaacgcaacgtcatttggctgttgctggccgtcgcttttcttccggtggacggcaccacgcttggcctgtacgcgccgttctggtcgccaatcagtccggcgctgttcgccgtgtactgcctatgcaattggcggcaactgcgcatcgcagccaaccggtacctgccgatgttcctcctaccggtggtctgtataatcctgtccatcccgggatggctgaagttcggcatccacctcaacgccgcgttcatgagcatcaccggattgctgggcgtgctcgccactttgggtgcgatcgcccttgcgttcgacatcaaacgcattccgtggcgtacgccattgcggattctcatcgcatcatactgggtttccttcggagtgggcgtcgtgcaatggctgtccatccgtctgcgcgccaaaccgttgaccgactatttctcgcacctcatgtaccggcaatacatcagcgacaactcggtgtggggcggcggccgtccgcagttcctgttcgccgagcccagctatatcggcatgcacctgttcggcatactgcttccgctcatgtggctcatgcgcgggcgcgaccgcatctacgccaaacggctgcgtgacctcatcgtcacgtatgccgtcggcgcggtgctcatgcaagccggcaccagaatcgtcatcgattccgtcgtggcgttgctgatcgcccttgtggcgcgcaccgattggcatgacggcgcacgccgcgtccggggcatgctgcagattctcggcgcatgcgcactgggcctgctgggtgtgctggcggattccagactctccgccatcgcggagaacggggccgagggagacggctcgttcttcgcgcggatctaccaaagcctcgatccgatatgcggattgctcacccatccgtggacgctgctcaccggttatggcgcgggcaacatcatcaatgcggtgtgggccggcgcggccaaagccggacggctgctggacggtcttggtatgaacggcggcgcggccacgggattcgcggccggcgtgaacgcggacacggtgtggacgatgtgcgcgtataccagcgtcatcgccgaatacgggctgatcgggctggccatgctggtcggagcctcgatggtctgcatgacgcgcgggaggacggtatgccgtggcggtgcggatggcgcatcgtccgacgggctggcgcacggtgtttgtgtcaccgacgttgccgacgttgctgatgttgccgggggcaatagtggtgatggcgttgccggcgcgggttcgggcgaatccggcgtctggcacaagaccgtcatctgctggctcgtcctggtcgcatacctgtacatccaatgcgagaactatgcgttcgccgctctgccgctcctcgtgttcgccgcctcgaaggtgag

SEQ ID NO: 3368 - DNA, 5468 bp, Unknown
  R151_18m  MAG No. k141_24166
tgaagatcacgtcgcagtgcattcgcgtgcctgtgctcaacggtcacaccgccaccgtgttcatcaacttcggcaagaacccgaccaagggagagctcatcgatcgcctggtcaactacacgagcaaggcttctgagcttggcttgccgcatgcgccgaagcagttcatccagtacctgaccgacgatgatcgtccgcaggtcaagaaggacgtggattacgagggtggcatgggtgtttccatcggccgtctgcgtgaggattccattttcgattggaagttcgttggcttggctcacaacaccctgcgcggtgccgccggcggtgcgctggaaagcgccgaaatgctgaaggcactcggctacatcaccaagaagtgatggcaatctgcatatgttctgcagttacgcatgatcgtgcatgattgcacattgtgatatctgatttctgcagaacataatattgcggaggattgttgattattcagcgatcctccgctttttatttgcagattatctgcaaaaaatatctgcaaaacagatatgggaatacaaaaagacttgactgagatgcctaaggcaatccagtcaagtctttcttgcgattgatattacgtgctattgcgtcagcgaccggtgccgccgtacaccacggcttccacctgatcggcgtccaagccgtaggcggtgtgcagcgcgcggacggcgtcctgcaactgctcgagcggaaccagcgcagcgatgcggatttcggacgtggagatcatcagcacattcacacccttgtcgctcagcgcattgaagaacttggcagccaagccggagtgggtcttcatacccacgcccaccacggccaccttgcccacgttggcgtcaatgtcgaaggactggtagcccagttcgtcctgcttctcctgcaacacttcctgcaccttggccgcggcggaaccgggcacagtgaaggaaatgtcggcggtgccggtggaagcggaggcctgcacgatcatgtcgacgttcacgccggcctcagccagcatcgtgaacaccttggcggccatgcccggctcgttcggcacacggcgcacggtggccagcgattcggtgttgtcgtgcgcaacgccggaaatgatcgggacttccggtccaagatcggggaacaggtcacccaaggactggctgttgttttcgctcatgttcttacctttgttcgtaaagtcttgattttcttgcgattgcctgcgatgtctcgcgattgccgaatgcgaatctcagatatctcagatgttcggcaatgtgcgcggatcgacaccttccggcacgatcagcgtgccgctacggtgggagaaggagctgcgcacatgcaacggcatgttgaatcgctgcgcgtattccacgcaacgcagggcaagcaccttggaaccgcaggacgacatttccagcatcgactcatagtcgatgacgggaatacggcgtgcggtcggtacaatgcgcggatcggcggtgaacacgccatcgacgtcggtgtagatctcgcatacgtcggcgtccagcgccacagccaaagccactgcggaggtatcggacccacctcggccgagcgtggtggcgtcgccgccctcgttcacgccttggaagccggccacaatggccacggagcccttgttgagagcacgacgcacgcggtcaggcttcacggccttgatatgtgcggtaccgaactgggcgtcggtcatgaaaccagcctgggaaccggtgaaggagtaggcgtgagagccggccgcatgaattgccattgcgagcaaactcatcgaaatacgctcgcctgcggtcatcagcatgtccatctcgcgtgccggcgggttggagtcgatactgagcgcctgatcgatcaggtcgtcggtggtgtctcccattgcggagaccaccacggccacgtcattgccggcgttcttcgtttcgatgatgcgtcgggccacgcgcttgatcgactctgggtcggctacggaagagccgccaaatttctgcacgatgagagccacaacttatccaatcttcttcaatgtgttgtctgccaaccattctaggcaggctggtcgattataggaaaaatccgatttgtcaagcccctgcacgcccaacatgcgaaacaatacatgctcaacatgcggaacaatacatgaaatccacgcaatattccggcgtgagtttcgcacgaaatctttggcgaatcgcctgcgcaacgcctacgcaatcgccagcaatcgccaatagccgccagcatatgccggcatatgtaacgcatgtggcgaatgtgatgtcagaccgcacgacgcccggccaacgcacgtccgagcgtgatttcgtcggcatattcgaggtcgccgccgaccggcagaccgctcgccaagcgcgtgaccttgatgtcggtttgcgacagcagctgcgaaaggaaactggtggtcgcctcgccttccacgttcggattgagcgcgagaatcacttcggtgacttcgctgtctttgagccgttcgatgagtttggcgatgttgaggtcgctcggctgcacgttggccatcggattgatgacgccgccgagcacgtggtataggccgcgatattcgcgtgtgcgttcgatgctcatcacgtctttcggttcttcgaccacgcaaatcacgctatggtcgcggcgcggatcgacgcagatcgggcatggactggtttcgcacacgttgccgcaaacatcgcagaatcgtattttttccttgacttcggtgatggcgtcgatcagggtctgcgattcctcgtcggatgcgttgagcaggtagaaggcgatgcgttgcgcgcctttcggcccgatgccgggcaggtgcgcgaatgcgtcgatcagtcgttggatggcgccgtcataggccagtgccatggttcacctttccttggttgccgtaagattcgcggtcattcccgtaggattcgcgattgtgccgctaatcgtcgagattcttcttctgctgcatgttgcgcgggtttttggcgtcgtcggggccgaaatcctcgacttttttcacttcgaatagtcgtgtcaaatcgtcaacgcttaacgcgttggacgctccgatcgattcgtcgctcatggaatattcgtcatcttccgcggcgacctgcggtgttggctgcgcaggcgtggagaactgttggctccatgggtcggcgttcggctggttttgctgagacgccgcttcctgccgaggtgcgcgatgctgatgattggcatgcttggaggccgtttcagattccgttgacacgggcatagcgtccgccggccctgcctgaactggcatgggggcaccccaaggatcgtcgtccaccggcggctgctgcggtaccggcgctggcacggcccacggatcgacgttatcactggtatcgggaacggccacatgtttcacgtgttgctccggcgctttcacgtcgttgacgccgcttgcgatcaccgattgcggttgcacctgttgcgctggcacggcccacggatcgtcatccagttgcgatgggactactgcggtctgctgtgagaccgcccatggatcgttttcggcggttgcgtccgcaacggctcggtgaccctcctcatcgttagaatcctctgcattaccgccattctcggttttctgcgcgccctcgtctgccggttctttgccggaggattcaagacttgcggcggtgccaagattcgccgtcagcagtgttgcggatttgagtcgctcctgcgccagctgcacgttgatcttgctttgctcttccggactaagcttgctccacggcaccgattcggaaccgtccgccagctttttggcgggggcaagcgtgacattcgggccgaacaccttatgcacttcggcgcggacgattttcaccacttcggtggttccatccaccgactccttcgccacgcccttggcgaacgcgtatttgctgagcgccttgtcgaatttgatccacaagctgtcaccacgcaacagcacacgaggcactttctctcggttcacataaccgcgcacatcctcaggaagtgcggccaccaaagcatcccacttctggtcgggggtgcggtcgtcatgtactggagcaggtatggaagttgccgcaggcgccggagccgcggcaggcgcagcggccgcgacggaagacgtcgcattcatcgcctgctgaacatccgcaagcatggaagccactccggaagcgacggcgtcagcgggattcatcggcgccgcagacggctgcacagccggtttcacaggcgcggaagaagcatcaattgccgatgcggaatcctgtggctgaacgccggcggtacgtctcgccgcacggcgacgcgagccggtcatggatccacgcagcgattctgcagcggcggcctcctcggaatcgccagcaaaatcaggcataccggaagatgacgcaactgcagccaccccttcctcacgcccggccagcaagcgcgcggcaagcaattccagtcgcatgcgcggcgaaatcgcaccggtcatattggcaagcgtcgcattgatcgtgtcagccatctgcgtcaacgaggataatcccaaagcggaagcctgacgacgcaaatcatccacgttctcggcggccgcatcgtcggaaagcacgctttccgcgcgcgctccacccaacgtgagcaccagcaaatcgcgcacccgggcaagcaaatcctcaacgaatcgacggggatcgaaaccgccgaccacaaccttctggatcacgccatacagtgcttcgccgtttttgtcggcaacggcgtcgacggcctcgccaatcagagcgtcaggcgtgaaaccgagcaacgcaaccgcagaatcgtatgcgatgctgccgtcaaccgcaccaaccatgagctggtcaagcacggaaagggtgtctcgcacggaaccgcctccggcacgcatagcaaggcgcagcacacccggctcggcctcgatatgctcgtcttcgcaaatctgctcgaggtacgggcccataacctcctgcggcaccaggcggaacgggtaatggtgggtgcgagagcggatggtgccgatcaccttgtctggttcggtggtggcgaagatgaacatcacatgctccggcggctcctccacgattttcagcagcgcgttgaagccttgtggcgtaaccatgtgggcctcgtcgagaatgaagatcttgtagcggtcgcgggccggcgcgaaaccagcgcgctcacgcagttcgcgggcgtcgtccacgccgttatgcgaggccgcgtcgatttccaccacatcgatggaaccgggaccgcccgtggcgagatccttgcagctttcacattcgccgcacggatgcgaggtcggacctttcgcacagttgacgcatcgcgcaagaatgcgagcggaactggttttgccacaaccgcgcgggccggagaacaggtaggca

SEQ ID NO: 3369 - DNA, 12614 bp, Unknown
  R151_18m  MAG No. k141_24645
gatcagcaggtcgcaggttcgaatcctgtctggcgcactcccgaaccacggggacaacagtggtatgcgccagtagcccagcggattagagcagctgactacggatcagcaggtcgcaggttcgaatcctgtctggcgcacagtaagcctcgaaagcgaaatgcttccgaggcttttccaattgtattggcccgtttgagtcggccacacaggggtggggtaaggttgcccttcgcgactcagcccggagcggaacgtcctgagatattccgtactattacatacggttcatccaagagagtacagtaaggagacgcgatggccacgaccgccggtgcgaagaagggactctggtccaccatcaggcgaatcgccgcttcagaccgtatttccggactcatcatgctcggcttcgcgctcaccggcctggtgctcgcgaacctgcccgccaccgcgcatgcgttcgagaccgtcgcggaaacgcatctgttcatcccctacaccaatctcgacctgccgattggccattgggcccaggatggtctgcttaccatcttcttcctgaccgtgggcctcgaactgaagcaggaactcaccaccggctcgctcgccaatccgaaggcggccgccgtgccgatgctgtgcgcggtgggcggcatgatcgccccgcccatcctgttcctggccgtcacggcattgttctctcagatcgggcctggtgaacccggcacgctgattctgaccaccaccggcagcagcatcccgttctcggagatgtcgcacggctgggcagtacccaccgccacggatatcgcgttctcactggccgtgctcgccctgtttgccaaggccctgcccggttcgatccgcgcgttcctgatgacgcttgccaccgtcgatgacttgctggccattattctgatcgccgtattcttctcctcgatcaacgcctggtattggttcatcggcatcgccgtatgcgccgccatctgggcatacctcgtacgactgaaaaaagtgccgtggattgcggtcggcatcgtcggcgtcctcgcttggatcatgatgttcgaggcaggcgtgcatcccacactggccggcgtgctggttggcctgctgactccctcccgtgaaatgcacggcgaactttcaccgcgtgccgaacgctatgccaacaagcttcagccattctccgcactgctggccctgcccatcttcgccctgttcgccaccggcgtgcacttcgagtcggtgagcccgctgttgctggcttcgccgttggttatcgcactgattgtggctttggtggtcggcaaacctttgggcatcatcaccaccgcatggctggccacgcatgtgggcgggctcaagatggccaaggggctgcgcgtgcgcgacatgattcccgctgccgtcgcctgcggcattggcttcactgtgtccttcctcatcgcctcgctggcgtacaagaatgcggaactttccgctgaggcgcgcttcggcgtgctggtggcctccctgatcgccgctgcgatttccggtgtgctgctgagccgtcagtccaagagattcgagaaggccgcagccgcagcagcggccgatgcggaggatgacgaatcgattgatggcgatggcgctggtcagaccggtcgcaccacaaagtccaccacgcccacggaacaccccggcaccctcgccgacggcaccgccagtgtggagattgacttccgccactgatggcttggacgatccctactccattgttggccttgtttcgtgaagaacgtacgctgaggcgcgctcaccgtacgttcttcacgagatgaggccttatttcgtgaaaaccgtacgctgagtgtcactcaccgtacgttcttcacgaagtcaaggatgatttcgcggaaaacgtatgcagagcttcaggcgctagaatgcgaagagtcgatagcaccgtacaggaggatattggatggcaaagaagcagaagaaatccaagaagaacgacggcaaaaaggccgctgaagcaaagaatctagccgaggccgcatccaagtccacagtcgtggacgatatggaaccattggaagccacagccgcgaatgatgcggcaacgttggaggccgagatggcaaccgaggctgccgcaacgccggtgaacccggtcgacttggaggacgtctcgccgctgggcgacacctatcatcgcggcccggtgattctacgcggccagatgattccctcggacaataccaccgccaatctgctgaaacccgaccaggacaccgactggctgcacatggacccatggcgtgtgctgcgcatccaatcggaattcgtggacggtttcggggcgctcgccgagctcggacctgcggtctctattttcggctccgcacgcacccagcgcaccgaatcgatctacaaggcggcccggcgcatgggtagccagatagccaagcgcaacatcgccgtcatcaccggcggtggtcccggcatcatggaagccgcgaataggggagcggcactggctggcggcaaatccgtgggactcggcatcgaattgccgcacgagcaggggttgaaccagtgggtgaacctcggcatgagcttccggtacttctttgtgcggaaaaccatgttcgtcaagtattcctccggcgtgatcgtgtgcccgggcggcttcggcacactggatgagatgttcgagctgctgaccttggtccagacccacaaggtggcgaatattccggtggtgctctacggcaaggaatactggcaggggctctttgactggctcaacggtccggtggccgagcacggcatgatttcggcaatcgacccgaaactggtcaccgtgaccgatgacgccgacgaagccgtggaggtggccgtcagtgcaattgtgaggtaagcgagatagagtggctcccctctccgaggggagccaagggcagagttactttttgtaggcgatgagcaggcctgtgccgtcaggggtaagcgtggactcgaaaccttcgtcatcttcgacggtggtgagcagctcacgcatggcgatggccttgtcgctgcggtcggccggattaatcatgccgccctgaccgtcctccaacgccagcacatcggtgaacacgatcacgccgtgcgcgcgcagcagacgggaggcctgggcgaacgtggcggcatagttctcggcgtcgcccgccaccacgatcagatcgtaatcattggcgttgaggcgcggcagaaacacgctggccggggcgttcaccgcacgcaacgtggtgtcggtctcatcctgcagttcggcgaacgccttgcgaatcagcgcgatgccctgagcggtggaatcgaccgcagtcagcaggcccttgttatccagcgcatgggcgagctgcaaggtctccaccagcgagccggtgcctacggcgatgaccgaagcggcgccggtgatgcgcaccagcatgcccagcagacgggcctgcgcggccgaaccctgcaactggccggacttgtcggcggccgtacgggcgtcggtcaacgcattggattcacgttcgcgcgcgtgttcctcggtgaattcccatgccttggcgaggttggtgtactgcgttctgtccataattcgttcctttatgtcttctctcgtgcgggcacccggtggatgtatcgactacgtgttgcagcgattgccgtagctggtcgtggcgcggcttagcgctcgcggaccttggccacgatctgccacatctcctcgcccacatcgatgccgcgcgggcagtggcgggagcaggcgcgcacggactggcaggcggccacgccgtcggcggtgtcgatggcgtccatacgctccatggccttggtgtcgcgcgaatcgttgacgaaacgggaggcccaaatcagcgaggccgggccgatgaaagcgtcgccgccggcgtacaccgggcaggcaccttcgcacacgccgcaggcgatgcagttgctcagcagctcgtatttggcgagttgttcggggttctgcaggtattcgaacacgtccaccttgccttcggcggtggtggcgagcacgccgtccgcctgaagatatggggtgagcttccttatttggttgagcatcgggtcgatgtcggcgatgaggtcgcgctgcggcgggaagccgggcagggatgccagttcgatgactcccagcgagccgtttgcggccgagtcctggtcggctgccgcgtttgcgtcgttttccgcggaatcgtcggattcttcggactcggtgccggtgtgccggaacccttcgtcatcgacttcggggatggcgccgggctgcttggcccaatcgcggatggtggccgtgcacagcagggtgggggtgccgttgatggccacggcgtccgaaccgcacatgccgtgaccgcacgaatagcggaaggccagcgtcgggtcgacggtgcgtttgatggtcagcaggcagtcgagcacggtgtccgaggggcgcgcgggaatcgtgtattcctgcacccactgcttgccgcgcggacgacggcgtgccgccgaatccgagccgccgccgaatggggagcttttcttggcgaacgggctgccgccgcgtgcacgttcggcgcgctcgggtcgcggcgtgaaacgatgcacttgcagggtaaccgtcgtgttgctcgcctcagccatgttctgcctccatgaaacagtgggatgtcaagtccaatatcagccaacctattgtgccacaagccctaggcggcttggtattaccaccagcggatcagtactcgcgcttcttgggtggatagtcggtgatgtgcaccggcttgaaacttgccggaccatcatcggcgaccatcgagtgagcaaggaaatgctcatcgtcgcgttcggggaaatcaagtcgttgcatggatccgcgggattcctgacgggattcggaagcgtgcagcatggcctcggccagttcgattagatgacggacttcccagatggcggtgacctcctgattgaaagcggcggtcttgtcatgggcccgcaaggtatcggcaaccggtgtgatgtcgttgttgatctgagtcaacgccgtatcgatggtctgagcggtgcaacgtacggccagagcctgctccatcactgatccgagttgggccatgagctgataaggattggcggtgggcccgccatcgtctgaatcgtccatcggtccggcgagcagttcgtcaagctctgccttgcgggaatcggcagcctgatcggcggcatcggtcagcatgtcatcggtcgaatcatcggccatgggggagtcaaccgggttctcgacgatgcgtgcggccatcgtctgaccagcacgtgtaccgaacaggcaggcgtcgagcagagaattgccgcccagacgattcgcaccatgtacggagacacaagagcattcgccagcggagaacagtccatcgactacctgcacggcaccgtcggcccaacggtacacctcgccattggtggtgatggggatgccgcccatcgtgtaatgcgcagtgggcttgataggcaccaggtccttggccggatcgaggttcgcgtactgctcgatggtttcgaccacctgcggtagcacttccttcatacgttcggggtcgatgccggtcatgtccagccagacgcagtccttcggaccatccgggtccttcgggtcggcgacgccgcggccggcgtcgatctccgccatgatggagcgggagaccacgtctcgcgcggccagatccctatgctccggggcgtagcgttccataaacggctcaccgtcggcgttcctcaggatgccgccctcggcgcgggccgcctcggacagcaggatgccggtgtgcgcgagcccggtggggtggaactgcacaaattcgatgtcctccagctgcaggccggcggccaaggccaatgccatgccgtcgccggtcaggtcccaggaattcgatgtggtatggaacagtcggcccgcgccaccggtggcaagaagcacggtgcgcgcgtggatggcctgaatcttgcccgaatgcgtgtcaaatgccacgatgccggccgcctgcttgccgtcgtcggcgagcaccaggtcggtcacataccattcctcggcgaactcgacgccggcggccacgcactgctgccacaaggtgtgcagaatctggtggccgatgcggtcggccgcataggcggcgcgcttgaccggggcaccgccgaactcgcgcgtgtggccgccgaactggcgctgggcgatatgcccgtcatcggtacgggagaaggccacgccctgacgctccaggttgatcacggtctgcggcgcgtattcggcgagcagtttggccgcgtcctggtcgacgagccagtcgccgcccttgatggtgtcgtagtaatgccagtgccagtcatcggactccacattgcccaggctcgcggcgatgccgccctcggccgaaccggtgtgcgaacgcagcggctgcagtttggagaccacgaggatcttcgggtccacgccttgttccttgagctcggtgattttgggggagcgcagcagtcccaacgccgccgacaggccggccgctccggcgccgacgatcaccgcatcatacatatcttccaaacgtttcggactcatgggttcgattctcgcacacccgccgaacagtcttcgagccgtgtcatgaaagccgattagccgacacggctgctcagcttgagtatgccggcatcccgctcgatcactcccttcagctccaatgcgccgagtagctcaagtatggtgccgatattgggaatctcgtcgggtaccgtctctcgcgccacacgcaatagtgcgtccggggtgacgatgagatgtcgtttacggcattcacgaatcaatgccactaatgtgcgttccatttccggcagcttggcgataatgatacgttgttgggcttccttctcgggatcgagcttcggcttgacacgaagatccggcatctgatgcgacgagggcggctcttcacccttgctcttgttggcaccggcctcggcagttgcgctcgccggcccatccttggattgaacgagcgtaggctgagtgtgcttggtcctaagacgtttcgaatgacctgaatcttgtgacgactcctgtgacgccgatgattccgaggatgctggcgataacggagtcgttgccggcacttccatggcctcctcgttttcggacgagtcctgacctgtggatttcggtatgcctgggcatgccgccataacgggcttatgccgttcatggcatatatcctcagtggatgtggcggcacacagaatcatcgcccggtggtcgccgatcatcttattgcacccggcgttgcaaggctgattgatgtcaccgggaaccgcatacacttcgcgcagcaattcgcatgcccatcccgcggtgttgagcgctccggaacgcaaccgggcttgcgtcacaatcaatgtggaagacatggccgcgataatgcggttgcggagtagaaaacgacgggcttcgggaatcgtccctgggcacagttcactgatcagtgcaccaccctgcgcctcgatacgttcgaacagcgtgcggttacgcatcggtccgatatggttgagcccgccggcgaatacggcaacggttctgcccacattggcgggcattctgccgtgcagcgcattcaacgctccccaatgtgccgccgcatccgtgcccattgcgcctccggacacgaccagatgcccggcaacgactgcctgttcggctacggtgtgtgccacataccggccgtattcggtcacgtcccgtgaaccgacgatgccgaccggtttggcgcaactggtcaatgcgcgtggatcgcctttgatccacaaacacagcggtggcgcccaatcggagcgaatggacaggtcggccaactgcgagggccaacatggatggccggggccgataatccattgcgtgccatccatagtgaaccagtcggccagttggatgatgtcttgcgagggcaggtccatcatgcggttatgccagccggccagtgcattgcggaaggagcacatcgcattcgccgacgccttgcggccccatcgggtgaggccatccacgaacatgcggtcaatgcgtgacagcgccgggccgcagattccagatggctggcttggatgggattgcgccaacgcgtgccagagggattcggcgctttccgcgcctttgagcgtggcgtacatcatcacatccgccccatcaagacagaacgtgagcgcggcgcggtacaacgtatccgtgggaggcatgggaatggtgcgcgaaacagcgaggcccgtatcggtgtgatccacactgcctgcggtgccgccagattgtcggatatcagtagcgttactcatgtcatcctcgttctcatttcgatgccctgatggacgtcctgctcggtgggggacacgcggccggccagatcggcgagcgtccaagacagacgcatggcgcgatcggccccgcgcaatgtgagttgatgattggacagggcccgattgaccaattccatcgctttcagcgacgtattggcgtgcagccatttgcccgaagcttgcgcgttgcacacccatccatactgtctgaaccggtccttggccacttgacgggcgcgaatcacacgagcttgtatcccggcactggactcgccgatcgtctcgctctgcgcggcaatgcgcgagaccggtggcaccgccatctgaatatccacacgatccaatatcggtccggacaatcgcgagaaataacgtatacggtctttttcccggcaagcgcaacgttcgccggtgccgtaatagtatccgcacgggcaggggttggccgccatgatgagttggaatgaggccgggtaataggtgctgccttttgaacgggaaagcgccacatacccggattccaatggttcgcgcaacgtctgcagggcgcgtgcgctgaattccggtgcctcgtccaggaacagaatgcctcgatgcgcgcgcgtgatcgcgccgggaacggcgatgccgttgccaccacccaccaaggccgccgtgctggcggtgtggtgcggtgcctcgaacggcggcatgtcggtgatgccgtactgaggcagtatgccgcacagcgaccgtatcgacgccacctccagttgttccgcctcgttcaacgggcacatgataccgggcatacgtgaggccagcatggttttgccgctgcctggcgggccggtcatgatgagattatgtccgcctgccgccgccacttgcagcgcccatttggcatgttcctgacccagaacctcgttcatatcgccacaatcgttgggatggcttgtgggcgattgatccatggtggtctcgtcggcaaccggtgtatcagtaatcgtataggtggcatcgccgcccatcagttcgatgagctcacccacatgcctcacacccactacatccagtccatccaccatcgaagcctcgtcaagattgcgatggggaacaatcattttgcgcacgccacgttcctcggcatgcagcatgatcgggagcagcccatgaatcggcagcaccgagccgtcaagattcacttcgccgagcacaatggtatcttccaagcaatcatgccctatggcacccgccgcgcataggacgctggccgcgatggccagatcatgcgacgaaccacgtttgggcatggccgcagggctcatgttcacggtcacgcgggtttgcggccaaccgaatccagtggcttgacacgccgatttcacgcgctcgcgggcttcggacaacgatgcatccggcaatccgatgatgctgaagtatggcaagccagggctgatgaaagcctgcacttggacgatgaaggccttaaggccgatcagtccgactgagagagtgctgccgatagccatgtctactcctttcacaatgtgtttcgcaacgtggctgtttttttggggggggcgaattcagaaggcgttttcgatgtgatgcacgagcggtctgcccacccgaagcacgatggtgacgacatcgaaacggactgccgtatgcggcacacgattacgccggtcaagcagccaatcgcaggcggctttcctgagattgtgctgtttcgccggcgtgatggcctcttgcggatatccgtaatgcatggaccggcgtgatttcacttcgacgaacaccaccgtgtactcgggattgagcagtacgatgtccaattcgccgtaacgggtatgccaattgcggctcaaggtcgtccaaccgtgttcctccagccacgcggcggcatactgctcgccgagcgcaccgaactgtttgggcgtcagattgcggtcgcccatcgtggccgcaatccgttccgaaggcagcgttgcctgcggatcaggtgaagccagcatgggctggtgaaaggcaaggccggcgtcgatgccggacttcgtcgtcggctgggtaggtggtaaagcgttcatgattccactgtgcgggttacttatgtaagagcacaagcgcaaccggcaaatgtggatactatgacgcggtttggcgtgttgtggataacgtgtggatgaaaacccggttatccaccattagttcagaaggtttaccaaggctccccagccgacttacctgtgacgacagacaacccgccgagttgttcgctgaatacgtcagacccagtgagcggagaggggagccaaggtgcggtcacttcaccaaatcggtgagttcgccaaggttcagttcgaagctgacgccacgatcctcgaaatgcggctggttacgggtgctgaccatggcgtggcgcacgaactcgccggcgatttcggccgactcggccaggccgcggccggccatcaccgcgccgcacagggcagatgcgaaggcgtcacctgtgccatgaatcatgtatggcagcttttcatgagccagctcgatcttgccggcaacaccggtggaagcgctggccacatagttgacgattttgccatcgccatggtcgatgcccttcaacaccacgttcttggcacccaacttcagcagagcaccaagcagctcgttaaccgtggcctcatcaatattctggccaggatagtcacgcttggtgagaatactcgcttcggtgaggttcggcatcaacacgtcggcaccatcggccagagcgcccattgcctcgcacagctccggtgtatacgtggggtacatttcgccggcgtctcccatcaccgggtcaaccagacgcagcgcattcggatattcacggtagagacgctgaatgatcgccacctgatcgggggagccgaggaagcctgaatacacgccatccagttccacgtcttccttctgccaggcatccaagtaaccggagagaatatccgtggtgtcgtggaacgtgaacactgcatagcgcgtgtgcgccgagaacagggcggtcggcaccgggcacacatcgcagccggcggccgagagaatcggaatcgcggcggtcagcgagcacttgccgtagccgcacatgtcgtgcacggcggccacgcgcggaatatagttcggatcacggtcatacagtgttacatcggtcatgtctgttcgaaccccttcaccatgttggcggaataattcattggcgatgtttgactgtagtcgttcgtcatgtaaaccatgtaaccgggcggcggaaaaaaggaacagacgtcatcaccgagcgggcaaaccgtcttggtgacgggtggaacaagcaatcatcacggacacttgagccatgcgcgaaaggcatggtagcgatatcaccgtgaccgcagtcgaccgtgaaagcgcatgcgtgcggcccggcgtgtcgcgataatttcaacgactttttcgtgacttctgacagtctctcacgtcaatgatcccaaggctttataagcccttataggcaagcccgataacgttcggcttgcgccgcgcggcccaagcgtcgtaacttcataaccaacacctcgccaaccgcccgaacacggcaggcgggtggcaaggaaaaatcctcgcgacctagcacaaccaaggagaaagacccatggccgagaacaacaagaagtaccgttttgaaaccctgcagctgcatgtgggccaggagcaggccgacccggccaccgactcccgtgcagtcccgatctacgccaccaccagctacgtcttccacaacttcgaccacgccgaggctcgcttcggtctcgctgacccgggcaacatctacggccgtctgaccaacaccacccagggtgtcttcgaggaccgcatcgccgcccttgaaggtggtaccgccggtctggccgtcgcttccggcgccgccgccgtcgaatacgccgtgcgcaacatcacccagtccggcgatcatatcgtcgccgccaagaacatctacggcggtacattcaacctgctgcgccacaccctgccgcgcgacggcatcaccaccaccttcgtttccgccgagaacccgcaggagttcgaggacgccatccaggagaacaccaagctcgtctacttcgagaccttcggcaacccgaacgccgacctgccggacttcgaggccatctccgaaatcgcccacaagcatc

SEQ ID NO: 3370 - DNA, 11543 bp, Unknown
  R151_18m  MAG No. k141_24873
aattacaccacaccccaatttggcttggcgcagcaactccgaagagttgttcgtcgtacccccaaccggatttgaaccggtgttggcgccgtgagagggcgtagtcctagaccgctagacgatgggggcatattcagtttttcaaccggctgcgaggcgaaccgcgcaacaggtagatatattacgcgctaccctgctctcacgcaaatcccggcgtgtcgcgccattttccgccgttctgcgggaacaccccatgcaacgcgaaagcgggcatccgtatgtacggatgcccgccatgcgtcacgctcccatcatccgccggcgtgcggtggacgacgcatcacagatgcgcccgcaggcccttgagacgggcgacggtgatcggcttgccaacgatctccatcgattcgaacagcggcggggagacgcggcggccggacatggccacgcgcaccgggccgaaggcgagacgcggcttgtagccgccctcctcaaccagagccttgttcagggtctcatgcaggttgtcggtcttccaatcgacctcatccacgccttcgagagcggcgatggcggcatccagcacctcgccggcagaatccttcagctgcttcttggcgtcgtccgcgggctccagatactcctcggtggacagcagggagccgaccatgccggcgacctcgcccagcaggcgcacgcgcggctgaaccagcggagcggcggcggtcagcacctcacgctcacggtcggtcagggcatcccagttgtcggcggaaaccacaccatcgcggtgcaggtacggcaccgagcggcgcaggaagtcctcgggctcgagcatacggatgtgctcggcgttgatggagatggccttgtcgatgtcgaaacgggccgggttggccttgacgtcacgcacatcgaacttctcgaccatctcgtccatggagaacacgtcgcgatccggcgcgatcgaccagccgagcagggccaggtagttgagcaggccctcgcggatgaagccgttgtcgcggtggttgaacaggttggactccgggtcgcgcttggagagcttcttgttgccctggcccatcacgtacggcatgtggccgaacaacggcatctccttggcgatgcccagctccatgagggaccggtagagcacgatctggcgcggggtggagctcaggaggtcctcgccacgcagcacgacgttgacttccatcatcgcgtcgtcgaccgggttggtcagcgtgtacagcgggtcgccgttcgggcgcacgatcacgtagtccggcacggagccggccttgaactcgatggtgccacgaatcagatcgtcgaaggcgatgtcttcatcaggcatcttgatacgtagcgcaggcttgcggccctcggcgcggaaggcggccttctgctcatcggtcaggttgcggtcgtagccatcgtagccgaactcggccggacggccggcggcaaggttgcgctccttgatttcctcgggagtggagaaggactcgtaggcgtagccggcttcgagcagcttggcggcaacatccttgtagatggcggtacgctcggactggcggtacgggccgtgagggccacccacatcgatgccctcgtcccagtcgatacccagccaacgcagggattcgagaatctggttgtagctttcttcggaatcgcgcacggcgtcggtgtcgtcgatacggaagatcagcgtgccgccggtggcgcgagcttccgcccagttgaacagggcggtacgaatcatgccgacatgcggggttccggtcggcgacgggcagaagcggacgcggacgttcgcggggagttcgggtttggtgttttcagcatcagtcataatcccctattgtgccgcgcgcgccggacgcggagagcagcgctcctcgctcttttgcttcgttattgacatttcgggccaacaccatcccaaaacggccattttccaacgaaatctcttttgcctgtctttggtagtgcccgatatcttgatgcctgtcttcacacctgttttgacacctactttggcgccatccacacgcccgcacgcaaggcttcgacaccatttggcgcaactgttgagttttttacccaaacgatggaagaataggagtcgacgcaatcgtcttatgaaaggggaatcaatgaccgatcccaacaacgtgccgttgccgcagatgcccgcgcccaacggtaccccggcccagcagaatcccagcacgccgcaatacggcgcacctgctccggcccccgcacagccagattatgggcaattcaacgctccggcccccgcacagccggcctacggccagcccgcatacgggcagcccgctcccgattcttccgcacccggcgcagcgcccggtgcaactcccgcctatggtcagcccgccgccgacccgtacgcggcgaatgcggctccgcaattccccgctcccggcgcggctcctacctacggccagcccggaccggacgccaacgcttacggtcaggtgccacccgcatacaaccagtacgccgctcccactgccacagcagccgtgccgttgaacaagccgtattacgactgccccttccctgaggcattcctccgtttctggaagaagtatgtggtcttcaagggacgtgcctcccgcagcgagttctggtggtggacgttggcctctgtcggcatcagcgtcctgctgagcctcctcagcagtgccacggacgacaagctcgggttcctttccagcatttggagtctggccatcctgattcccagtctggcgctcgccgttcgccgtctgcatgacacggacaagcccggctggtgggtcgccatcttctatggcgcgatggccctcggcatgatcatcatggttgccggcggtggcgcagcactgtatggcgccttcggcagccttagcaactccagctatggagccatggcaaccggcggcctcggtgccatggccattggcggactgattacgctcgctggttcaatcgtctacatcgtgttcatggctatgcccagcaagccggaaggcgcacgtttcgacgatgacgcagtagctgccccgatgcctcagggtgcttacggcgcaccgtacggcgctcccgcaaccccggacttcaaccaggccgctccgaacttcgccgctccgggcaccgctccgaacgcacccgctcctgacttcaaccagccagccccggcctatggtcagccgaccgcaccggctcctgactacggccagcccgctgtgcctacgcccgattacggtcaggtaccggttccgcagtacggccagccggagaccccggccccgcagtacggccagcccgacgctcaggccccacagtacggccaggttccgccgattcccgaaaacgttgatgatgggtccaccgtgctgtctccgcacacggctcccaccgatgacaacgcacagaaaccctggcaaggccagtgactgacgccggcgaagttcgcttaagaagttcgcctcatcactcatgaagcccaacaatgaggccccactcatcaagcggcggtagtattccccgccgttcagtaagccaatgccctgtgtactggatcattccagcacacagggcattgtgcgttattgcggcccctctcttcgcgcaacattccccggaatgcgttacggtggaggatggacgctgcgccgagctactcctacaagctgcctacggagagcgtttgggagatcacatgggattctcccgggcccagcgtcacgatgcggtcgcggcataccgccgcttcaaccgccacgaaaccgcgccattcgcccggcttggtgtagctcatattgtcgccgtccgctcccggattccacaccacggtttgcggcgacccggtacggctgatatgaatcgcacgccccaacatgtcatcgcgcagttccagacgcgcatccgagtaatacacacgattcaccggctgctcgccaaacgtcaccacttgcgcgtcctgtgttttcggcggaaacccttcttcggtggcatccagatacgtcgctccctgcaatccgaccagctgagcaccggacacatcgccgacatgcagataggaatgcaacgcggcctcgtacgacataggcgccgtgccggtgttggtcacggtcaggctcatggtcagcgcattgcccgtttgcacgtcatacacggcatgaaactgagcacccggctcgtcatcgaaccaaggcacttcattgtcgttcagctgctgcgaatccaacacataccgtatgtggctgtcgtcgaatgaaccctcgtccaacgcccaccgacgcagacgtgcaaaaccgtgggatggattgagtgccagctgcttgccatgcgcaaaacccgggccgaaccacgggaagcagatcggcactcccccgccgagcgacttaccggcctcgatatgccacgtactcggcgtccacaccacatccgcctgcccggccggggcccagcgcaacagatgcgctccgtaatcgctgattaccacgctgccgccattgttggcgagcatacgcaaatcgacaccattgcccataagtttcccattcccattgtgcgaacgatacttttcactaaataggatacttccttaacaaaaaagaatcgcaaagtatggccgcaggatgcacaaaggccgtgccaccccattcgccgacgaccgccacgcgccaatcgtgcgcaagatcatcggatgcgactggcaatagatgctggtcacgcgggccagtgcccggctcaagcacgacttccccctcgcgcaccagttcgccgtgctcccaatggtgcacataaacgcgatccgcacccaaatcgctggtcagcacgcggccgtccggcactggctgcacccagtgggcgacggcgcgtccgacagcagccgttcgcggcgtagcaccttggcgtcgccactgttatcgccgccggcatccaataccaattgttcgatgccggggcaagccacatgatgcagtttgccgaatccaccaaccagaatatccatgaggatgttccgttttactacgaactacgaaactcttttcgccacacaatacgccgtcgccggcggggcaaaatatgccaaaattagccaattgcagaaaaagggcgatccccgtataggaatcgccctttgcgcaaacactcaggcggagggaagtgcctcaggccgtcaaaccggcgaagagcgccgaccagtcctgagactcatcctcaaggtcgaatcgttcggtgttcatcagtgcctccttcaccggtccgggagccctcccctcaagtttgtgtattgagtaatcggtgagatcactcgtcgtggccccaatgcccatccggaatgcggcaaatacacgtggaattggattgagcagacgaagacgccgacagtgatcatcgaacgtgatctgccgctgctgggttcccgctacgccgattcagtgcgcaccaaccatccctatggcgtgcgtaaggcggcggtgcgcttcctgcaacacggtcacacccgtgtgggcgcggcgttcaccgatacaccgacttcggagctgattcaggatggctggaagcaaatcgtgacggaaagcgacgccatcgaatgcccgttcaccatcaccggcattcagccgtacaacaccagggacgtcaaccaaatcgtggacaccattctggattcgggcgtgacggccatgctggtgcactccgattatctggcgatcgccatcgcgcagaccctggagcgccgcggcaagcgcgtaccggacgatatctcgatgatctccgtcaacggctttgccacgcccagctcccgcccgctgaccgtactgcgctcgtccgataaggatctggccgaggcggccatcaacctgctgatcaaccgcatccaaaacccggattctacaacccgccacatctacgtggacccgacgctgaccgatcgcggctcggtaatcgataagcagtaaccccacctccctctgacgagggaggtggcatcgcaaagcgatgacggagggagaggcaccaggcctctaaccgttacgagcgaagcatcggccagagcaacgcccttactctttacaactccacggtctctttgccgggatcatccttgacatgcgcgaacttggcggccagagcctccttattgcgcttttcgtcttcttccttggcctgacgcttagcctcgtccgggttccagagcacatcctcacggtgcttgttccattcggcaacggccagaggagcgatgtattcggcggtggcggtcagggtgtctgcgtcggcggctttggcacgggcattaagcaacccgaggatctgctcgtcggtcaggcagatgcgcggcaccgagcactgctcgcgcagttcgttgacgtagagcagaatcggcagaatcttggcggcagcattggcgacactgtccgctgaaccatcggccacagcatcaccggacacctcacccaataacgcatcgcacacggcgagcgcggtggcgaaccgaacagccacatcggcgggcttggcagacgtggccagacgaccatcggcttcagcgtcggcctcgacctgggcttccatggccgcgaccgcctccctcaccgattccgccgtcgcggaatcccagtcgattcccaacacgtcggccgcctcaacgatcagcctggcatcaccggactcggcgtagtcggccatcgtatcgtaggcgtcattggcggcaagcagcgcatcaacgatgctctgcgggcgaccgggaatctcatcggcaccttcgtagacgaactcggcgtccggcacggtgacgtcctcgccggtcaggatgcgggcgaatgcacgggtgacgcgcacctgcaggttctccgcgtacttggcgtcattgtccatttgcatggcttcggtcagcggccacaggccgatcagcgccgagccggcttcggcggcctcagttaccgccggcaatgccgcaacctgtgcgattgcctcacgattgagttcaatggtcatctatgctcctttgcgtccaccactcgattgcagtgcgtcttggctcccctctctgaggggagccaatgtcctaacaccagtgtgccgttacttgacgttggctgctgggtcgacatacgtgattgacatcacacggccggtttcgttgtcgtacgtcaccgaggtcacggaggcgagcgccgtgtgccgcaggaacatccagtgctcggggtggccggtctccagataatggcgataactgaaaatcggcgattcgtggctgaccaccacaatctgctcgccggggtgctgggccaccttctcgcgggcgaagtcgtccatacgcgccgcgatgtgctgataggactcaccccagctcggcttgtacaggttggtgacgagcttccagttgccgttcttccacagcgcgccctcgccatggccgatgcgcttgccacggaactcgttgccggcctcaatcacccgttcatcagtggtgagcgtgagcgaagcctcgccacgagcctcgcgcacggggttcagcgcatcgagaatcacgccggcggtctcgcgcgtacggtcgagcggcgaggagtagacggctgcaatcgtattggtttggggattcttggccaagtacgtggcggtggcttgagccatgcgacggccaaggtcggaaagatggaagtcgggcagtcgctcatagagcagatggtcggggttatataccttgccatgccggacgaaatggatggtggtagcgctcatgagccgcctttctgcttcccgccctgaagggcatgagaacgttgtcttaatatctccaatctaccgcgtgtcgcggagtggacacccgtagagtatccgtgacgcaaatatgcggatgggaaaatccgacgcaaactttgcgcgaccatggacaacacatcattcgatgagggcttcgccggcaacgccacgccagcgggggacatccaatcgggagcggaaaggagcgtagtgctgttatgtccaataactcgtccaactcgaactcgagcaccattctggccggcatcaaggaagtaggccacaaagtctttggtgggtatgcggaactactgcgcattccgcataccgcccgttattccatcggctcggtcatcgcctgcatgccattcccgatggtcggcatgaccatcaccatttccgtacagcattattacggcaactattcgctggccggcatgctcaccgccattcaggcgattgcgctggccgtggccacgccgctgctgggcaagctgaccgacaagttcggccagaggcaggtctcgattccgacgattatcgtttggattgtggccgccatcgcgctggtgacggcgattaccaaccgcgcgccggaatgggtgctgtactgtctgacgccgttcctggccgccattccgccgtggggcgcgatgagccgcgcgcgctggaccaagattcttaagggtgaccgggagcgcacgaaccgcgcgctgtcgctgtgcggcgtgctcgacgaatgcatgtgggtgatcggtaatccgctggcctccacgctggccgtgatctccggtttgctggcgttctcgttcaccggcatgtgcgtggtggtcggtgcgctgatgttcctgaccgagctgaccactgagccaccgtcgcagaccgcgctggcgcgtgccgagggcatctcccgcaaggaataccgtgagcgcgaggccgccaaggctgaggcgctgaaggtggaaaccgccgccgaggagacccgccgccgtcttgagcgtgaaggcgtgaccgatgaggccacgattaacgcagccattaagcaggcggtcgccgatgcgcgttcgggcaagaaggcgtccatttggggtccgggtctgattgcggtgtgcgtcacctggttcggtttgggcgcgttccagtcggctacgggcatctcgattattgcgttcgccaccgaagcgaatatgaagcagtacacgggctttgtgtttgcctgcttctccttcagctcgctgatgggcgcattggtgtatggcgcgaagaactggtcgattgccctgtggaagcgcttctacttctgcctggccgtggtgaacatcggcatcagtacgttcctgttcgccaagcatctgtgggtgatcatgatcatctacttgattattggcgtatgccaggccccgacgtggatcaacggcaaccagctcatgttgcatctggtgccgccctctcgcttgaccgagggcatggcgtggatgggtgcgatgaattctatcggctcctccgccggttcggcgattgccggccagttcatcgaccgcatgggctcgcacggaggcttcatggtggtgaccaccttggcactggcctcgctggtgattgcactgatcggcttcaagcagatcaagggctccaccgagcagccgaccctgactgaagtgagtgtgtgagacgtatgctaagccccctctgacgagggggcttagcatacgtcaaaacgctacttcggccagcctttgggcgtgtgctccaaggaccagatgccgagcttgtgggagaagctgttctgccacttggcttcaagctcctcggcattcagtcgattttcagcggacttcagacggttcatcgcattggtgtgcgtatcgtcgagcagccacttgcgaatcaagaagttccagatcattaccacggcagtggccaccaacttgccgatattggtgcgcaacagatattcggcatgctgcgatacataggcatcatggttcataccataggtggaaatccagataatcgcgtcattcatgaacagaccgactacagcacccgccacgaagataaggatctccatccagcgtgccatgtcatcacgatgcttgaatacgaatttcatgctcgccagatagttgaaaatcagcgagatgatgaaagagatggtggcagccagcacgttgtgcatgtggaatatgccaaccaataggttgaggataccccagtcgataacaaaggcgataacgcccacaatgccgaacttcatcagctgttcaatcagttttctcacaagagtattcaacactattgggctgactgcggaacgtgtattggctggaaaggccaataatatccccaattggccttgccccggtccgttctgcaagcagcttcctacgtccgcatgccatgttcaacagcagccgctgaggctagactggaagtgaaccgaatcaaggaggaattatgcccgttattcacactcatgtgtccgtgtccaccacccccgagcagcgtgaggcactgaaggccgcctacggcaaggcgattaccgctgtgccgggcaagtccgaaggctggctgatgtgcccgttcgaggacaatatgccaatctacttcggtggtagcgatgaccagcccgccgcctatgtggaggtcaacgtattcggccgctctgtgccgggctctgcttgggaaaagctgaccgaaagcattatggccgcgctgaactccacactcggcattcccgaggaccgcacctacatccgctacaccgccaccaccgattggggctggaatggcggcaacttctagttgccaccattcccctcgcagcatagctgttcgcatcgcctacggaaagcccagtgggctttccgtttaatggctcagggtggcaactagtttgcgtattctggctcccctcagtcagcttagctgacagctccccctcaaagagggaagctcagatgtagaaagcccgccggtggcgggctttctacgtttcaaggggctgatttccaacattcagaagctctactagcgtttcaaggggcttttaaaacaagaaacccggagtataaacattgcaatttcaatggtcatactccgggtttcgcaatcgaagagcccctcgaaacgcagatagacctccggaaaaccggaaatccgcccctcgaaagcgagttacctcacctcatgcctgtcatcacacaatcttgggcatgggggtggtgaggctggtggtcaggttgacgtggaccagaccggcaccggcatgcacctcgaccttcttcagggtcacggtgcgctcttcttcgggggcgcggtcgttgtcggtcatggtcgccggggacttgaccgccacgaacgccagatcatccagcgagatgcctgcgctctggcacagttccatggcctcggacacggactcggtgaagcccggcttgtagatcacgcgctcggccggtacgccgtaggcgttctcggccacccacttggcgttctcggtcagggccatgcccttgtgcgaatgcggttcggccggcatggagccgttctgcagcgcgtcgacgaaaccgtcaagctgcggggccagcgcctcgccgccgtcgcggaacaggttgccgatgatcggcgtgcggaagcccagctcgtcggcggtggccttcagggacggaacctgatcgtcctcgccttcccacaggttgatgagcgggaaggtcggaatgtccaggttctccaggcgctgc

SEQ ID NO: 3371 - DNA, 23337 bp, Unknown
  R151_18m  MAG No. k141_25188
gttcgggatgaggtcggcgcgctgcttcaactgcacgtcgatttgcgcccaaccgttcttcacacggttcttcagcgtcaccaggttgttataggcgctgacgccccaaccaatcaagacaacgataataacgacaacgacaatgccgacgatcagaccagtactcacctatgctcctttgctggaccttgctgtgaccattcttccacactcgcaccgtaaacagaagattcatcacagagtattcatcgtgcggacttgtcttgtaccgctttacccgccgttctcccgtcgatcgaccgaagcgggaagtcgccgcccagtccgacaaagtattccagctcgctccgttgcgagaacgataatactcggcaatactcgcgttgaatatgcgaaagcccgccttgcggcgggctttgccgtttctcctacgcacaaatcattacgctgcgcgcaggaaacgatcagccgaagcgaccggagatgtagcgctcggcttcttcgttttgcgggttgttgaacatcgtgatggtgtccgcgaagtactcgaggtgaccaggctggcccactgccttcaggttgaagaaggcggtgtagtcggcgatacgggcggcctgctgcatgttgtgggtcacgatcacgatggtgtagtcgctcttgagctcgttgatcagatcctcgacagccaaggtcgaaatcgggtccaaggcggagcagggctcatccatgagcagcacctgcgggtggacggccacggcgcgggcgatgcacagacgctgctgctggccaccggacaagccgatgccagggttgtcaagacggtccttgacctcttcccagaggttggcaccgcgcagagcccactcgaccagatcgtcggcgtcggacttggccaggtggtggttgttcaggcgcacaccggccagcacgttctcacggatggacatggtcgggaacgggttcgggcgctggaagaccatgccgacgtcgcggcgcacggccaccggatccacgtccttgtcgtacaggttcttgccttcgagcagcacctcgccctcgacgtgagcgccggggatgatctcgtgcatacggtccaaggtgcgcagcacggtggacttgccgcagccggacgggccgatgaaggcggtgaccttgttcggctcgatgttgatgttcacatcttccacggccagaaagtcgccgtagtagatgttctcgtggttgacgtcaatacgttgtcccatgatgtttccttatatttccttgtgttcttaaggcttaggcttagcgactggcttagcgctcggtcttgacggcgaagaccttcgccacgattcggccaatgaggttcagcagcagcacgatgacgatcagcacgagagccgcagcccacgcacgttccatcggaatcgtggtcacgcaggtggcgtcggcgttgggcgggcagttcgcgctgagcttcgagtactcctggtagacgaacaccggcagggtggtcatctggccggagaacaggttcacgttggtgctggagatgtagccggcggtcatcagcaacggtgcggtctcaccaatcacgcgggcgatggccagaatggcaccggagacgatgcccggcagagcggtgcgcagcacgatcttggtaatcgtgcgctgcttggtaacgcccagagccaaggaggcctcacgcaaatcgttcggcacgatcttcagcatttcctcgctggacttgaccacggtgggcagcatcagcagggagagagccacggagccttcgaaaccgttgatggtaccggggcccagcagaatcgtgaacatcgagaaggcaaacaggccggccacgatggacgggatgccgctcatcacgtcgacgagcagggagatcgtggtggcgagcttgccgcggttcgagtattcgaccaggtacacggcgcacatcaaaccgatcggaatggagataaccatagcgccagcggtgatttcgagagtaccgatgatggcgtgcagcacaccgccgtaaccaccggacggggtctggctaccaccgaccacaccggtcatgttgtagctcaggaagttcaggttcaggcgcttgatgccgttgacgatagtggtccacagcagggagatcagcgggatgcaggcgatcacaaacgccaccgcgatcagggcccacatgaagcggtccatgatattacggcgctggatggcggaacgggtcgggcggaaacgatcgaagtcgatttcgggcgtgccgtccatcggagtcttttcagtgttctcagcagcagtcatcacgcagtcgctttctcggtaagcttacgggcgatgaagttgaccacgaacgtgatcaggaacagaatcagaccggttccaatcagcgtggagacgcccagatcgttggcttcagggtactgtgcggcaatattcgcggcgatggtctggttctgcgaggcctgcagcagcttgatggagtagttgaggcccggggacaggatcatcaacacggccatcgtctcaccaagcgcgcggccgagagccagcatggaggcggacacaataccggacttgccgaaaggcagcacggccagacgaatcatctcccacttggtggcgccgagcgccagcgcggcctcttcgtgcaggcgcggggtctgcatgaagatatcgcgggacatggaggtgataatcggcaaaatcataacggcgagcaccacagccacggtggcgacggtgcgcgacgggttggcggccgggccctcgaacagtggaatgaagcccaagtggttggcaacccagttccagaacgggtagatggccggcaccagaatcaggccgccccacaaaccgtagataacggacgggatggcagccagcagatcgaccacatagctcagcgcggtggcgagcttcttaggtgcatagtgcgaaatgaacagcgcaatgccgatggacacgaagaaggcaatcagcagtgccagcaaagacacgagcacagtaccgaacaacagcgggagcacgtagccccagaagctgctggccttgccgccggtaaagctggacacggtgtcgctgttggcggcctgatcgccaccgatgagtggccaggcgcggaaaaacaggaacaggaacacagcggcaagtacaaccaggatcaggatgccgcaggcgtatgccacaccgcgaaacaccttgtcggcggtcttgcctccaactggctgcacagccgttttgtcttgcgaactcacggattctccttatatagggtggttatcaagtattcaagtggtgcggttttcgtctgtgactttgccaaaccgttcgggtcctgacccgctttaagccgcagccgtatggtttacgactgcggcttaaagttggcggcgactgctcttactactacagtctatcgttcagttgtcaggtccagtccacacgacccttgcgggccgacgtcatcacttggtcttgatggcctcgatggacttggtgatcttagacttcagggaggagggcagcggagcggtgccggcggcatcctgagcggccttctggccctcgtcggaggtcacgtaggtcagccaagccttggcgaactcagcctgcttggtgtccttgtaggccgggcagacgatgtcgtaggagaccaagacgatcgggtaggcaccctcggcctcggtggcgtggttgatcttgatgacgatgcggttgtcgcccttaacggtgtcgtcctgcttggagtcctcgatgaccttggagccggcctcggcggaaatctcgttgtacttgtcgccgaccttgacggccacggtgcccaggtcgccgacctgggagaagtcagcgtagccgatggtgccgtcggcctgcttgacggtggagatcacgccggaagtgcccttggcgccctggccaacctcgttcggccagttctcggagaggtcgtaggtccagttgtcaggggtgacgtccttgaagtaggagacgaagttctgggtggtgccggacttatcggagcggtgcacgacggtgatggcggtgtcgggcaacttcaggtccttgttctgatcggcgatggccggatcgttccacttggtgatcttgccgtcgaagatcttggcgatggtggcagcgtccatgttgatgtgcttgccggcatcggaaacgcccttgaggttgaagaccacggcgatcggggagatgtagaccgggacatcgaaggcggtgccttcagtgcacacggacttggactgctcaacttcgtcatcggcaagggccttatcggagccggcccaagcggtggcaccggtcaggaaggtctgcacgccagcgccggaaccggacgggttgtaggcgatcttggcttcagggttggtgccctggaagccggcgatccaggcttcaacggcggcctgctgagaggaggcgccggcgcccgagaagttgccggagaccggggtggacttggaagtggaatcggaggaggagctgttgtcggtcgtggtggcggtgttatcgccgcaggcggccacggaagcgagcatcacaatgccggacagagcggcaatggagcgaatgaggatgttcttctgcatgattattacttaatccctctatcaactattcgcgggcggctcagcgctgcccggtcaattcatgacaactacaagcgtattggtggtttcaagggcccaaaaccgaaatcagtaaacagaagatgaacacttggatgtttgtgggctacgttgaggctacgtagtttttggagtggactcgcctgcggcgagcccacaatccacaacaaaaaaggcggcccgaaggccgccttccatttactccgcgggagtatcgatcttgtatccgagaccgcgcacggtagtcagatacttggggtgcgccggatcttcctcgatcttggagcgcacgcgcttgacatgcacgtcgagcgtcttggtgtcgcccacataatccgaaccccagatgcggtcgatcagctggtgacgcgtcatcacacggcccttgttctgcatcaggtattcgagcagttcgaattccttgagcgggaagaacacggtttcgccgcgtacggtgacctgatgctggcctacctgcatggcgatatcgccgcacaccagcggaatatcgtcatccacagtgccggaagcctgggccgtggcctgattgcgacgcatcacggcacggatgcgggccagcagctcacggaaagagtacggcttggtcacataatcgtccgcaccaatctcaaggccaacgaccttatcgatttcggcgctcttggcggtgagcataataatcggcacacggctctgctcacgaatgcgacggcacagtgcagtgccgtcaatgcccggcagcatcaaatcaagcagcaccaaatcgatgccgcccttggtgaacagttccagaccttcctcgccagtggcggcggcggacacgtcgtacccctcgcgtgtgagctggtataccagcggctcgcgataggattcctcgtcttcgacgataagaatgcgtgccatagtagcctttcttgggtatgttcccgtgcgcataggcgcaaagttttccgatactatcgtaaccatttgttctccgttagcctgctgtttcctgaaagtacgtaattgcgtaattgtgctacgcacggtgtgcgcacctcgcccactgtgtgattgtgcggcaatggaatggcaccatatcgggcaccaaccaaggccctacgcttgtgtcgactcgtccggccgggcctcgtcgtcatcctcatccggggcggccggcagctcgatggtgaacgtcgacccctcccccgtacgcgaccagaccgaaatccgaccgccgttctcctgcacgcagtgcttggtgatggccaagccgagtcccgaaccgccggtctcgcgcgaacgggccgggtcgacccggtagaaccgctcgaaaatgcggtccagtgatttggcggggatgccgatgccctgatcgaccacgcgaatggtgactttgccatcgcgctcccccacgccgaccgccacagtggtgtgttcgggcgagtaatggatggcgttctctacgaggttcttgacggcggtttgcatggcctctttgtcggccttgatcatcggaccgctcgtggccgggctgcctgattcttccaaggaaccttcgccatcggccagctcctcgaccttcgtgggcactgactgtccgttgacactcagtcgaatatccacatggcgggagtcggcttgggtctgattggcggcgatggcagcgcgtgccacatccagcgcggaaatgcgccgcgcatcaatcacactttgcgggctttgggctttctgcaagtcgataagatgatgtaccagttcggtcaggcgcgcggattccttggagatacggccggaaaaataccgtacggcgtccggatcatcggcggcgtcggtcacggtttcggccagtagcgagatggcaccggccggagtcttgagttcgtgcgaaacgttggtcacaaagtcacggcgaacggcctcgaaacggcgctgctcggacatgtcgttgatgaagatggcgtacaggtcatcgccgatatcgccaatgcgcacacgcaaatacagcatgttggacgggcgtgactggccggcctccagtcctcgtccattagaggacggataggaattgcgattggccggcagctgaacctcacgctcacgcacgccaccgtcggcggcggcctgagtgaggatgtcctcgacttcgcgcgagttgagtcggtcgccggagaccaggccgaatggcactgagccggggcttgaatattggaccaagccgttgcggtcggtaacaatcagggcttcgggcaggacttcaatcaggcgacgctcggtggggcgcacgggcgcatcatcaccgaatagagaacgcgtatcctcgtcgccggacaggtcctgttcggcggcgagccgacctgaaacgcggcctttgttgtaggcgatgacggcaacccacgccagtatcagcgcggcgagcaccacaatcacgacgatctgccagatatccatgatttccagagtaaaacgtgcaaggcgtagtgagatgcccaaactacgtaagttcgtctattgttcatttttggtgggacgacataacaaaatgctcccgctggcgggagcataatatggggagctctatttacagctcgtagtccttgtccttgctttccttaatcaggaacagagcgagcagagcgagggcggccatgatggccatgtaccagcccacaccggcaacgccgaacttggaggcgaccagggcctgggcgatggtcggagcgaatgcgccaccgaagatggcggcgaggttgtagctcaggccggcgccggagtaacgcacgtgcaccgggaacagctcaggcaggtaggcgccgcaggggccgaacaaaccacccatgatcatgaagccgacgcacaggaagatcatgatatgggcggcggagtgcacgagcagcatcggcacgaagaagctgaacaccaaggcggcggcggtcacggcaatcatgaccttcttgcggcccaccttgtcggcgtacacgcaggagaccacgatgaagatggcgaagaacaccacggagcacatctgcatgagcaggtactcgccctgctggaagcccaagcccttgacgccgtaggccagcgaccaagtgccgagtacgtagaacagggtataggtgatacccatggctacggtgccgagcacgacttccttccagtacggcagcaggtcgcgcagcgggtgcttggaggtgcgcttctcttcagtggccttctggaacactggggtctcagacatgcgggcacgcacgtacaggccaatgatcaccagcacggcggagcacaggaacgggatacgccagccgaaggcaatcatctgttccttgctcaggttggattcgagtagcaggttcaggccgtaagcgcagaagaagccaatcggggcgccaaggttcgggaaggaaccgtacagggcgcgcttgtcggccggagcgttttcagtggcgaccagcgcggcaccggaccattcgccggcgaggcccacgccctggcaggcacggcagatgcacagaatcacgacggaccatgcgccaatctgctcataaccgggcaggcagccgaccaggaaggtggcgatacccatggtcatcagggcgataaccagcgtcttcttacggccgagcttgtcaccgaagtggccgaacagcatggagccgaacggacgggcgaggaacgaaacggcgaaggtcacgaaggccatcagcgtggcgagggtctggttggacttggcgacgtccgtgaagaagatcatgccgaagtagctagcagcggcaatggaatagcagtagttatcgtagaattcgatggccgtaccgaccatggaagcggcgatgatctcaggaaccgaatccttcttcaccggtttggtcacagccgcggttgcgcttgcagtcattttttctctcctcatgctgcagataaaccccagtgcagcgtgcgcattgtgtattcaatgcttcgcgacggtgttgtcgtcgcttaacgaattgagcacagcgaccggcatgcgggagaagaactggtacggcttgtggccccagcgatgaaccccgcacatcgctgtgccgaacaccgagtatggctcaggttataagcaatagtttgaaaacgctcatattgtggtcatcatacccaaaacgtggatggtgagatgggccagcccgccgactacaggcgcttgacgatgtcgacagccagacgggcggcggtatcggcgtactcggagatgtcgaactccttgaatacctcgtaatcggtgtcggcgttgtcggaaagggcacgaatcaccagtgccggcacgtcattgcgggcggcgacctgtgccacggcggcgccttccatctccacggcgtcagccccggtgagtcggatgacctcctcgaccttttggggcgtgtccacgaagtagttgccagaggcgatgatgccggtgatgtgggtaatgcccgcattggcaagcgcctcgtcggcaacttccagcagacggtcatcagagtggaattcctccaccggagcgtccgcagtgccgggcttccactggcctacgagccgcatgtcagtgtcgaggtagcgcagggtgccgccgagcaccacgtcgttgatgtgcaggtgggtgttgaggttgccggcgatgccgctgaaaatcacgacgtccggggcgaactcgtcaatcagcagctgcgtggtggcggccgcattgaccagtcccatgccgcctaccgttgcggcaaccttgatgacgtcagaaccgaaggagtcgaccgtgccggacacgatgtcaaggctgcccttggcggtgtgcgtcacatgcgtgagcgatttggcgatcagtgccacttcttcatccaatgcgccaataatagctacagttttcatacccatacgtaagttcctttcacaacactttcggctccccttgtcaggggagctggccgccgaatggcgggctgaggggtagtcagacgtttcgtcacattgctccccccgagagagccgatgacgcaactcagtgccaacgccgcgtggccacggcttccgcaagctcgcgcagcaaggcctcggtttcttcccagctgatgcacttgtcggtaatcgacttgccatagaccagctgatcaagcggcgcggccttctgattgcccccttcaataaagctttccatcatgatgccggtaataccctgttcgccagctgcaattctgctggcaatattgcgcacgacttcggcctgacgatgttcgtccttgccggagttaccgtgcgagcaatcaacaatcagaccgtgcgaggctgcggattcggcgggcatttcggcgcgtacgtcttccatggctttggccacggactcggcatcgtagttcgggccgtgaatcgagccgcgcaacaccacatggcagtccgggttgccaagggtctcgaccgcgcaggcacgccccagatggtcaatgccgaagaacgtgtgctgctgagcagcggcgaagcaaccgttgaccgctgccttcaccgagccgtcagtggcgttcttgaagccgaccggcatggaaagcccgctggccaattggcggtggatctggctttccgtgttgcgcgcaccaatggcgccccaactcaccgcgtccgagatgaactgcgggctggtgggctccagaaattccgtggcggccgccaatccttccttcagcacaccaagcaaggttttgcgagcaagcaacaggcctttgcgaatattgtggctgccatcaatatccgggtcgttgatcaggcccttccagccgatggtggtgcgcggcttctcgaagtacacgcgcatgacgatgagcagctgctcaccgagctcgtccttcagcttggccaatcggtgcgcgtagtccagcgcggccttcgggtcatgaaccgaacaggggccgacgatgaccaacaacctgtcgtcttggccgtacaggcacgcgcgaatctcatcacgcgagtaggcgacgatttcctgagcctgatcggtcagcgggagttcagcgagcacttgcgcgggcgtgggcagcggctccagctccaatacgcggcggttgatgatgcgactgacacccacctgatcttcccagcgcggcacatcagtggcaacgagcgggttctttccctcccccatcgcctgacgaatggcgcgaagctcttccggggtgttcaacggctgcggaccgacttgcaacggatgcagcgaatgtgctgcttcctcctgctgctgcataacatctctccttggatcagtatctttcccaaggataaggtgtcacgggaacaaactgacatgaccaccgttattggcaaaaaatgctcactgagtgggtctcagtgagcatttttacaaagacaaagctatttagccgagctgcgagcggtgacggcgtcggctagggtgtgcagcagctcgttggtgcgttcccacggcacgcaagagtcggtgacggactgaccgtagaccaactggtcgagcggggccggcttttggtgaccgccgaccaagaagctttccatcattacgccggtgatgccttgttcgccgtgcgccagacgctcagcgatctcttcgatgacttcggcttcgcggttttcgtctttgccgcagttgccgtgggcggcatcgatgacgaggccatgctggctcgggccggacgctttggaaaccttgaggtcttccagagcttgacgcacggattcggcatcgtagttcgggccgtggctggaaccgcgcagaaccagatggcaatccgggttgcctttggtttcggcggaaatcacgcgaccgtccaagttaatggacaggaagtgatgctcgaagccggccgcgaagcaggaatcggcggcggccttgatggagccgtcggtggagttcttgaagcccaccggcatggacaggccactggccagttcgcggtggacttgggattcggtgttacgcgcgccgatggcaccccagctgatcgcgtcgcagatgtactgcggggtgatggggtcaagccattcggtggcggcgggcaggccgaggctcagcacgtcggtgagcaccttgcgggccagccacatgcccttacgaatattgaagcgaccgtccagatcggggtcgttgatgaggcctttccagccgatggtggtgcgtggcttctcgaagtacacgcgcatcacgatcacgagtcggtcttccagctcgcgcttgacggcagccagcttttctgcgtactcgtgcgcggccttcgggtcgtggattgagcaggggcccacgatgacgagcagtcggtcgtcgcggccgttgagcacatcgcggatttcctgccgcgagtggagcacgagctcgctcatctcatcggtgagcggctgctccctgaggaaggcacgcggcgcgggaatcgggtcgagctggcggatattgacgtcgacggtctcgggaaagacggcctgctcccccaaacgacgttcatcctcggaactatccggaccacgtagtgctgccattgctcgactcctttccttgtatacgtaccgtcggtatggcgctatagacgcaaaagcccaactatagcagtctgttacggggactgcttgttgggccggcggttatggactttgggtgaactcgcctgcgtggactcgcctgcggcgatgctgtgttgttgtgcggcctgcgaccgcggcctctccccccgtcagcggcttcgcgctgacagagggagagaccctagcagccggcaggctgcgaaaaaacacagcatcggccgtcaggccgattccgggaggctggcgaagtcaggccaaggcgcccatcgggtcccatgcggggagcatggtggctggctcttcgagggccttctggtattcctccggcaacagggccttcgggacggctacctcgtagacgtattcggtgaaccagtcgtcggacatggtgaagtagcccttgtcggcgatcttggtgccccaagagttctccactcgccagcggcgggtggtgccgtcgtcggccacgtcaacgccggcgaaagccatggcgtggttcatggcggagtcaccgaagcgcacgcgggcttccttgtccaaatcgaagtccacgtcgtacacgcggccgtactcgaacaggtcggtggcccaagcgccgttctcacggtccatgaacgggtggcagtcggcaccgaaccataccgggatgccctgctcaacgagaatctgcttgacacagtccttcatgaactggtttggcacgttgaggtactcggtggcgtcgccgccagccacattgccgaggtgctcgatgccgatcttcttgcccttggcgtgctcggtgcgcggatcatccaccaggcacacgtagtcctcaagaccagccggacccacgtacttcttccagaactcaaccggcgtaatctcgccgtcgcggtggaattcgccatccttgtcggtccattcccagtcgaaggagaccggcggctcgcccaggtggatggtcagaatacggtggccggcagcagtggcgtcggcaataatcgcctcgaccttggaggcatcgccgtcagcggcgtacatgtgcgccacggcggtgtgcagcatgtggcgcagctgggtgttcatttcaccggtgttcttggaggattcggtctccgggaacaggtccttgggcacagcgccgtacttcttgtacacgttcatggccatggtccactggccgccatcgcccatcacgtcggcgagcaggtgctgcatcaggcgggagtcggaaggctctccggcagccaccagagcggccacatccttaaggaagtagttgacgcgctccagcttgtcgtagtacatcgcatagttctgggagaactcgaactccttcaggttcatgttcttcttggccacgaaacgggccacgttcagggagctgaacagccagcagcggccggagcgatcctgatgggtggcttcgccattgtcaacgatggtggagaaacggcgctgcatcagacgagcgcggtcataattgcgagccaccttgtcgatgccggcggcggtcaccgcgttcatggccagacggttggtgccgctctgtgcgaaatcgccgcgcagggtattcaatgcttcgccggtcagaggcgtcaattcactcatgtcatactccttctgtgatggtgcgcttgtggcgcagatccaaacgaatacggcacctggctcgaaagcgcaggtgccgtaattcttaccgctagtagtctaatcgaaggcctgtcattcgccgttctgctcagatacggctggattctcctgagtcggggcctccggttcgccctgtgtctggtgctcggacggctcagacgattcggactgctcattctgcgtagctgaatcagccgaatcagccggtgccgcatctgtctcattgtgatcgtcggcagccgactcgtttccgctcaactcacccggctgatcatcggcctcgttgtgtacaggcttgacttccgggacgggcgcgaccaccggcaatgacgccacggcagcggcttcctgactctgaccagaggccgccgcattacccccgaaagcgaatccggagaacgcctgcgagaacatagaacgcagttccgaaacacgctgggtgatgacggactcgcgttcctgcagatcggcgatgcgcttggacagaccgtcaagctcgctttgggcggcggcacgacgctcctcgatctgcgcatcggcttcctcgcccgccttatgcacgattgcggcggcctggatgtccgcctcctcgcgcttggacgcggcatatgaatcggcttggtcgcgagtgttcttggcctggccgaccaactcatcggcttcccgcttggccgccacacgacgctcttcgaggtgctgcaggagttcgttgaccttcttcgtggcctcatcctgctgagcggcgatgtcgtgacggatctgctcgacttcggcgttgacctggctcatcgtgctggtgcgcttgacctcggcctcatcagtgatttcctgacccttggtcttggccgcatcaatgatttcgctggccttgcgctgggcttcggtcatcatcttggacacttgctcgcgcacgtcggcgagcttcttgttggcctcggcgagcgccgcctcaatctgatcgttggaatcggacttaagcttggtgatctcctcattggcgcttttgcgcattgcggcaacctgctgggtagcttccgccttcatatcggcgatttcgcgctcttgggtggagcgttcggaagccatcttcttggtgtgctcttcgcgcgcgttgctgagctcaagctcgacggtctgacgctgttcggtgatggtcttggcggtttcggagcgcagttgtgcggcgtcctcgttggcggaggtggtcactgattcggcctgattgttggcgttcgtcagaatcgaggcggccttggcattggcgtcgtcaacaatatgctgggcatccagcttggcgttgttgatcagcgtttcggcctgagcctgagccgtggtacggatggaggatgcgtcctgcttggcgcgttccaacagttcggtactcgtctgctcggcggaggcgagcatctgctgggcgttcgcccccaaggaagcgaagctgttgccttccggcttcttgttcttctcttcctgaagctgggcctgcagttgcagaatacggtcgtcatccgccgcaatctgctcacgcatgctggccaacgtctgctgcgcacgcttcacactctcctgagtagcgtcgaaggcagcatcaaccttctccttgtcatatcctcgcagcaccaccgggaaacgatccaccatcgctgtttattcctttcgcacacgcataaagctcttggcacatccttgaagcactgtagcgcatcgcactagcgctgggcgttgagtgacgcgcaatcgttacaatgcgtgcgaaccatgttctattccggcgtggcgcgcagcgtgctaggcgatgaggatgccggagctggagggcttgagatagtagcgcacggcttcgcgcaccacatcacggccagcggcgatctgctggtcgagtggcagaccatgctggctggaatccgccggcacgaccggcgggaagctgacgaatccgcccagcacccgctcctgggtggcggtccagttcagcaagttgtagaacagcgaattacatacgaacgtgcctgcgtccgagctcagggtggccggaatcgaatcgtccgtgaaatcattcaggatcgagcgcaacggcaggcgggtccaataggcggccgggccattggggtcgatgggttcgcggcgtggggtcacgttgtccgcgtccggcctgatcgcgtccatcaggttggtggcgcatcgttcaagcatcacgcctcgggctgcgtgcttgagcccggtggcgatgacgatattgggcttggtggcctcaatcgtctctttcagcgtgggccaggctttggcgaagctcaccgggatgctgacggcatggacggtgacggcgacctgctccaacggatcgtccggagcagaggagacgcccaacccctgctcggcgatggccttgggcacttcgacggcgggattgacctccacgccgtcatagtggtcgaagccggagatcacaacattgagttcacgcataatgccagtctagcgatgcatctggccggccgcttgggccagcagggcgtgcatgcgggcgcgggcctcttccttgggatcacgaccgagaatctcctcggcgatacgctcagctgtgggaatatcctccagcgtggtgatcttcaggttggtttccgcaccggagacaatggcgacgggttcatcaggcagataatcgaccactacgcgcgtgtcgtcggtgggatggaagtccgggtcggcggcagccagatcgtaagcgtgacgaatcgtcgcgaagcggaaggattgcggggtctgcgcgcggaaggtgttcgggcggtccggcaccgacttgaccactttcaaatcgcccagatcctcggtcaacagcacggtgtcggttgaggtgtaggccacggtcgcggccgtgaactggtcgagcgcatcaatcgaaccgtcgatggcggactgttccacgaacggacggacggcgtcatggatcagaatcttggcatcgtccggaatgccagccgtagccagcatgtcgagcgcggcggcggtactgtccacacgttcgtcaccgccgtcaatgatgacgcggaccttggtgtagcccatctcgccaaccaacgtttccacttcaccgcgcaccttgggattgaccaccaccacgatgtcgctgacgcgatcgcaatgttcaaaggcatcaatgctccagcacacgatgggcttgccgcccacggagacaagctgcttgggattgtcggggtcgaagcgcgtaccgaagccagcggccagcaccacggccaccaccggcacggtttgtgccggtttgacgccctgagcgggggccggttggacggtaggcgtctcgacgggggtatcgaaatctctctcagtcataggcaccaccgtagggtgagggctggccgtccgtgaactgcatcacatcttctccacggaatgtgcccgcattctccgtttagtcacgcacgatgagggcgaggaggcggccttcgtgtgttttgttggcgagcgcggcgcggcggtgcgagtaccacagtgggttttcgagcgtgcacatgctgtggctgatgttgtcgatgcgctccgcgagctcggccgggccttcgccgtccgtacggcacagttcggcgagttccgggtcttcctcaaggtactgggtggcggcgtgcacgcgcggcatcgaatcgaccacctggtgtacgccggcgaaggcgaggtcgatcatcgcggcttcggcgatgtcgatgccggcaccaccgaaacgggtcttcgtcttggtcagcgggaagcgcttgatgaactggtcggcgatctcgtcgcccacttcatagcagtcgccgcagatgcgcgggccgagtgtggccacgatgttcgccgggtcggcacccttgctcttcatcaggtctaccgtggcgccgatcacaccacgctccagaccacgacggccgcagtgggccgcaccgatgatgccggtgaccgggtcgcccagcagcaccggcaggcagtcggccgcgaacatgcctagggcgatgccggattgtgcggtgacctggccgtccgcctcgatgacgtgcggagtgtcagtctcaccatgtgtgccggacacgtcgaagccgaagggggtgttgatgacgaacgagtcgtccacgtccacagccacgccggaatgtacttgggagaccagcgataggcgggcttgcaccgcttcggcgagtgcgatgcggttcgacagcacggcctcaggttcgtcgccggacttgccgccgaggttcaggttgccgtaatcgccggtgctcagtccacccagtcgcgtggtgtacaccaccttgatgccgggggccagtgcgatggggatggtcaccggaatagggcgaccggctttatcggtagagctgatgctgttggaatcgaggatttcttcgctgtattcaggcataaggcattctttcttgggtgcgggcggtgttcatgattcccatgaccacccccagtcagcgggggcggagtggtaggttattcggctttgagggtgggctttttggtgcgcgagcggatggcggcgttgatgggcacctggtgcgggcagggcatcgagaacacgtgcgccggattattgatggcgggtactggcgcgccatcggcatcgcgcaggccggtttccggcacggtaaagaccaatggtctctcgccaggcagcaggaattcaacctgttgaccgggctcgatcttgttacggctcatcagcgtgacacgtccgccttcgtccgcgctccagctcagcacttcgcccactaccagccatgagcggaagtaggcggagcggtcggtgttctgtgtgaccttgtgctccgggtaatagaagccggtggagtagtcgcggtgggccaccttgtcggtttcctcgagcagccattcgggcagttcgacgtgcggggccgggcgaacggccgcatgcttccaatcggtctcgatctgttcgaccgcggtgttggacttgcggcgcgtggagcgggcgtgggagctcatgccgtcgggttcgacggcggtgccggccgacgtaccagaggcagttgagtcggcggcatcagcaaccgtcacgcggtcacgttctgcggcaaccgagccggtgaccgaatcggcaaccgcagtatcagagccacggtcatatccctcatcggccacaccggcgaacgcggcatcggcattgctcattacttgatcttcggttccttggccaaaatcggggtcgcccgggcgaatcacacggtcacggaaaggcttcagaacattgccatcagcgtcttcaaaaccgcgttgaatcatgtattcattaaccgcggttttgtaggcgttggtcatggcggcgatatagtaggcgcttttcgcgcggccttcgattttgaggctggtggcaccggagtcaatcaaatcatccaagtgccccagcatattcatgtcctgcgaattgaacagataggcgccgttctcggtctgctcgatcgggaagtactggccggggcgcttctcttccacgatcgaatacttccagcggcatggctgcgcgcattcgccatgattgccatcacgcccggtcagatagttggagaacaggcaacggccggagaacgccatgcacatcgcgccatgcacgaagcattcgatgtcgaggtcaccgggaatgttggcgcgaatatcacgcacggcctgcaagtccatctcgcgggccaacaccacacggcgagcgccaagctcatagaaggcgttcgcagcttggtaattggtgacgccggcctgggtggatacgtgcagttccagattcggagccacttggcgggccatcatcatcacgccgatgtcagagacgatcagcgcgtccacgccggtgtccttgagctggccgacgtactcgcgcatggcttcgatctcgttgttgcgcggcagcacgttgcaggtcacgtacacgcgggcgccgcgttcatgggcgtagcgcgagccttcctcaaagtcctcaaggcttaggtttttgggggccgatcgcatgccgaaggctttgccgccgcagtagacggcgtcggcaccataatcgaccgcggttttcaggcccctcaggttgccggccggggacaacacttcgggctttttgcgggtggggaggttcatcgtcgtattcatcaccgcaatagtgtagtggtggccgtgtaatgcgggcggggctaccgttaggctggataacatgaagatcgatatcgtgagcgtgttccccgaatactttgaggtgatgaacctcagcctgatgggcaaagcccaggccaagggattgttggagatcaaagcgcacaacctgcgcgactggacccacgatgtgcatcattcggtggatgatacgccagtcggcggcggggccggcatggtgatgaagcccgaggtgtggagcgaatgcctggacgaactgctgggattctcgcggccgtctgaatcctccgccctatccggcacaccggtgctcatcttcccgaacccatcggccccgttgtttacccaacgcgacgccaccgagctcagccatgccgaccatctgctgttcggctgcggccggtatgagggctacgatgcgcgcatcccggactactaccgctcccagggcgtcgacgtacgcgaatattcgatcggcgactatgtgctgaacggtggcgaagtggcggtgtcggtgatgcttgaggccatcacccgcctgatgcccggattcatgggcaacccagattcgattgtcgaggaatcctacaccggcgaggacgcactgcttgaacatcgccagtacaccaagccggccgtgtggcgtggtattgcggtgccggacgtgctgttgtccggcgaccacggcaaggtggaccgttttcgccgcgacgaagcgctggcccgcaccgccgagatccggccagaccttatcgcggcactggattgcaaggcgctggataaggccgaccgcaagaccctgatggccttgggctgggaggtctccgccgcccatccgcgccggctcgccgattaattcaccacacggtgggagattcactacgcggcggaatcgtcggaacgctctatatccgagtcgtcatccgcgggctcgatgtagaagacggcggtttcgccgtagttgcggctttcagtgatttgccagccttcgggggcggtgggggtgtcggagcgtaccgagcgttcgagcataatcacggtgttctcgttggtggcgctgcccaccgccagattggccaacaactgattgcattcagcggtctcataggcgtagggcggatcaatgaatatcacgtcaaaggattcaccaaagccgccagccacttgctcggcctttttggtgaacacacgggccttgagcgaggcatcccacgaacgattcttctgtaactgcgacaaggtcttgataatcagcgccgccgcaggccgggaactttccacggccacgagttctcgcgcgccacggctcagcgcttcgatgcccaacgcaccagtaccggcgaacaggtccagtacacgggcatcatccagcactccccatgagtcgaggtgcgagaaaatcgcctctttggtgcgatccgtggtaggccgggtacccgttttcggcgtagcaagcgccacacccttgaatcgtccagaaattacacgcatagctttcactgtacaggttcatctgcgcataccaatcgtggaaaatggcggaatctcctttcccatcaaaaaaagattgcggaccgtcctcctctattaggaaagacggtccgcaacatttagtaacggatataacgcaatacgttaacgccggatggttcccttgaatggcttatccggagacaatgcgacacgtcccatatcagtccccagaacgttcagcgtaatctccgtaggcttcgaacagcgcaacgtatattccactgtctgatccgtccatgtcgcatccacttggattccacctcttgcgcggagcgcatggaagcttccctcatgccaatcctccggcagggccggaagaacgcgaatccagccatcgtggctttggacaagcatctccgacaaggccgccgggaatccaaggttcccgtcgatctggaacggcgggtgggcgcataatccgctgtcgtacactcctccgcccagcagattggtttcagcgttcgcatccaccggccgtaggaacatgcctatgattcgtttggcgtgttccgcatcacgcagacgagcccacatgatcatgcgccatacgatgctccaaccggaaccatcatcgccacgcacttcgagggattttctcgcggcttcctccagacgcggagtcttagacgtgatgcctgcaccaggatgcagttcgtaaaggtgggacagatggcggtgctgtggatcggattcgatgaattcgtcgttccattcaaggactcttccatcagctcccaatcgcgtttcagccagttgggaacggacggattccgcttcacggaccagagcgctgtcctcttcgtcaaggttttccaaatcgtgagaagcctgaatcaaatcatcaagcagattacgcacgatggccgtggcattctcactgctttgcgcaacggataccggttctccattcaccaggaaacagttctccggtgatgttgcaggggacggggccagcccatgctttgtctccgataggaaatccatgcagaatcgcgcgttgtcccgcatgattggccagatgcgggacaggtacgatgcatcctggttgaacagatattcatcgaacaggttccggcacatccatgcctggccgaacggccagaacgaccacatcggatcgccgtttgctggaagagccctacgccagagatcgacattatggaagacagccgatcctcggcagccgagaatcttgtcagcggcatcgtgccccggtgccagcagctcctcattcatggagacgagcggctcgatgagctccttgagcgcgcaggggccggtcatccaatagttcatctcgacgttgatgttcgtcgtgtaggcgctgtaccagttcgggaaatccttatggttccaaatcccctgcagattcgcaggttgggtgtgtggcctggatgaggagataagcagatatcggccgaaatcgaacatcgcctccgccagcatctccagacgatgcggttcttttttctcatccgagcgaaggatcgccgagaacggtagttccgtatcgtcatcatgggctgaaccgagatggatggccaccctgtcgaaatatttgcggtagtccgcgatatggcggtcgagcatggtctgcaggtcagtcgaccaatcgtcaatggttttctccagatggtcggcgataaccgtcatgcttcgttccggctgctggtcgcttcccttgaatccgctcatactgcggaagcggagcgataatccggtgatgttcgaacattgcagactgttgtcgtccacgttgatgtcgccacctgtgacggtaagggagaacgcaccggcgtacgccattccggttccgtcctgctcatcttcccaaggatgttcggaa

SEQ ID NO: 3372 - DNA, 3008 bp, Unknown
  R151_18m  MAG No. k141_25416
cggcattccgttgattatggcactttggccgcagaacggcgcgatttacgtggcgctgatgtcgatcatcgaccagacgctgctctggacgtacggcgtatggctgtgcgagccggtcgctgaaacgactggcggcaacgcgattggcgcgcgaggtgcggtcgcgaacggttcggtgaacggcgccggttcggtgggggaggctgcgaacatcggttctccggtggccgcctgcccctcgctaggcacccgcgtcctcggcctgcttaaacgattcgtcaaccccgccttcatcggcgtgatgctcgccctgattctgattctgcttggcgtcaaggtgccggacatcatcctcaagccgctgcacgccatcggcaatatggccacgccgatgtcgctgatctacttgggtggcctgttcgcgctgaccaagtggtggggcgtcctcaaacgctacgaactctatgttggcctagtcgccaagatgatcgcattcccgctcgctttctatgcgctgctgaccgcgttggccagcgtgctgccgcagctgcccatcgctcacgacatgattctgatgattaccgtgatcgccggcctgccgaccatgaccaccatcgccatgttcaccggccgcaagaacaacatgcccgactatgcggtcggcttcgtgctcgtaagcacgctgttctcgctggcctcgctgacgatcgtgtcggcggttgtgttctagtgcgccgcgcataggcgcataacagctttcatcacatactctttgcggtctcatcaatgcagcgcagcgcgtcgtattcggcttcgaccggctctagccattcgttcgaagcgccgtccactacattcataatggcgatatgcgcgaaatcgcggcgtcgacagttcgccagacatgatcgaggcggcatgtaaaacctatcctgacgttgatttccaactgtgcgatgtgtctacgcaactgaatgatctgccgactgacttcgacgtggtgttctccaacgcctgcatccaatgggtgccggaccatccgcatctgattcccggtctgctcgcccggctcaagatcgggggagcgctggccgtgcagacgccgatgaactatgaggagccgattcaccgcatcatcggcggtatcgtgcactcgcccgagtttgcggacaagctgtcgcaacagcgcgaattctgcaacctcacgccgcctgaatactgggagttgttgcacgcgcataccagcgccttccgcatctggaaaaccacgtacatgcacacgctgccctcgcatgaggcgattatggactggtatcgtggcaccggcatgaggccgtatctgcaagcgtttgacgacgccgggcacggtgacggtctgctcgccgatggccttgagcatgtcgtcgatgatgcggccggcgcgaagcccgttggacttggcccagtccttcacgtcctcgaccccggcccgtttcatgcccgcggggccgccgtatcgttcgagcagcgcgagcgtcgcttcgcgggtgatccgttcgcccttgagcgcgcgttcgaacgcggggtgggtctgcagcagcaggctccgcaggcggttgacgtggcgggtggattcgtgggtgaggtcctcgtcgtggccggcgagcagcttcagcgcggcgagggtctcgtcgtccaggcccgcgtccctgagcgtctcgggcggtagctgcgcggtcctgcgcatggccgtgccgggcaggtaggcgaccgcgatccccatgtcccgcgccaccgtcaggggcagggagcctatggtgttgggctggtccacgaccagcaatacgcggtcgcgcctggagaagtgttccagcatcgagcggatggccttctcgtcctgtttcagcggcttgtcgtacagggtgtcgccgtcccggtcgagggcgtgcgcgcccttgcccacgtccaggcggacccacacgtcgatgtcgtccggggtcatcatcgttcctcccgtcatgaaggttttccggtcgccgtggactcggaggagccccggacgtccggcgccgcacccacattacgacgagacctgcgtcatgcgcccctgaagtgtccgtgcagccggcctggttcctatcagcggtcatcgggcgtccccgttcccggcgacaacacccccggatcatcaacgacagggcgagagagtcataccggaaccggcgacccggccccgaccgtcgggacctaccagacatggtaatgggcagcacttcaggtcgggcagggagaacgggctgaggagcagatcgagcaaaccgagcaaaccaagcaagccaagcaaatcaagcaaaccaagcgtctgcggctacgcgtgcctcagtccgtcgaacgcatcaaagcaatgggcctgtaccgtgattaccgggccttggagaagaacgacaaggtggcgctaacccactgctttctccacggcgctgggtggcattatggtcatcgtcaagctggcgatgggcttgtggacgatgtccgtgctgttcatcgtgagcgccgtgtattacgcgatgctatgcatttcacgattcttcattgtcaaagcgcacactcgcaccgtcaaatagccgatcgcatgcaacggttcgctcaggaaaggaacgtttgccatcgcaccggcgcactgctgtgcttcatcgggttgagctacgcggcgttctcactgaccatgttttttaccggttcgccgaacgagtacggtgagattattgccattacggtagccacgatttcgtttatcaaaatcggcatagctatccgcggcatgattgtctcgtataagacccgcaacccccttgactcatcggttaaatttgtgaccttcattgacgcgatgctttcgctggtggtcatgcaggatgtgcttttagagtcccagggaaccgcgcacgcggcacaatcctcggacctgttcggtattgggctcggtactgtggccgtgattatcggtttgtggatgctattgcgccgca

SEQ ID NO: 3373 - DNA, 5311 bp, Unknown
  R151_18m  MAG No. k141_25500
gcccgccacgaagctgcgctacatgttcggcggccccatcgtcggcacgctgttcctcatcgcgatatcgggcttccccatagcgatgacatggatgttctggtcgagcgcgcaatgggtcgacaccggcagatccacacctgactggattggatggttggctttcttctgggcgttcctcgccacatgctccccgattctgttggccttgcgtttcgtcggaccgtgggactggcggggacgtttcagcccgcgcgcgggcgccgaacgctggagccggctgaaatgagcacactgctgatgggggccgggatgggcctcatggtcgcaatctcgctcgcattcatcctcgcgttcaacatgtcccggctccgctggctcatggaccacgacatccacccgctgctcgaggagcacggactgcgcgaacccgacgacgggttcacgtcctccggcgccaaggagcgcatggccgcgttccactcggacgtcgcggaggcgctggcagcgccggaacgggaacgcgaagcgagggaacggcgacgattcactgtgttcgacccgacggtcgacaagttgccgctgccggcgggcccctacccgttcgaccgtccgacggcgtcctgggcacgcgacatctacgaggaaggcgattgggcgtacgccgacgcatgggtcagggggcggaggaagccacgcgtggtgcgcgagcaacgctacgactcgtggcgcaacgaagtcctcgcccgccacggcctgaccgacgcgccatccgccacgctcgaacacatcgaacacgccgctgcacgcatccgcgccctccaccacaccagcccagccgaagcctacaaacaagcctgcaaggaagccaccggcaacacggtcaacgacgaaaccaccggagaaggaaaagaaaacggctcttccggttttggcgtgacccgcagcctcctccacaccggcggcttcagacacaccatacaagcccacctataagcatcccccctacacaccaaaaccggaagagccaattatctgccggtaccttccacccgagaggaaggtgtagtcctccgggtccgggcgatatcgccgcaaggcgaaggattttcgtgtaccgttccgtgaagacggagcgacaatgaccacgcggttggtctgaatcctcgaggggtggtccttaacaggaccacccctttttcgatggagagggccatggcgcactgggagaatccctcgaacaagaacgcaaaaaccctcagaatcggtattattccaagggttgtctgtggagctagccgggttcgaaccggcgaccctctgcttgcaaagcagatgcgctaccagctgcgctatagccccgtgagaaaaaaagagcggctcgcagccgcttcattttttctgtgggcccgggaggacttgaacctccgacctcatccttatcagggatgcgctctaaccagctgagctacgggcccgatccatacgcttcaaaagcgcacaagtaattacaataccattgaacggcggtatgtcaataacggcgtgtcgtgattgtcgcttgcgccatgattgccggctcgacggtcaatgtccagcaacgccacagccaatgcccagctatgtaaccttgcgttctcacaccgtaatgctgcggttacacctccctctctgcgcagaaatgtccaatacatatgaggcttctgctgttttcgtgggttgggttcttggttgtggtgggcgtatgtcgagtccgccgcggcggagcatgacgagggcgatgggattgttcgcgtggtggaagccgtaggccatgcggatggtgaccttgatcctgttgtcggacgcctcgagcctggcgtttgaacagcccaattcgattgtcccgaggatgtcgggcccatgacggcggatctttcgggcgagttcgacgatctcggggatgcggctgtgggacgcccggaacacccggcggtccagttcgggcccggcctggtcggccggtcgtttgggcatcgtccggaggggttccctgagccgtcatgaacggtagggccggcccttggggtccgtgtaccgcaggttcccggacgcctcggaccgtctgtcggtcagcttgccggggttcttcaggacggtgtatctgacgccgcgcatgcgcttgacggatttctcgtccccgtcgcggcgctgcgcttcgacggctacacggacgggtcggacctgtggcagtacgtcatcgcgaacttcggcaccctctgctgggtgccatcatgctcggctgtctcgtcatggtgtcctcggccaccgcgaaggcggtgttcgaggagtggggggggctgcgttccggggcatttgccggccgtccggcgtcacatcgtcaggctgtccgggtcgaggaggaaatcgtagacgctcatcgtgaggatgccgtgttcgtcgcggacgggtttgaccacgtcgcgtacgaggacgatcttctggaagctgtcgtcgatctcgagcagcgaggccttctcctgcgcgaccttctccggtgtgggcagttggtatgcggattgaatgtagcagcgccggttgccgattcgtgaggggcggcattgtgtgccgcttgttgtccgccgttgtgtaagaatgacttgcatgccttatcgccgtcgtcaatccaccgctccgaagtccggtgcgccgaaatccgttcggtccgctgccgccgggcagtcgttggacattgacggcatccatctgcacctgacgcgcaaacccatcaaaaacctgtatttgcgcatcaaaccgccgagcggccgcgtcgaaatctccgcaccgatgcggatgagcgagagtcgtatcgcggatttcgtcaaagagcgacattcgtggattctcgcccagcagcagcgcatggctgaggcgcaacggcgctccatcatggcattgaacgagggtgcaggcttcgagaacggaggtcgtggcgtagctggtgccagcggccatgatggaggcgttgccggtcgtccgaaaaccggtgatatcagtcgtccgagaatcggcgacgccgggccgggccaagccggtacgaacgtccagccgtattttgaccgctcccaaatctggaccgacgaacgcaaacgacaagcggcggccgcgatcaacgccgcgttgccacagctgctggccaagtgggggccggtcatcggccggcagcccacgcatatcacgctacgggtcatggcctcgcgctggggatcgtgtacgccgcgaaccggccgcatccgtctgaaccttcaattgggagtgatggaaccgcaattcctggaatacgtcttggtccatgagatgacgcatctgtgggaaagcggccatggcgccggattccaacgccgcatgaccgcctacctacccggctggaagacgctgcgccgcgacctcaaccgccgcgtggtgctgtgacgatgacgggtcaggcttcagtgccggtgatgtggctgatggcctgatcggattcgttcgcatggtccgaatgcgccaccatctcgatggccgccggacacccgctcaccgacgaagaccgctggccttggctcgacaccatcgccgcgtggatcgacgagcgcgtggccgccggcgagcccgccgtggtcacctgctcggcgttgaagaagatctaccgcgacaagctgcgccgtcaaggcgtggtgttcgtctacatgcagggcacattcgacgaggtgatggaacgcctttcccaccgccaaggccacttcatgaagccgagcatgctgcaatcccagtccgacattctcgaagagccgggcgatgacgaaattcacgtcaacgtacacatcggccaggccgatcccgaacacgaggccatggccgtggccggtgccctcggcctgtgagcattttgtaggctcccctcagtctcacttcgccacaagtacggcgcatcgacgaactcgaacggcgcatcagcgaacttcagctggagctgaagcagtgtgaaggccagcaagggcgaaccggatcggtccaaacgggctactcaggccgaccagcccagccagtccgttcagaccgacctaactgatcagagcgggccctctgaccagtccgaaccatctgaccgacatgtacttgttgactaagtgtgcggcccgcatgtgggcctgccactcgttgttgaacgtacggctacatttttacaaccacagaaatacggttccagtcacgttttccaaccataagatgcggttttggctacgttttccaacctccaaatggggagttttatacacttttccaacttatgtatgtggagactctctatttcacgtgagacgaaagtggctcccctctttgaggggagccacggaatactgcttttacttatgccaggtgagagcgcatgaaccactggaacttttcgagttcctgcacgtggtcctggatgatgttggagctgatcacatccagctcgtccagctcggcgatggccttgcggtcgtcggcgatgaaggcgtcatagtactcgatcagcgccttgagatactcctcggtgcccacgcggccctcggcgtcgaacgacttccacgtgcggttgcgcacgatggcgtccgcgcggccgtccggggtgccgcccagagtggcgatgcgctcggcggtctcgtcggcctgagccagcacggcctcgacctcggggtcaagcatctcgtgaacggcgatgaagttcgggccggtcacgttccagtgcgcgtgcttgaggaccagagcggcctcctgctcctggctcagtcggttctgtaggatggcgatggccttctcgctggccgcttcatcaaggcccggcacaacaaacgcaagtgtcataatgttccttctttcagtaggtggaacctgtccatataattctacgatttttggttatgccccgggccgaacgaataggtggtgaatatcacgtggctagttggcatcgtcgctttgtgattcggctggcagtggcgcatggtccggggcaccggctttgcggacttcgatggtttcgatgcggcggccatccaccttggtgatgaccatgttgtagccgtcgtcggaatgcagcacgtcgcccaccgcacccatcttgccggtcttggacaggaagtagccggcgaccgtctcgtacgggccgtcctccaattcgatgccggtcagatcggcgaagtcctcaatggtcatgctggcctcgatcgtggccacaccattgacgaacgcggtgcgggtggtgcgttcgccgcccttctcgctgggcagatcgtactcatcgcga

SEQ ID NO: 3374 - DNA, 11064 bp, Unknown
  R151_18m  MAG No. k141_25869
cgaggcacgccgcgccatcaagtccggtggcgtgtatctcaacaacaaccgtatcgaggatgaggagcaggtgctggccgaagccgacttcctggcaggccgcttcgcgctcatccgtcgtggcaagaaggcgctcggcgccgtgaaaaaccgttaatcaacaacgaattaaggaaaacaagtaatggcagaaggtaacgagcgttccggcaagtcctacggcggcggccataaggggtatggcgatcgccgaccgggcaaccgcggcggcaagggtttcaagccgcgcggcaagggcggtttcaagccgcgtcatgacggtgaaggtttcaagccgcgccgtcgtgaggatggcgaaggctacgcgccgcgccgtgatggtgacggtgagggccacggcggctaccgcaagtcgtacggcaagggtggcgacttccacaagggcggacgctctggtttcggtggcaagggcggctatcgcggcaacggtccgcgccgcgatggcgacggcttccgtccgcgccgcgaccgcgatggcgagggcttcaagccgcgccgccgtgaggatggtgagggttacgcgccgcgccgtgatggtgatggcgagggccacggcggctaccgtaagtcgtacggcaagtccggtggcttccacaagggtggttaccgcggcagtggtccgcgccgtgacggtgaaggtttcaagccgcgccgcgaaggcggctaccgttcccacgaaggcgagaacggcgagaacccgcgctaccagcaccgtgacaacgatcgtcgtgatttccgtcgcgatgatcgccgtgacttccaccgcgatggtgagcgtcgtgacttccgtcgtgacaatgatcgtcgtgacttccgccgcgatgaccgaagggataacgatcgccgtgatttccatcgtgatggtgagcgtcgcaacttccgccgcgacgacgatcgccgtgatggcgatcgccgcaacttccgcagggacgaccgccgcgacaacaaccgtcgtgacggcgaattccgcgagttttcgcaggaagagaagcgccagtaccgtgaggagaagcgctctgaatacatgaggcgtccgcgccgtaactccgacggcacgatgagcttcccctcgcagaacccgtacaccgaccgtcgtcccgacgagcccaagatgcccaagggcatggaatggtcgatgctgtccaaggatgagcgcgaacgtctgcgcggcctgtccaaggagcatgcggagaacattggtctgcacatcctcgccgctttcgcgctggaggagagcgatcccgaacttgccttggaacacgccaagtgggtggcccgtcaggcctcccgcatcgactttgcccgcgagacgctcgcgttcgtggcctaccgtcagggcgactacaagctgtccctgcgtgagttccgtaccgcctaccgtatgaacggcttcctcgactacctgccgttcatcgctgactgcgagcgtggtgtcggtgaaccgaagaaggccgtggaactggcgctgtccgatgagggcaagcagctgcatggcgctcccaaggtcgagatgttcctggtgtatgccggtgcccttggcgatttggagatgtgggacaaggccattgaagtggttcataccgtcggccgctctcagggtcttccgggtgagtaccgtatgcgtgccgtgcaggccgagcagtacttccttgaagaggccggccgcagcaaggaagccgagcagcttaatgacctgctggaccgtcttgaggatcagtatgccgacgaggagattgacgaaaacagcgacgacgtggtgattgaccacgatctcgaagacatcaccgacgactccgacgtgctcgagaagctcggcatcgatccggacgaggcgcagtacgccccggatctggagcaggaatacggcgatgaggacgacgaggctgaagacggcgatgccgagtctgatgaggccgatgtcgaaaatgctgagtccgaggatgcatcggaagaatctgaggaatctgaagccgaggagtcttccgagtccgctgacgatgccgttgaaccggctgagtccgacgagaccgagaccgaaaccgaggagtgagcggcgtaatgacccgtttcctcaaaggcaccgatcgcccgctcgccgaggcctatcagcttgcgctgctggacctcgacggcgtggtgtatcgcggcaagaatccggtcgaatacgcagccgattccattcgtgcggccgaagccgccggcatgaccatcgaatacaccacgaacaactcctcgcgcttccagcacgtggtggccgaccagctcaagggcttcggcttggacgtggagccgtggcaggtcatcacctcttcggtggtggccgcccgtgtggtggccaaggcgttgcccgccggcgcgcgcgtacaggtattgggcgccgagcatttgcgcgatgaggtcacccgcaacggcctgaccatcgtggacggtcctcaggaccgcccgcaggccgttattcagggctggtatccggatatgacttggcagatgatggccgatgccgcgttcgcggtcgaggccggagccacgtatttcgtgaccaaccgcgacctgacgattcctcgtgaactgggcatcgcccccggttgcggatcgatgattcgcgccgtgatcacggccactggcgtcgaaccggtcgcctccgctggcaaaccggaagcgtacatgtacgatgaggcccgcgaactgaacgccgccgaaggccacgatctggtgcccaaggaggcgtccatcgccattggcgaccgactcgacactgatatcgaggccggtaaccgcggtgactatgattcgctggcggtgctgaccggtgtcaccaacccgaccgaactgatgctggctccggcacacctgaggcccacattcatcgcccttgatctgcgtgaactcggcaaagcccaaccggagccggtccgcgacgagagcggtacttgggaatgccgcaaggctagcgcttggtttgaaaacggccaggtacacgtcagcgaccccaccagtatggacggcctgcgtgccgccgtatgcgccgcatgggaagccgccgaccaaggcgcacagctcagcgaggccacggtaccggtgttcgccatcgaggcatagtcctatgcctacggatagcgaacacgcgccggtcaccgagcgataccccgaacttgcggatattgatgaacaagacaacgaccgcaagcttgagacctatcgcaacgtgctggaatcgttacaacacgagcttgataacagccgcagctagcagaggagattcattctcccgccagcggaagatgacgtgaagtgctggatggtgggtccatgccgagccaccccgttggtggatggtgggtcgaaaggaaggtatatgaccgagcaacatatcgatccctcgaccccacttgatcgcctcgacatgatgctcgtggcttcgggactggtcgaatcgcgggccaaagcgcagcgactcatcaaagccgggcatgtgcgcgtggacggcgagaccatcaccaagccatcgttcatggtcaaagccgggcacagcgaactcgccgtggataagggcgacgactacgtctcccgaggcgcttacaaactcttgggcgcgttcgagacctttgccggcaatggccttaccgggccggaaagcttggaatgtctggacatcggtgcctccaccggtggcttcaccgatgtactgttgcgcgggggagcggccaaagtcgtggcgctcgacgtcggccacggccagctcgacccgcgcatcgccaatgacgagcacgtcatcgaaatgagcggcgtcaacattcgcgaagtagaggccgacgacctgccttaccggccggcgatgatcgtctccgacgtctcctttatttccctgacctatgtgattccggtaatcgcgcgcatcgcggctcccggtgcgcagattgtgttactggtcaaaccgcagttcgaggtcgggcgggcaggactcggcaaaaacggcatcgtggaagatccggcattgcgggagcgggcattgcacgacgtggtcgcctgtgctgaacagcacggacttgacgtggtggccactgccgatagtcccatcatcggcacccacggtaatgaggaatacctgctttacgctgtcttgagatgaatgcgtcggcagtctccgttcaccagcagcacgctggaggtacggtcgatgcctattgcggtggcacacgtggcgctttccaccgcactgccgttgcgtagcatggcggagtccgccgtcaaagtccggcattgcagatggttggcttcaaccgtgacggctgtgatatggcgaaccatgctgccatcctcatacccatccatatcaaaacgagaaaacatcgtactgcgcagtggatgaacttccagagccctgctgttgacgtcatgacccttcaacacgccgttcaagcggactgtctgaccgctaatatgacgggtgcctagggagccattgacggacagatttccggaacaaacgatatcgctgttgcatcgcagtttgccggtaaaggttatttcatcgcaaataatgtcgccgccgacttcgatgtcgccgctgccgctgatgctggatacgcgaatatcaccatcacaccgcacaatgccactcttgatgaccagtttgtccccttctataactgaggcctcgagggtgctggtcacaatcatggtgtgaaaatgcgcgccatcggcaagacgggaacgttggtccactcctatggtgccgtagactcctttgcctatcaacgtgcaattctgcgtatgcttgcccatgatgataaagccccctcaatatggacgtacagctttatggcttattgccccaataatgagcgcatccatgttgaggggggttatatcggtcacgatgtgagcagatagggggtatagcgagcgcagttaggggggttagccttggatgaagtggtcgatctgatcctgcttgcccatgaggatgagttcgtcgttgcgatgcatgaccagttccttggagccgtactggaactccttgcctggggccttgaggcccaccacggtcacgccgtatttgtcgtgcacctgcacgtcctcgatgctgcgacccaccgcgtataggggcgtgtggatcttgacgacggtgtacgggccgtcgatttcgatgtaatccagataattgccggccaccagatgacccacgcgcttgccggcatcggtctccgcattgatgatgtgacgggcgccgatgcgctgcagaatgcgcgcatgctcctgggacacggacttggcccacagatcggaaacgccggcatccagcaggttgccggtgatgatcaccgaagcctcgatgctgtcgccgatggccacgacggccgtgtcgaactgggaggcgtcgatctgctcgatggccagcacatcggtcatgtcggcctgaatggtgggcagatgcgcggaccaacgggccacaagctccgggttcttatccacggcgagcacatcctgacccatctggtcgagggtggcggccacggacccgccgaaacggcctaggccgatgaccagcacgcttttgttgccgctcggttttgctgccatgatgatggtcctctctatgccggatttctgtgtgccgattgaatggccgatcagccaacgataatgttttcctgcggataacgaataggttcgggagccatcggtctgctgatggagtaggcgatggtcaacgggccaagtcgtccgacaatcatctcggcggacagaataaacaggctggccggattgccggcgcttgccacgcccaccgaataaccgcccaacgagaaggccgagcaggcctcgaacacggcgtccacgaacgcgcagccggtggtgaacatcagcatcatcgcaccgaccataaccagcgcaaagcaggccgtggtcacggacacggcggtcatctggatgcggcgggggatacggcggcggaacacggtgacatcgcgatggccggtgaatgcggcgcggcaaatcaagagaatcaccgcgaacgtggtgacacggatgccgccggcggtggatgaggagcctgcgccgatgaacatgagtatgctcatgaacaccttggtctcattcgtgacttcgggcacccaggaaatatcgaaaccggcggagcggggcatgacggcggcgctcatcgcacggcgcatcttcatgccgggaccgtctgcggggaacaggccggtattgccccactcgaccagcaggaaccaagccagtgaggtggccaccagcacagcggtggtcaccaaagtgagtttggtgtgcaacgtccaacgtttcgggctgagatgtcggcgtgcgcactgcaccagattcagcaccacggggaagccgagcgttcctatgaatgcgctgatgagaatcggcagtcccacgccccaacggttcacatgcaggccggtggcgtcaggcgtgaaaccggtgttgttgtaggccgataccgcgtagaacagcgcctgccacaatgtacgtcccatattgccgtggttcacgcggaacaggtcgggcagcagcagcacgaaggtaagcacctcggcgatgatggaggtgcccaataccacggtgagtacgcctttgacctcggaaagcttcgtggtgcccagttcgttcgcggtaagcatgcgctgggagaccttgagtctgcgggaagcgccaagagccaccatcgaggcgaaggtcatgacgcccaggccgccgaactggatggagaataggatgacaacttggccgaacgtcgaccagtattcgccggtgttcaccaccggaatgccgcaggtggacagggccgagacggcggtgaagaacgcgaccgggaagttggtgaagatgatgtccgatgtggagatcggcagcagcagcaagccggtgacgatgatgatcagtgcgccgaaatacaccatggacagacggcccgggtgcctgagcagacggtcggtgatgctgatgcggcgaatgcgcttggcggttttatcgcttttgtctcggctcagtacatcggccgaataccaccatgacaggcccttcgaggcctcctcattggcggaggattcgtcgaagtcattggccatgggtcctcaagctcctcaactgatactgctgtatggtcatacggcatgccatcgcgctgcgcacggcacgcgtacggtgatcgcgcggctgtatgccattgtatgccgaagccttacgttaatcgactctgcggaacgttgtcggcgacgcgccacgaagcggcatttttcgaacacctgtacgactgatgacggtgtctgcggctagaataatgagcagtgcgaccgaatcgacaggaggatgccatggccaagcgcaacgcggtggtggtgacgcataccaggctcaggcagaccggaaccgtagtggccgaggcggtgagccagctgcgagtggccggtttcgaagtcaccatcatcgacaacaccgaggcccccgatttcggcgtgcagccgccgtgcgtgtcggacgacaccgaaatcgtcgtggtcctgggcggcgacggcacgatactgcgcgccgccgaactcgtccactgcacccaggtgccgattctcggcgtgaacatggggcatgtcggcttcctggccgaattcgaaagcttccagatcgacgaggcgatccgccgggtcgccacccacgactattcgatcgacgaacgcatgatcgcccatgtggacgtctggctgcctggcaccaccaagcccattgaggattgggcgctgaacgacatcacgctggaacgcgccgaccggggcaagatggtcgaactgtccatccgcgtggacgatgtggagatgaactcgttcggcgcggacggcgtcatcgtctccacgcccaccggttccaccgcctacgccttctccgcgggcggtccggtcatgtggccgaacgtcaaggccctgcagctgattccgttggccgcgcatgccctgttcgccaggccgctgatcatcggctccggttcgaccttcaccatcgatattctggacgattccatgtccgaaggctggatttgctgcgatggacgccgtcagcgcgccctgccgcagggtacgcgcgtcatggtgcgcgaatcgcgcgataccttgcgcctcgctcgactctccggcatgccgttcaccaaccgtctggtctccaagttcgatctgcccgtggtcggttggcgcgagcacgcgcgcaacgaggcctcgagccagccgctgcatcacgggcacacgttcccggcggccgcgtatgcggctggcgttgccggtgacgctggtgtcgctggtaccgatcccgacaagccgggcgaacgtgacggcaaggcaggagcctgatgctcgaagaactcgatatccgcaatctggggccgattcgagaagccgccattgcgccggccgcaggcatgaccgccatcaccggtgagaccggtgccggcaaatccatgctgctctccgcgatccgactggtctccggtggggccgccgaatcctcgcgcgtctcggccggggcggacgaggcttgggcccaggcgattttcgcgctcgcggatgatgccgtcgcatctgaacattccggcgacaccaacgatgccggtgacgatgccggttctgacgattctgacagcgggctcaccggtgctgccgcggccgtggccaaagcccacgacgcgggcgtcgaccccgaagacggcgaactgttcctttcccgcaccgtacgcgcttccggacgttcgcgggccgtgctcggcggcaagtccgtaccgcgttcggtgctgggggccatcgccggcgaactggtcatcattcatggccagaccgatcagctgaaaatcgcggccgccgcacggcaacgcgagtttctggaccgggtggccggagacgaagccgaactggccgcctaccgcaaggcgtgggatgcgctggccgccatggatgagcggctggaacgcctgcgctcgcaggaatcctctgcccgccaacaggccgactacctgcgcgaatccatcgaccgcatcaaccgaaccgacccgcagccgggggaggacgaggagctgaaggcgcgccgcgaacgcatcgaaaacgcggccgacatcgcccaaggcgtgggttcggcgctgggcgcgctggatgcctcgcaggtggatgtggatgccgccgacggcgcttcggccgtggaactcatcaatcatgcggtgacctcgttgcgcgcgattcgcgtcggcggcacgttcgccgagcaggccgatcggcttgaatccatcaatgccgatttgggtgacgtggtgttcgccctgagccaggagctgggcgacgaaggcagcgtggaggatctggaccagatcaacggccgtatccacgagcttggcgacctcacccgtcggtggggccccaccttggccgacgtgctcgcttggcgggacaaggcggcgttcgatctggaggatctggacgcctcgccggaaaaggtcgccgaactcgaatccgaacggcagacgctgtacgatgcggccctcgccgccgccgacgtgctgagcgccgtgcgcgtggctgccgctgccgacttgggcgcgcgcgtcactgaagaactcggctcgctcgccatgctgggcgcctccttggaagtgcgcgtcacgccgcgagacaaggccgatgatccgctcggcccgtatggtcgcgacgatatcgcgttcctgtttacgccgttcgaggggtcgccgcagttgccgatgggcaaaagcgcttcgggcggtgaactgagccgactgatgttggccttggagctggtggccgccgacacgcgcggcggtgccgaccagaccttcatcttcgacgaggttgacgccggcgtgggtggcaaggccgcggtcgaactgggcaaacgtctggcacggctggcccgcagcgcgcaggtcatcgttgtcacccacttggcgcaggtcgcctcgtgggcggacgcgcagttcgtggtcaccaaggagccgccggatgccgatgacgacgatttgggcgtggtcaccaccatcgccgaagtcaacggcgaaacccgcgtccacgaaatcgcccgcatgctctccggcagcgaatccgaagcctccctagaccacgcccgagaactgttgaaggaaagtgtcctatgaccaaagccgccatattcgacctcgacggcaccctccttgactccatgggggtctgggaccaagtcgacatcgacttcctgaacaagcgcggaatcgaagtgccgcccgactacatgaccaaagtctccgccatgcaattccgccagatcgccgaatacaccatcgcacgcttcggccttacagacacgcccgaagagctcatgcaggaatgggacgacatggccagcgtcgcctattccaccacggtcgaagccaaacccggcgcgcttgactatctgcgcgatctgaaagcctccggtgtcaaactgggtgtcgccacctcgctgcccccgcatctgcgtgagccggcgctacgctacgtcggcatgttcgatctgttcaacgatatcgtctccgtcgatgacgcgaacgacgtcggcaaggaccagcccgacgtctacctgctcgccgccaagcgcctaggcgccgcgccggtcgactgcacggtgttcgaagacctgctggtcggcatgaagtcggccaaatcggtcggcatgaaggtctgggccatgcacgacgactcctccgcctccgattggcccgaaatctgccacctggccgacggcgtcctcttcgacttccacgacgctccgcgcgtgctgtgataaaaaagttacacccccgctggcgggctgtcggcgggggcgttgttgggcatgggtgcccctttccgaggccattgtaggcacggcccatgtttcgacactgtatgttggcgaggtgtttgttcactgttcaactgttatgtaacacaccttgacagttaagcagaacagttatactgtgttgtataacagcta

SEQ ID NO: 3375 - DNA, 5228 bp, Unknown
  R151_18m  MAG No. k141_26296
aacgagcgagcctgacttgcggcgaagtgccaccggtccagtcataggccacgaaatcaggacgagacagccagtcgaacgccagtaagccggcggcccattcagccgcaccattcttgctcagcttcgccggccagctcaactggccgcggcacacctcaggatgatgttctttgtaccagttcacggcgcccgggtggaaggattcgatgacgtatggaccgtcataatcctcaagcagggcgtggcccttctccatcagctcctcggtacgagcatcccaagcgctattgtcgctgaacttgtattccacaatcagcggcgcacggccagccaccactttgagcacgtcggagaacagcggcacatgctggtagtagccagcgggggcggtggaaggcgtgaccaccagcggcgggttcgcgtcggcacccggcaacggttcggccttcaagtcaccggacttgccgttcgggaacagcggaatacgggtcagttcgtcgtacgtcagatcttcgatgcggcgcggatcgccggccacgcgcagcaggtcggcgtcatgcaccacgaccacttggccgtcaagcgtcagctgcagatcgagttcgatgccatagccagcctcgcaggcggcggcgaatgcggccagcgagttttcaggagcgatcggaccggtcatatccgcactgccgtagccggccttgacagccatgcgacgggcaagcgacacataatcatcgttttcggcgatggatcgctcagtggtatcggcttgggcgctgaccgaattatccccaccataatcagcgatatcggtatagccgaccaaaccagaacccgcatcgtgcaagccacgatgggcataccataccttcggaatggagggcacgaaattacgacgcttgtcattgaacgtgcgcggggccacggcccacacggcagcaccggcggcggccacgcctgccagcgccacgtttctccagagcttcgacgacattggaatccttcctgttgggctgtctctagcctaacgcttctgccagccattgtggagtggttggatcgtccggtttcagcgcgcggtccaggtggttggcacgcagcggctcccagctgaaatctgccagcagatcggcgggtttgcaagggattggagtgggttgcagacgcagcaaccaggcgcagtatccgatgatttgctcgggggttacgttgcgggcgcgcaaggctcccatatccagcgaacgttcgcgcttggctaaacgccgaccggccgcattgtcgatgagcggcaggtgcgcatactcggggtgctcggcgagaggcttttccgtgttgccgcattccggctcaaagccgccagccaacagacactggcgaatccacatttgcagcgcggtggagcgcagcagatcacggccgcgcacgatatcatcaacatccatatcgaggtcatccacgaccacgaccagttgatagccgaacagtccatcggctcggcgaatcacggaatcgcctacctcgcgggccaaatcgtagtgctgtggactatagacacggtcgttaaagcatgcgacaccatcaacgattccggcatcgccctgctgttccggcggcacggctcccgacagcgcagcggaatcgtcaggcactgtacgttgcttttctcccgctgccggtttcggcatggcgatacggatggaatgctggtcgccgcgagacagacgggcacggacctcgtcgggatggtcgtgcagcaggcggcggcacgtgccggggtacaccatgaagccgtcgccctcgttgggggccgaggcggcgcgaatgtcggcacgcgagcagaaacaggggtacagcacaccttgcgagcgcaggcattcgagagcgtattcatatcgttcagtgtgctgggattggaacatcggttcgccatcccagtcgaggccgagccaatgcaggtcgtccatcatgagctggcccgcaccggcaaccacgcgcggcttgtccacgtcttcgatacgcatcagcatgcggtcgccacgcgaacgggccgaaagccatgcacccaacatggcgtacacgttgccgatatgcatgcgccccgacggcgtcggcgccaatcgtccggtcactggctctcccttcgtccgttaacactcactttcctaccatatgcgacagtgaacaccttgatgccacggttcttccactcttggggaacacaattgagacggatcggacagatacttccgtttcaaggggctgatttcgatgttgcaggaggtctacttccatttcaaggggctggtagccaagtagacacggcgcaacaatggcggaatggcgttgccataaagccgctgatactcgcggttcggcagaagagcagcccctcgaaacggaagtagacctccgaaagggggcaaatcagcccctcgaaatcgagatagacccacaaagacgaaaaagtgggtatgactgctaccatacccacctgtttaagagattttgcagagaaaaatcactgttgcgaaaccgcccgaactcccctcagtcagcttcgctgacagctcccctcagagaggggagccagtgattgtcacttatcttcggtaacgttgtccacgctcacatccgggtcgtcggagacgatctggtcgctggcccaggcggaaagctccagatgctcgccgccggtctggtcgacgagcacggtgtcgccatcgtggaccttgccggccagcagcatgcgggccagctggtcgcccacttcggtctgtaccaggcggcgcagcggacgagcgccataagccgggtcgtaaccggtgttggccagccattcgcgagccgagtcggtgacgtccagcgtgatgcggcgatcggtcagacgctgggccacgccagccacctggatatccacgatgccgccaagctcctcacgcgtgagcgggtggaacatgacgatgtcgtccagacggttcaggaactccggcttgaagttcatgtggacggcgtccatcacggccttcttcttggcgtcggcgtccatgtcctcgttcacgaggaactgcgagccgaggttggaggtcatgatcaggatcgtgttcttgaagtccacggtcctgccctggccatcggtcaggcggccatcgtcgagcacctgcagcagcacgtcgaagatctccggattggccttctcgacctcgtcgaacagcaccacggaatacgggcggcggcgcacggcctcggtcagctggccgccctgctcgtagcccacgtagcccggagccgcaccgatcaggcgcgagactgaagccttctccatgtattcggacatgtcgatgcggaccatggccttctcgtcgtcgaacaggaagtcggcgagcgccttggccagttcggtcttgcccacaccggtgggaccgaggaacaggaacgatccggtcggacggttcgggtcggagatgccggcacgcgaacggcgcaccgcgtcggacacggcggcgatggcttccttctggccgatcacacgcttgcccaggtagtcctccatatgcagcagcttctcgttctcgccctgcatcaggcggccaacgggaatgccggtccagtcggagacgatctcggccaccgagtcggcgtccacacggtccgggaccatcggctcatcggccgggttggccgcgccggcatcggcagattcggcatccgcgctttccgcggcggcgagttccttctgaatagccggaatctctccgtacagaatcttcgaggcctcagccagatttccctcacgggtgaacttgtccgcctgcacacgcaggtcatcgagcttggcacgcaggtcaccgaccttgttgtggccggcctgctccgcatcccaacgcgccttgaggccgctgagcttctcacgggtgtccgcgagttcggcttgcagcttgcccagacgctccttggatgcaggatcctcagccttcttgagctgcatttcctccatttcaagacgggtcaccttgcgctgcagttcatcgatctcctcaggcgaggagtcgagctccatacgcaggtgggcagccgcctcatcgaccaggtcgatggccttgtccggcagctgacggcccggaatataacggttcgagagggtcgcggcggcaaccagcgcgtcatcgccgattgtcaccttgtggtgcgcctcgtaacgctgcttcaggccacgcaggatggcgatggtgtcttccacgctcggctcgcccacgaacacctgttggaaacggcgttccaatgccggatccttttcgatgttctcgcggtactcgtccagcgtggtcgcgccgatcaggcgcagctcgccacgggccagcataggcttcagcatattgccggcgtccatcgagccttcggccgcacccgcgccgacgatggtgtgaatctcgtcgatgaaggtgatgatctggccgtccgcgttcttgatttcgttgaggacgctcttcaggcgctcctcgaactcgccacggtacttcgagccggccaccatggagcctaggtcaagggagatgagcttcttgccttgcagggtggtgggcacgtcgcccgccacgatacgctgggccaggccttccacgacggcggtcttgccgacgccgggctcgccgatcagcaccgggttgttcttggtacgacgggagaggatctgaatcacgcggcggatttcctgatcacggccgatcaccggatcgagcttgccttccttggcggcggccgtcaggtcggtggagtacttctccagggccttgtacgagccttccgcgtccgggctggtgaccttcgcgccgccacgcacgccgggtacggccttgcgcagggaggctgcggtgacgccgttcttctccaggatttcggccgactggttcggcttgctggccgcgatgccgataagcaggtgctcggtggagacgtattcgtcgcccatctgctgcatttccttctcagcctgggcgatggcggcggtcagctggcggctggcctgcggctgcgaagtgctggagccggatgcgctcggcagtgcgaccaaagcgttacgcacggcggcgccgatggcctgtgggtctccgcccgcggcctcgatgagggagcgcaccacgccgttttcctgacgcagcaacgcatccatgacgtgcagggtctcgacctgcgcgtttcctgcggcggacgcactctgaatcgcgtcg

SEQ ID NO: 3376 - DNA, 8741 bp, Unknown
  R151_18m  MAG No. k141_26405
cgatcaggccggcgatccaccgtatgctcgtcccgttgccgatctctatccggatgatccgccgttcctcttccgacaggtgcgaatacacttgacccaaggcgcgacaccccttcactggttatctggacaatctccaatctaaagggtgtcgcactttcaaatagacaacgggccacattttcatgctttatgcaaaaaatgtgaggcatacgcacatttcccatcaaacgcacaggtgcaagaatggcagcaattcgccattttttgaaatcaccatgtgcgtttgacggcgcgtaagcctcaccttgttctcagcaggaccgaatttctgtgagctccctatagcgctcccctacgcaatatgtccgcaaacgaccacacaacatgggcgatacgcgccaattcggcgtagcggccgatggacagccactgcacacggtaccgttcgaaccacaactccagatcggcggcaagacgggcgcggcgcgaggcatccagcgcacggccggtcacatccttggtgtcacaggcgtcctcgccgccagccagtaccagcagttcctcgcccagtctattgaacagccgctgcccatccagcatcacccacagcagttccgggttcaatcctcctcgtgccgagccatcgagcaccgcaacaaccgcactgccgcaatcgatcaacgcccggtcgcaatcccggcgtcgttcgagtcgggcatggttccgcaggagcagccggcggcgcgcatcggcgcatcccagcgtacggtcaaacacgagctctcccccgcacgaccgttccacatacgatgccacatccgtattcagcatgccggtgccggaaccgtattccagctccagcacctgcacggcaaggtcccaggggaatgacaccccatcggagtcgatgcggacgaggcaatccatgatgcgaccggactcgtcgccatacaccagaacggagatccgacggttcatctcatgcgcatcgatctcaatcggattccacgcgttctgagcgccataacacaggcccggcacgctcagacgcggatcgttgacgtggccgtaatcgccccaatcggtgaccaccatgccttccgcgccatacttgacacccgccaatgccatgtgatacgtgttcagccaggcacccgcataatcggggaagaaccggctccaagcccgcaccgcggggcacacgaactggcgacggccctgcgcggcgatggtctggatgttgctctcgtcgatctgcggctcgtacatccagttgagcatcgtgatgtcgccgggcagcagatccatcgtgcgcgggctttcgagcgcgatgtccgcccacaacatcggctgccgaccatggcgggcgagcgtttcgcacaaatccctgacgaaaccggcatacagttcatcgcggccggcttccggcgcgtcctgcgcggacctgccacgtcccaagtcgaacgtctcatcgccgccgatattgaaggacttcgaacggaacagcggcgcgtattcctcaatcaggcacgaggcgaaatcatgggccttgggatcggcggcgttcagcgtgtgatgctccatgcgttcgatgaagctgaacgggcggtcggcgtcttcggggaactcacccagcccgcgatgctcacgggtgcgcagattcatgtacatgtgcccgaacgtggccaacgacggcaccaactcgatgccgcgacgcgcgcagtactcgtccagatacgtgatgtcggcggccgtgagcggatcggtgccacgccacgcctcgctgagctcgacgaacgcgaaggcatgctcgacatacagctggaactgattgtatttatataaggccagctggtcgacgaaccaggtgaggaactccatcgtcggcactcgtccgcgtgtcacgtcgagactgtaggcgcgcaccgcgaacgcgggcttgtcttggatatgcaggcagggaatggcacgcgaggtctgcccgatgatctgccgcagcgtctgcagaccgtaccgcagcccgctttcgccgccgccacgcacggcgatggtatctgaggcgaacacatccagcgtgtattcgtcatgcgccaatcgtgaatccaggcccagggatatgacggtgccgttcatcgctgccggcgcacccgcacgcgcatctcgcgcatcttcggcggcattggcgctggcgtcgtcttcacctgtggctgcacggacacggcgcgtacggacggtgacgccgcagtaacgctcgagctcgctggacagctgctcaatcggcagcgtttcccaagtctcatcggcaccttcggtggcggcatattcgggaattcgtttctcgatcgtcaccagggacccgatcatagccgtgccatgcgtgtattccaatgtcaccggagcgggaatcagggtgagacacagcgttgcggcatcgactgtatattcgaatgtgggcacagctgttcctttcatactgtttttattatcgttcgtccgctaatggcaggcgacacgtggtcgcgccgccatcagcggacgaatcgttggtgaggtacggcggcatacgctatttcacggcaccggtcgtcacgcccttcatgatgttacgctggatgagcatgaagaacaccaccaccggcagcgagaagatcaccgaagcggccatctgcccgccgaaatcggtgcccatggtgggtgtcgagaaggacgacagccataccggcagcgtgtacttcgactggtccttcatgaacgtataggcgatcatgtagtcgttccaggcgttgatgaacgcgaacaccgaggtcgagacgatgccgggcgcggccagcgggaaggtgatcttccacaggatctgccagtcgttcgcgccttccacggccgcggattcgaagatgtccttcgggatgttcaggaagaacccacgcatgttccagatcgcgaacggcagcaccatggcgatgtacgccaagatcagaccgctgtatttgttgagcagcccgagctggttgtagatgatgaactgcgggatgatgccgccggaggtcatctggatggccagtacgaacaccatgatcggcttgcggccgcggaagcggtacagggtcagggccgcgcacgcgaagaacgcgacgatgatcgacaggacgatcgagatggcggtcacgaccacgctgttcttgaggttggtcaggaacgaggtctgggtcacggcaacgatgaagttgtcgaacgagaggtgcgtgggccagaacacgggggtcgtggtcatgatctcatcgcgaggctttacggcggtgataatcatccagtagaccgggaagaaccatacgacgcagaacagcagggcgaggatagtggtgccggcgcggcgcgcgatcttgccggggttggttcggcggcggggtgatgcggactgcgctgcggcctgcgatacggcctgtgcaggacttgcactcattgacgtactcataggtcctctcctgacttgagcaggtaacggatgtacacggaggtcagcgcgagcagcacgatggtcacgagcacggaggcggccgaaccggtgccgatttcgaagctgacgaacgccttcttataggtgaagatgccgatggtggcggtcgtgtcctgtgggccgccctgcgagatgagccagatctggttgaacacgttgaagtcccagataatcgagagcatggtgatgaccatgatgctcggggagatcagcggcacgacgatctgccagtagcagcgcagcttgctgcagccatccagctgggcggcctcgatgcaggactggtcgacctgggtggtggccgcgtacagcgtgatggcgatgtatggcacggcctgccagaccacgagcagccagatctccagaaatgcgagccaggtgttgtcgatccaggaggtgttggtcatgtcgccgaagacgtgcagctgggtgagcagccagttgatgacgccgtaaccgggctggaacagccacttccagaccaccgaggatgcgacgttcggcatggcccacgcgaagatgagcacgaagatgaccaggtagcgcatcacaccgccgagtttggtcatcagctgggcgactcccatgccggccagcacgctgccggccacgagggctgcggtgaagccgaaggtgcgtagcagggccgcatagaaggccgggtcggtgagtacggattggtattgcttgaggccgacgaagtcgaattcgccggtgaacagcgtgcgctggctgaaatccgtgaaggacgtgaagatcatgaatcccagcgggatgaccaccagtgcgatgatgacgatgccggcgggcgtcagcaggaacgccggagtgtgattgccgcgtttcttagccggccgtgaggccggggcctcgccgtgcgcgagttgcgttgagcttgtcatggtccgacccgtcacttggcatacagctcgttggcgtgttcgtcgaacttcttggcggaggcctcggccttgctggtgtcggtggcgatgtccttgaacagggtcagcgagccgtcgctttcgatggtggtccactgcggggaggcgggcgtggccttggtgcgcttggcggcctcgaagaagccggtcagggcggtcgggaagtcgtcggaggccatggccttgtccagtccttcgacgttgttgggcaggtagccgtccttggcgaacacgtagtcgttctggatgtcagggctggaggcgatcttgatccacttcagggcaagatcctgcttggagcttttctgggccacgccccacacggagccggccatcatcgacggctggttctggccgctcaggccgggcatcgggaaggagccgagttcgtcggcggtgatgtctttgttgtattcctgaatcacgcggatggaggcgctgttgccgattacggcgccgatcttgccctcggccatgagctggctggtgtcggggctatcggtgtcgagcgggcgggaggcttcggatgaccacttgtgctggaattcacgccactgctcaaggccggacaccgattccttggtggacagggagctgacccatttgccgtccttctgcacggcgtagtcgccaccggcgtcccacacccactggatggcggtcttccaatcggcacccggcacatagaacggggtgaagtcctcgccttggtgcgcgtccttgagaatctgcaggtcggcttcaagctcggcgtaggtggtcggcggctcgttgatgccggccgcggcccaggtcttcttgttgtagaccactgcgcgggcggcaccgagggccggaatgccgtacagcttgccgtccatggtggcaggctcttccagaccggagagccaggtgacgccctggcgcaactcgtcagcgtggtcggtcaggtccatgaggccgccgctggccgcgaagccggcgacctgcgtattgccgaggtcgagcacgtcgggggggggtgctggtggacagagccgtggtgattttggtgctgatgtccttccactgctggttctggatgttgacctcgacgccggtctctttggtgaactggtcgttgatggccttgatggtggcctcgctttgatcgccctgcatgacccagacggtgagcttgccatcgctcgaaccggtgtccgaggatggtgcgcccatcgagcatccggcgagggtaagggccgctgccgtgacgatggccgtggcctggagcaccctgcggatggcggggcgtacgttgtgctgctgcttcatgatgttccttcccgtccagttgtgaaccgttgcggctcgcttgatctggccgtctccattgactggtggtttcttgtaaacgtttacgaaaaggagtataacactcacgtaaaggtttacaaatatcatgtgcgtgtcgtacttcacttaatatcggtaaatctcttttactatttacttcgtacacccttacggcagagaatgtttaccgactttcatacgccggcacggcaatccacaggcaccggacatgggccatgcggaatcatcaggaaaatcgcgcggtacaatcactgtgaacggtcctaggacaggaaggagacgggcatggccataccccgtaagccggccactatcatggacgtcgccgcggcatccggcgtctcctacgccaccgtctcccgttatctcaacggcaatccgcatgtctcggccaaggcagccgagcgcatcgccgccgccgtcaagcaggtgaactacacgccgaacaacgccgcccgatcattggtacgccaacgcacgcaaaccgtggcgttcgtggtgcacgggcagccggattcgctaatcgccgaccccaatatcaacaccatcctgctcaacgccaaccagacgctcggcaatgccgattatcaactcatcacgctgatctccgactcccctgcggccggcgcacgcatcgccagactcgcctccagcggattcgccgacggatggattctcaacacgttccataaagatgacccgctatttcagagattcgccaatatcagcgtgccggtcgccatttccggcgtcggctatggcagcgccatccccttccccaccgtcgatatcgacaatcgactcgcttcacgcaagctcaccaagcatatgttggggcgcgggtatcggcgaatcgcctatatcatcggaccgccgtacttgccatgttccgacgaacgactgctcggattccaggatgcgatggccggcgatttcgacccggcactggtcattcggtccgacggctggacccggcccgatggccgcaacgccgtcgtgcggctgctggactcgctggctgagccgtcgggtagccgacttgccggcgccgacgccagcgtgcccgagctcctcgccgagcatcatatcgacgcgctgatatgcggcagtgattgcatcgccgctggagccatgaattatctgctcgaccgcggcgtgcgtgtgcccgacgatattgccattgccggcttcgacgacagcgccgacgccacagccatgcacccgcagctgaccaccgtgcaccagccaatggacgcattcggcgtcagcttggccaccctagtgcttgaccagatcgagggccgaccgttccagcgcacggtgttcctgcccaccgaggtcgtggccagaggctccaccggagagtaggcgcgcagagaacggttctcaataatatctgtgcgcacttctctacgcccgaagcgcacatgggatatgccctaatcactgccatgtcgccatttgcgatgatgtgagattgttatgttcttgttcatttgagcgcacagatactactgagaaccgttctctgcgcaaatagacaatgtggataactccataagctggaaccacattgccctgcctggcttgcattcaagtccaaatcagctttacggtcgcatcatgagctcttttatgcatgaggatattgtcggccgacgccgagcagaacgtgaacgttgcaatgatgctgcgcgccgttcaaaaggtccattgctggtgggatacatcaatgcggccaactactacggcgcgcccatcccccgacattgcacgctatctgttgatgccgtgcacgcctgtgtttccagtgccaacaaacgcagacgaatcaaaggcgtggtcttccatgtgtttaagggaaaactggatatccgcaaaaaggactatgaacatttctggattgcctcgccggtcatgatgtgggctcagatggcccaatactccacattggaggaacttgcggccattggagcctctttgatgagccgcgataaacggcgcagaatggccactcgcaaggatttcgatacttacttggaaatcagtccgcggttcataggtcgtaacaaatgccacgaggcactgccctacatgacagagaacacggattctccgccggaaaacacgctgtttgggatgctgaaggattcgggcttgggatgccccaccgccaactatcgcgtgaatatcggcaactcatacgtcatattggatatggcatatccggactgccgcgtcgcgttcgaatatcagggagcctatcacgccgatccggcacaaatgcgaattgacgcggcaaagcgaaacgcattgcaactgctcggctggatcgccattctcgtcactgcggatgacctgagaacagccgacacgcggcatcgttttatcgagatggcccatgtcgtggtgtcccggcaacgcaatctcgccgattggaaccgctcatgggccattacctcttagcatcgcaccgataatgcgctatgccgctatttaccgcgaggtgcccgccagacatcgggctcgacgtagatcccccattcataccaaggcagcgcggcacggcgtcctcgtccatgtgaatggcctgcaggttaatgcagcctatccacgccggcagtgcgctccactgcctcgaccaccaggtcgcgggtgctgtggtcaagcgattcgcccaccagcagcgagccggacttaaacgccagcgccgcctacaaaagtgtgaggctgcgcaggctcacactgccaacagccgttcagccaaccctcggaaggtctggccaatgccatccgtgcgcaaggcaccatcgacatccagcaccgcgggacggcctgcttcgccgatctcgcgcacttcgggttccagcggcagctgggccatcagcggcacgtcatagccaagcgccgcgcttaactgttcagacacgcgctgaccgccgccggca

SEQ ID NO: 3377 - DNA, 13575 bp, Unknown
  R151_18m  MAG No. k141_26638
atggcgtcggaaccgtacttgtcgaacacgccgttcacgtccgggtagttgcgcaggtgcttggacatcttctggccgtcggagccgagcacgatgccgtggcagatcacgttcttgaacgccgggcggtcgaacagggcggtcgccatcacgtgcagcaggtagaaccagccgcgggtctggccgatgtattccacgatgtagtcggccgggaagtgctgttcgaacttctccttgttctcgaacgggtagtggaactgcgcgaacgacatggaaccggactcgaaccagcagtcgagcacatcggaaatacggtgcatgtgcgacttgccggtcgggtcgtccgggttgacgcggaccaggttgtcgatccacggacggtgcatgttgatgttgccgtccttgtcgcgcggatagtcgccgaagtcggccttgagctcttcgagcgaaccgtagacgtccacacgcgggtacttcggatcgtcgctcacccacaccgggatcggggaaccccagaagcggttgcgggagatggaccagtcgcgcgcgttggcgagccacttgccgaactgaccgtccttgacattgcccgggatccagttgatctgctggttcaattccagtagacgcggcttgatcttggtcacggacacgaaccaggaggagaccggcttgtagatcagcggggtggcgcagcgccagcagtgcgggtaggagtgcacgtagctcttctcctggaagaggatcgcgcggcgctcttccggaatctcggcgagcgggccgtcgccggcgcgcaggttgcgcaggatcggcaggttggcgtcgaacacgaaatcgccctcgtagtcagggcactgcgcggtgaagcggcagccatcgtcgagcacgtcggtgctcttgatgccgtgcgcgttcagcgtattcatatcgtcctcaccgtagggagcctggtgaaccaggccggtaccttcgacggtgtcgacgtagtcggcggtgaagatcgtgtagccgttcgggccgggcacgtggccttcggattcggcctcgtcacccgcgaagtacgggaagaccgggtagtagcgtcggcctgccagctcgttgcccttgagttcgcgcacgacctcgtaattctcgccgagttccttctcgtaatgcggcagcaaatccttgccgaggtagaacttcttgccagcgaacttgccttcggtcgggcggacctcgacgtagtcgatgtcggcaccgaccacgatggcgaagttggtgggcacggtccacggggtggtggtccagaagacggcgtaggcgtcgtcctcatcgcgcatcttgacggccacggatacggtggtgtcctggcggtcctggtacacgtcggcgtccatgcgcagctcgtgcgcactcaacggcgtgcggtccttcgggcagtacggcagcacgcggtagccctggtaggccaggcccttgtcgtagagctgcttgaaggcccacatcacggattccatgtacgggatgttcagggtcttgtagccgtgctcgaagtccacccaacgggcctgacgatgcacgtagttctgccattcgttggtgtacttcagcacagaagcgcggcaggcgtcgttgaacttgtcgatgcccatcttctcgatctggtcgaccgagtcgatgccgagctccttctgcgcctcaagctcggcgggcaggccgtgggtgtcccagccgaacacgcggttgaccttgcggcccttcatggtctggtagcgcgggatcacgtccttggcgtagccggtcagcaggtggccgtagtgcggcaggccattggcgaacggcgggccatcgaagaacacgaattcgttctggctgtggtcgccggaagggttgcgttcaacggactgctggaaggtgtcgtccttgtcccagtagtcgagaacggtctcctccatgtcggggaagctggggttcggcgcgacgtgcgcggtctcgccgccctcgctcgccttgggatatacgttttcgctcaccgtaaatctcctgttagtactgtgcactggtcctacaggagcgtcattgatggcgattgccgggcgccgacgtgtgccggctggtttcacgaatgtcacgtaccgaaccgtgggccgattagtcaatcgcctcgcagccggaaccgactgtgttccgcccggaacagccatgtctgccgttcctgcctacgaggacgatgacgagcgctggtatgcgctccgcaccgcggtaccacctcgcttatcgcaccggttgcgccgctccgaactgttgcactcggagccgcgagcctgcgcgaccgcttgtgttcggctgtctcgggccgatcccgtcggttctactgggcgattgccgccgttcttccgaagactccccgctgataacggatcactgcctcataacggtgcatatcctaacacgccacgcggtcaaatcgccgcccacggccacggcaccgtcaggagcccgatttagattgggaccggccaccacggaccgagaaaggattgtcggacaatgacgtatgatttcacgtccatcatgaacaggcatggcatggattcgatcgcggtcgacggactgggcaccgacccgggattcgcgccggacccgccacgcgagggtttcgacgtcatccccatgtgggtggcggacatgaacttcccgaccgtgcccacgatcccgcaggccatcatcgaacgggcgaagcatcccgcctacgggtacttctcccccaccgacgactattacagctccatcatcgactggcagtccacgcgcaacggggtcaccggattgacccgggaggcgatcggctacgagaacggggtcctgggcggtgtgatcagtgcgctgaccgcgttcgccgcccccggcgacggcgtgctgctgcacagcccgacctacatcgggttcacccggagcatcgaaaacaacggctaccgcatcgtccacagtccgctcacgctggacgagcgcggcgtatggcgcatggattacgaggatatggacaggaagctcaaggagcatcacatccacgtggccgtgttctgcagccctcacaatccctgcgggcgcgtgtgggaacgttgggaaatcgagaaggccatggaagtgtacaaggccaacgattgcgtggtcatttccgacgagatttggtccgatttgactctggggaaccaccagcacatccccacccaatcggtcagcgaggacgcacgcaacaggaccgtggcgttctacgcgcccagcaagaccttcaatctcgccggactggtgggaagctaccacatcatctacaatcccacactccgggaccgcatcgtggccaaaagctcgaaatgccactacaacgacatgaacgtgctttccatgcacgcgctgatcggcgcctaccggcccgaaggccatgagtggctcgacgaactgaaggcggtgctcaccggcaacgtcgattacgcctacgactacatcaccaagcatttccaaggagtgagtttggccaaaccggaaggcacctacatgctgctgctcgactgcgagcagtggtgcgaacgccacggcctgagcctgcccgagttggagaaacgcggctgggatgtgggcgtcgcatggcaggacggcagcatgttccaggccccctacagcatccgcgtcaatctcgcattgcccttgagccgcgtcaaggaggccatgcgccgccttgaccaatacgtattcaacgcgtaaacggcatgcatccgcgattgcggtgtcctggaaagacgaatgccgtcaacgaggttggtgcccgttggcggcattcgtcatacgttggccgaaccgggcgaaacccaagttgccgtgcgctatgaggtggatgccgccagcggacgtgtacatctgaccgcccgatatgccggtgccaccgatgcgccgacgctgccggcattcggattggaatggacacttcccaagcagtacgagaacctgcgcttctacggccttggccccgaggaaacctatcacgaccgtctgcacggtggcaagctcggcattttcgagcgcaccgcggccgaagacaatgcaccgtatctggtgccgcaggagaccggcaaccatgaagacttgcgttgggccgaagtgcttgacgcccaaggacacggcatgcgtatcagccaggccggcagcgaacatttcgcggcgagcctgttgccgtacagctcgctcatgctggaagaggcgacccaccagaacgagttgccgccggtccgtcacacgttcctgcgcctgttggccgcgcaaatgggcgtgggcggagacgattcatggggcgcgcccgtccatgagcagtaccagctgcccgccgatcgcgcctacacgctcgacgtgaatctggaactgttctaacagcgataaagaagctccctctgacgagggagcttctttatcgcacagagggagcttctttatcgtgctggtacgaaactgtcacgcaccactagggtggtggagatgaaggtatggtggtgcagcgtgcgccgactggagatggcctcggcaagcatcgtaatcgcagtatcggccagctcattctggtcgatatcgtaactggtcaatgtcggcgaagtgtactgggcgatggcttggttattgatactgatcacactggtatcgcgaggcaccagcactcccgcagcggtaaacgcctgcagtacgccgactgcaatcgagtccgcagccacgatgaacgcatccggcatgtcatctcgatgatcgttaaccgcttcctcccctagagtgcgcccggtgtccacagtgaacgcgccttgcgcgtaaatcaggccttccgcatccagccccaaacgctcggtccaattgcggaatgcggttaatcggccgtcttcggggtattcgtgcaggcccatcgtgaagccggcgccgccgatatagccgatgcgtcgtttgcccgaggacaccaacatatccaatgcgtccaaaatggtttggcttaaatccggttgtaccgaatcgaacaggctgggcgcaggattgatgtcgatgaatacgccatagggcaataccagatggagcttcaacagtctatccgaagagagtacggacggtccgatggagatgaagccgtcgaaatcaccggcgtcggcaatcagatcgtcgatatgggaaaacgacgtgagttccatgtgctgggctctggcattgtcgccgagcacggaccgtagttcatcgaaataggcgtccgccagttcttcctcgcgggtggcattgtcgagtacggccacacggcatggcaatgcgatacggcgtgatccggtagcgtagccaagctgctcgctgacctcgatgatgcgacgtcgcgtctcctctttgacagacaatgtcgggtccccattgagcagccgggataccgtggcctgcgagaagcctgatttctgtgcgatttccttcatcgtgaccatagttgagccttccacgcctcagtacgtaacaatacgcagtatttcagtaaataactttactacatagtgtaactcacgcccgctgtctatttagaagtgcaacgcccttgttcgttggttaattccagcagttcgtcggcgaatgcctcggggattgttcatatacgcggcccctaatgcaatggcctcaaccagcacgaatatgacgtgctggttgaggccattgagagaaactaccgaaaaccggtcagggcacaaatagctcacgaatctgggcggcggaaccgtaagacgcttgggcacccagaccggtagccgcatatgcagaaacgaacgaagccagctgagccgcttcacgcagctcaaagcctgaggccagtcctgccagcacggcacccatgaacgagtcgccgcaaccggtggtgtccacggcttcgaccagaaccggtgcgatgcgggtcaccgaagcaacagcacatgatgcatccagcaccatcgagccatcaccgccgagcgtcacaatcgcccggtcgaacccgagctcccgcatacgatcggccgcagccagccagtcgaatccggaccagtcgccgtcttcgggttcggcgataccgaacatctgcgccatctcatgctcgttgacgagcaggacatcggcaagctgcaccagctcgtccggcagcaccggcgtaaacggtgaattgttgagcagtaccggtacaccggcttcatgcccgatacgcgcagccgcggtaacggtctcgatcgggctttccaagcacaggccaagcacattcgccgaagtcaattcaccgcgcatcgcctcgatataatcaacactgacctgcgcattggagcccggagagtagacaatcgtgttctctccgttcgcgtccacggtgatgaccgtggtaccgctggcccccggtacatgacgcacgtgctgggtatccacgccggcttctcgcaatgcaccaagcaggaactcggcattggcatcggaacccaccgctccaaacatgtaaacagtggcgccaatacgtgccgcagcagcagcctggttgccggatttgccgccgggcaacacttgcagcgggccgccggtgacagtctcccccggtccaggcagacgctcggtgaccacggtgtaatcggcattcatcgaaccgacgacgcaaaccgtgccttggattcgatcaagtgccgcaagaatgtcagatgctgtcatagcatttcctttcgttgtcgttgacgaatagagccaacgatcactcgccgatctttttgcggatgacgagatagtagatcacgccgataagcggcacacaaccggcgaatacatgaggccacagcccgtatagaacacacaggcgaacagcgtgagcaccacgaagcccgagttcacggtgaaacctgcgccaataaagccaatggccatcgaattgctggtcttcgggtccgcccacggatcggcggtcacagttgcggtattggttgacatgcgaagtccttttactcggcgtgctcagcgagcgcggtaatacgggtcatgaattcgttcagggacttccggatgatcgagcagttcggtgatggcgagcgcgttacgcacacctttggtcaagcggcacgttgccgtaagtaccagtgatgccgatgagttcgacttccgggctgtccagcgcataggcaatggcaagcgcgtcgtctacaccggtgtcgagatcgagaatgagtttgttcacggtgtctgccctttcttggcaactgtctgttctctccattgatgacatattcctgccagcgtcatctggcaggaatatgggggcagcagctgcgaaaacgactactggtcggctcgttcaagcttggggatggcgaacgaagccagcagagcaaggcccagaagcacggccgacgcgatcattgccgccgagtaaccggcaatgccgcccgagaagctcgcgaatgcgttcatcacggcatatagcactgcatagctcaagcctgcgccgaggttgaacgcgcccgcattgaggccgggcaagtatcctgggttgtcgtccggcgacagcacaatgcccaaaccgttgagcatgatgttcgccgtgcccgcgtatgccacaccgagcaccaccgagataaccagcaaggcccatacgctcgggaagtgtgcaacgtatacgccgaacagcacgccgaccaagctgaccagaatgcccacgcggagcatgcgatggtagccgaacttggaggcaagcacaccggcgaccacgccgaagaccagaccaaccaaagcatatggggtcagcgtggcgaacgacaccacgtcggctcccaatccggtgccgaacttaccgtcctgagccaaggccggcacaacgccattcatgatggcgaacacgccggtcatggtgagcaatgtggtgagcagcaggccccaggtgcgcggctgcttgagatagtgggtggtgaccatcggtgcgggattgcggttctcgaccttccagaagatcacgaaggcaaccgcagccgctaccacctcgatagcgacgagcacccaattcgcgtcgccgagtttctggatttcgttgatggctagataggctgccaggaaggcgatgccaagaacgattgcaccggcccaatccatcttcggggtctctttggccgtgctttcatcggcgaacatcgacaccagcacgattgcgaccacggcgacaccgaccatcacccagaacacggaacggaagccgaacgtgccggcaagccagccgccgaggatggcgtcaacaccgccaataccgccgttcaccgaggtaagaatcgacatcagtcgcgcatatttggcatcctcagtcaccttggcgtgcagcatgatgagcgtcatcggcaccaccggtccgcatacgccctgcatcacgcgaccgaccatcagcatgggcacattcacggccaacgccgagaccacacagccgatggcggtgatgctcagcatgcccagcaatactttcttgcggcctgcgagatcgcccagtcgaggcaggaacagtgagaacagcgcacatgcggtgaagaagaccgtctgggtgaggctgatctgtgaactgctggtgttcagctcgcgctccatagtggtaagcgccggcgaaagcatggaagcgttgagctggaaagcgaagatcgccgccatcagcgcagccatcaaagcgacaatggacttgccgccctcatcaagcatttgttcggatttgactgtcgacatgactattcccttgtccttttacgcattcttcttcgtccgtcagccgatagcaacgatggcatcgacaatgagatcccagaacttatcgaagtcgagtttcaccgcgacctgcgtatggcattcctcggcggacggttccgggccacgcaggtcggcaacggtcatgcccagtgtcaggtcaccgtggatttcgacatccagcgggcaacggcgagtcgacaccacgctcggatcaatcagataggcgaccgtgcagggatcatgcaccggcggatcgatgaagtcctgattatcctgataggtcttgcggaagaagtccataagtccgctggcgaagtgcgacaaatcagtgccgatggcatcaatgcgatgctgaacctccggagtacacagcgcctgatgggtcagatcaaggccaaccatggttagcttccacggctcgttgaacacgatgtgcgcggcctcgggatccaccttgatgttgaattccgctacggcgctccaattgccgacgtggtatccgccgcccatcaggacgacttccttgacgcggtctacgatacgcggctccatacgggcggccatggcgatgttggtcagaggaccggtcggcacaagcgtgattgttcccggctcgctggccataatcgtatcgataatccagttcacggcatggccggaatccagaggacgggtgggaaccggcaattcaacgccatccaaaccggtctcgccgtgaatcgatgcggcgacctcctgcttgcggacaaggggcctatcgcaaccggcgtgcaccgggatgtccgtggccttcgccatttccagaacggaccgggcgttgtacgtcaccttttcaaggctctgattgccgcccaccgtggtcacacccactaggtcaattttggggttgcctacagcaagcatgatggccatggcatcatcatgaccgggatcgcaatccagaataatcttttccaccgaagtgctcctttgcttccataacagccgctgggtcatctctgactcccgatgatttaacgtttcatcatcggcttatctgaggataaaacgttaaatcactattgtcaatgcctcatctacctgcgtgtcaaaggtatccgcgcattcctctcgaagccgcttgaatcacacttccgctgattgattggcgacggacgcggaactaacctcacccacagattcgcgtttgatgaacatcgtgggcacggaatgcgtgatgccgccatccatggatcccgaacggatgcgttgcagcaatagctccacaccctgcttccccatcagatccgcctgttgggaaatcacggcgatgcgcggcgtcatcacggtaaacgccgaaatatcatcgaacgacaccaacgacatgcgttcgccaatcgccaccccgcggtcatgcagcagtccaatcaccgtgaacgcatccggcgaatatgcgcacaatattgcgctcacccctgcacccagcagcatctctaccgcagcggcacgcgattcataagtggagtcgcaagctgcgacaacgccatcgccgtcggcaagcaaatcggcggcagcctcccgaaacgcggtctctcgttcgtcaatactgaacgattcgagcgaaggatgagacatatagcccacacgtcgatggcccagacgcaccagttcttcaagagcctcacgaatgcccgtatatggatcagaaaccacaaacggcaccgactcgacaccgggaacgcgacgatcaacgaacaccaacggcaagtctcgttgtatcaacgattgcactccgggggatttcacaccctgcggtacgacgatagccccatcaatgcgttggcccaaaagattctcgataaacacatcctggcgttccacgctttccgaagacgtgccaatcagagtggagatcccatgccggtagagttcatcctccatcgaagcaaccaaatcggcgaaatacggattgcacaaatcaggaaccagcaagccaactgttttggtacccgacgaacgcatggagcgagcacgctggtccggcacataccccatttcttcgatcgttttcagaaccaattgccgggtctcatcagagaaacggcctttatcgtgaagaatctgggagacggcagcggctgatacaccagcccgctgcgcgacatccttcaacgtcacgaatgccatctcggcctcctccttgcgactcatatatcatcagaccacaatccaatgtacccttcccctcaccaatactcgcaattcccaccaagacttatgcttctcatgcacaacaaaagcggcatatgtcccctgagacatatgccgctttgtaatctcatcagcaaccaggcgaatttgccgtcaaactactccagctccaccgcgccggtgtagagctgatagtactcgcccttttgcgcgatcagctcgtcatgcgagccacgctcgatgatgttgccgtggtcgagcaccatgatcacgtcggagttgcgtacggtggacagacgatgggcgatgacgaagaccgtacggcccttcatcaggttatccatgccggcctgcacgacttcctcggtacgggtatcgatggaagacgtggcctcatcgagaatcagcgcgggcggatcggccaccgcggcgcgggcgatggaaatcagctggcgctgaccttgggacaggccggatccatcaccctcaagcaccgtgttgtatccctcgggcagcatacggatgaagctgtccgcattgaccagacgcgcggcctcaatgcattcctcatcagtggcgttcagacggccataacgaatgttgtccatcacggtaccggtgaacaggttcacgtcctgcaacacaatgcccaaagacctgcgcaaatcaggcttcttgatgccggccacggagatgccatcatacagaatctgaccttgctggatatcgtagaaccggttgatgaggttggtcacggtggtcttgccggcaccggtggcgccgacgagcgcgatcttctggccgggcttggcgaaccaggtgatgtcgtgcagcaccggcttgtccgggttgtagccgaaggtcacgttggtgaagcgcacgtcgccgcgcagcagcgtataacgcccatcaggcgaggtgatcgcctgctccttggccttcatcgccacctcgcaggcggaaccgcgcagcttttcggcggccttcagagacctcgtaccatcgtcgccgatctcacgcttccacgcccagtggccggtctcatggtcgacttcggtcatggtgcggccgtccggcccaagttccacgttcacgagcgtcacggtgcccttgtcttcctcgatgggttcgtccatcaacttgaagatgcgggaggcgccggcgagcgccatcatcaccatggtcagctgctgggagacctggccgatcgggttgatgaacgagcgggacaaggtcagcagggagacgagcgtgccgagggtgagcggcttgacaccggtcagaccgatgtcattgacgccggccagcgaaacggcggcaccgacgatggcgagcaggatgtagagcagatagcccatattgccgacgaccggcatggtcacattgccccaagtgttcgcctcggcggacgcctcaaagagttcctcgttcttctcatcgaaggtcttctgagtggcgtcctcatggttgaagaccttgatgaccttctgaccattgacggactcctccacgaaggcgttcacgtcgccgatccactgctgctgcttgacgaagtagcggccggaacggctcacgatcttgcgcacgatgaaatacagcagaacggtgaacacaatcacgaacgcggtgaatggaatggacagccacagcatggacagcaatgccgcaatcgcggagataatcgaggagaacatctgcgggaacgactgcgagatggcctggcgcagcgtatcggtgtcgttggtgtagtggctcatgatgtcgccgtgctcgtggctgtcgaagtagcgaatcggcagcttctgttggtgggcgaacatatcgtcacgaatcttcttgagcgtgccctgttcaacggtgatgatcagccactgccaagcccaggatgccacgataccggccacatacaggcagcccatcagactgatggcgcgcagcaacggagcccagtcggggttcgattcccccaccatcggcaggatgtaggtgtcaatcagcgattggaggaacagcgcggatccggcctgcgcggcggcaccgatcaggatgcacaccacgatggcgataacgcgcaatttgtattggaagatgtagctgaagatgcgcttgatggttccggggtcggctttgcccatgtcaggctcgcgattcttgaaactctggtcgttgctcatcgtgcttctccttccttggtatcggctgcattggtatcagctgcgctggtatcggccgtgggcatggtcactgtcaccgtcacggtttcggacggctcagcggtagatgactcagcagcctgtccggcagcggccagttctccggtcttagcctggttcttggtctgggattcgtaaatggaacggtattcatcacaagtggtgagcagttcctcgtgcgcaccggaggccatgatacggccggaatccatcaccagaatcatgtcggattcctgcacggaggccacgcgctgggcaatgatgattttcgtggtgtccgggatctcgttgtggaatgcggcgcggatcagcttgtccgtcttggtatcgacggcgctggtcgaatcgtcgagaatcagaatcttcggcttcttcagcagcgcacgggcgatgcacaggcgctggcgctgtc

SEQ ID NO: 3378 - DNA, 5736 bp, Unknown
  R151_18m  MAG No. k141_26670
aaatcgcccctttgcctgcggcatctgtgacactggtaattgtgatttacggttatgttcgggtgagtagtgacaagcaaacactggagaatcaacgatttgaaattgagcgtttcacctgtgtcgaaggactgaaagtagatgaatgggtggaggagaccatcagcggcactaaagctctagacaaacgaaaactgggtccactattggatagagtaggagaaggtgatcttatcgtctgttcagagctttcgcgtttggggcgtagcctgttcatgattatggacgtgcttggggaatgtatgaacagaggatgccgggtgtggactatcaaggatggttaccgtttgggtgatgatatccagagcaaggtattagcgtttgcattcggactgtcagctgagattgagcgcaacttaattagtcagcgaaccaaagaggccttggcacgacgtcgagcagagggtgtgcgattagggcgaccagtgggaagcttatcagcaacagtaaagctgtcaggctatgaggcagacattcatgccatgctggagcaaggctgtaccaaggctgacattgcccgtaaataccacgttcaccgttctaccgttggtaggttcattaataaccatatgtctgatttatgactacaatttcgcggaatgctgcatctcaaggacttttaaatctttgaaattgcaacattccgcgggattgaccactcgttgatcacttcacgcgcttgatgccgagaacggcaacggcggcgatgatggccatcgcgatggtggtcgggaacacgaagttgtaggagaccagaatcgtgacgatgctggaggtaattgctacgccaatggcctggccggcgcagctggcgatgttcatgaatccgaggtccttgcctgcggtctccttgttcggcagcacatccacgttcagcgcctggtcaacggacagatacatgtcgtagccgaaggaagcgataccgccgaagaggtacatgcccatcgcggtcgggaaaatccatggcatggccagacccacggcgaatacggcgcaggcgaccatgatcgggaccttgcggcggccgagggcgtcggcgatcgggccggagatcagagaggcaaccatcgaggcgatcatcgtgagcacggaaatgacctgaatggtggcggcggcttgggtcttggactggccgatgtggtcttgcgggatatacagctgataactgaagatcatctggtaggcaacgatgagacaggtgcggcagatgaaggcgcggtagaaatcgccgcaatccttcagcggcggggtaagggactcaacaacgaccctccacagcggtttgccggcatccttgtgcatgttcttggaagagggttcacgcggggcgataaccacggcaagcacgccggcgagcagtgcgcacaggccggtgcacacgaagccgacttccatgttggtgatgaagagggagccgatcagcgtgccgatgccctggccgatcacaccgccgccgccgatggccgcggagatcgtggcgcgggattcctcttcaacacggtcggaaatcagcgcgtagatcggaacctgcaccatgttgagtccggtgagggcgagcacatagcagatgccaataatcagagcgctggacgggcggctcagcgaccagaagcagatgccatacacgaaagcgccggtgaagatccaaggcgtgcggcggccccacttgctggcggtgcggtcggacagagcgccgacgaacaaggcgatgaaaatggaggcgacggagcctgcggagttgatggcgccgagcacggcggtggagttttcgatgcccagatcgcgcagacgctgcggaaccaggatggacatcgtgccgtagaaggcgatgccggataggacggcgaaggccgtgaaggccgcggtatagcgccacttgttggttttggaggacgggctcggggccacgcttgcagttgtcatgattgcagctttcccttcgttgagggattacatggagaggattacggattactcggatttcatgtgggtgcgtgcggggccctctgtgtggaagggccccgcacaaggcggtcatcagcggagctgaatccaagcggacgtgtcttgcggaagcaggccgtcctcggtgagcgagccggaagtcaagagcaccttgccggcgggcagcgcggccggatcggcgccgaagttggtgatcgaggcccagccattagcgcgcttgtaggcgatggtacttccagtgaatccgttggcaccgtcaggtttgccagaagaacggtcctcgggtaaccaagcgaggctcaaatcggtggtttgcagctcgtggcgcagcgcgagagcgcggcggtacaggttgagcatggaatccgggtcagcgctttccacatcaacggcgaaatccttgtaccacttgggctgcggcagatgcggctcggcggcaggggtaccgtcggcgcgagtcgcgggggagaagccgaaggagccgtcggtgccaaactcatcggacgggtcggcaagattcggcgcatccgcgctgttccacggcagcggcacgcggcagccgtcgcggcccttggtggacgcggcctgcgaggtgcggtggccggacgggtcttccacacgatcccacggaatatccgccacctcgaacaggccgagctcttcgccctgatagacgtaggcggaacctggcagcgccatctccataagcacggcgacgcgggcgcgcttggtgccgagctccttgtccagcgggtaggtggtgccatcgcgcagcacccagtccttggtgagctggtggtattcgctggtcggcacctgcggcaggccgtagcgggtggcgtggcggaccacatcgtggttgctcatcacccatgtggcggaggagccggagcgttcggcgctggcgataccctcttcgatggcctggtgcatggcgtcgcgaatccagtccttcttggcgaactcgaagttgaagatctgtcccagatcgtcgggactggcgtacaggtactggcggttgggttgcacccatgcctcggccacggcgaacgccggaggattgtactcgttgaagaccttgcgccactcgtggtagatctcatgcacttcgtcgcggtcgattaccgggtgcgtgccgtcatccggctggtcggacgtgcaccacaccacgtagtcgtcgagatcgtcgcggtcgagatccttggccaaaccgtgggccacatccacgcggaaaccatcggcaccgtggtcgagccagaagcgcagcgtggtgaggaagtcgtcgcgtacctcgcggttgttccagttccagtcggactgctccttggtgaacatgtgcaggtaccactggccgtcgggcacgcgggtccaggccgggccgccgaagtggttctcccagttggtgggcggctggtcgccgttcgagcctttgccgtcgcggaagatgtagcggtcgcgttcgggggagccgggggtgtctgtttccacggtgtcccgggcattgcgagggctggataaagtcaaccctgagactcgcgccaaagtggaggcagctgccgaacgcctgcatttctcgttctcgaaaacggcatcctcgctggccagcggcaaatccatgcgtgtggccgtgcttatgcccaacgaaatcagcagctggttcaacgcgcatacctttgaaggtatttacgaggtgctttcgcgcgagggatatgacgtggtgccctatgtgatgtggggcgacgctgaccttgaacggtttttccataccctgcccggcacgcagaacatcgatgccgtgttcatcgtctcgttcgtgttggacgtcgccaaacaacgtgtgctgtcctctctgacgataccagtcgtcggcatcaataccccctctactgatgggtttgacgcctcggtgcggattgatgacatcgccgcaatgcgtggtgtggtgcggctgctgcgctcgttcggccatgaaagcgtggcatacgtggagcagccgatgcagccttcccctttcgtatgcagcgactcggtgcgcatggaaggtttcctcagagcagttgacgatcagaggtacgacgacgggcatgtgctggtgattccttctgtggaacaggcgacgatgggtaatgaggctgccgccgtctctgacatcgcggcgcaacttatcggttccgatacgcaacccaccggtatctgtgtggagaatgaccgatgcgcggtgttgctgctcaaggaactgcgccggttggggtggcgtatccccgaagaggtttccctggtcggctttgatggtgaaccgctgagcgatgtggccgatttgaccacggtgcgtcaggacccattgagtggcgggcggctggctgcaaacaaggcaatggctcttatgcgaggcgagacgctggacgagcctcatacggttatgcctacttcgctgctgatgcgtgccaccactgcgcgccttggtcggtgagctgatggggcgcgtggaacattggctgcgagtctgaggtctgatgactgggtgtttgcggggcggtttccgggatgcgggcaatttgtagtggctgcgctgtagtctgaactgttctgcaaacgcgaaggcatgcgcatgtcaggcaaatgacatgcaagaaaatgcaaggaaaagaggcacaccatggtcgacagccatgacgcggaaacatacagcgcgaaggactcgcgcctgatttggatcgattgcgagatgaccggacttgacatcttcggcggcgacgaactcgtcgaggtgtccgtggttcccaccgactttgacctgaatgtgctggacgagggcgtggattacgtcatcaagccgtccgagaaggccgtgaaccacatgaacgatttcgtgcgccagatgcacacccgttccggcctgatcaacgagtgggaaaacggcttgagcctggccgaggccgagcagaaggtcaccgagtacgtgctgcgcttcacgccggaaggcgtgcgcccgctgctggccggcaacaccattggctccgacaagaagttcctcgaccattacatgccgaacctcatgagccacctgcactaccgcagcgtggacgtgagcaccctgaaggagctcgcccgccgctggtacccggccgtctacgagaaccgtccgccgaagaacggcggccaccgcgccctcgccgacatcatcgagtctttggacgagctgcgctactaccgcaaggccttcatggctccggcacccggcccggacgatgccgcctccaaggccatcgccgccgacatcgtggccaccagcattctcaataagtagtccgccgtacttggctcccctcacagaggggagcttagagaggttgatatgcgccaaaccgaagccttggccattctgaacgccggcgcgaacgtgttcctgaccggtgcgcccggtgccggcaagacttatgtcttgaacgagttcatccgtcaggctcgggccgatggcgccagcgtggctgtcaccgcgtctaccggcatcgcctccacacatatcaatggccagactatccactcgtggagcggcgtcggcgtggccaccgccttgagcccgagtctgctcaaactcatcaaatcccggcgcaaacgcaagattcaggctacggacatcctcgtcatcgacgaggtctccatgctgcacgcatggctgttcgacatggtcgaccaagtctgccgcgaagt

SEQ ID NO: 3379 - DNA, 24954 bp, Unknown
  R151_18m  MAG No. k141_26921
cggcatgggcatcctgcccgaccatgagcctgtgctcacggtgatcaagcagggtacgctcaccgtggttgagcccgatggcgatcgccacatgttcgaggtgaccgacggattcatctccttcgactcgaacaaactcaccgtggcggtcgagcgcggccacgacgtccagtactccggcaccgccgagtgatctgaaccaactcctcaaggggctctctggttttccagagagccccttttgctatgtatgccatgtgttgcgctacagtggtggcctatgcgagttattgttgccgactgttcggccgagtattcgggccgcctcaacgcctcactgcccctggccaagcgtgtattgctgatcaaggctgattccagcctgttgattttctccgaattgggctcctacaagccgctgaactggatgaccgcgccctgcacgattcgtgagatcgacccagccgccaaatccgcgcaacattcccgggaaagtgtcgctggtggggctgtggatggtgattccgcgacgcattccccggaaagtgtcgccgctggtgagccggaaaaggtgctacgtgtcagcgccgacaagggctctgacattcttgaagtgacgctgcaacacatctattccgaccaaacctatgatctgggcgaagatccgggtctcatcaaggatggcgtggaagaccatctgcaacgctatctggccgagcagatcgagcgtatcggcaagggagccaagctggtgcgtcgcgaataccctaccgccattggtccggtggatatcatggccgtgaatgccgagggcgagcatgtggctgtggaaatcaaacgtcacggcggcattgatggcgtcgagcagctgactcgctactgcgaactgctcaatcgcgatccgctgctggccccggtgcatggcatcttcgccgcacaaaccatcacgccgcaagcccaggtcttggccaaggaccgcggcttcacctgcctcatcctcgattacgacgatatgaaaggcaccgaggacgacagtctcaggctgttctgattgttcttggcttccctcttgaaggggagttttcgaacgtacatagagagactgaggggaggcctcacggtatattccgtgaggcctcccctcagtcagtttcgctgccagctcccctcttggggagagccatcgagattgtttagtacgcggcgagaatatcgattacgaagaccaacgtggagttggcgggaatcgaaccttgctccttatctccataggcctgatccggcggaatcaccagcagaacctgagagccgacggtctggccgaccagacccttctgccagccctcgataacctgatgctggccgctggaatcgctgaacagatcggcgtcgattgtggaatcgcgatcccaggacgaatcgaactgcttgccatccgtaagccaaccggtgtacttgaccaccacggtgttcttgtcggtcagcttggcgccgttacccttgatcagcgtctgcgagatcagcgaatcaaccgaaccctgaccgttcatgtcaatggacggcttgccattcttggctcgcgtcaccttcggcagattggccggcacatccttgacttcctcgccagtggccttcttcaggtccttggacttggatacaaacgtcatcgccaaaatgtaagagtatccggacgaatcctgagcgttgacgccaaagccgatcgtggtgttgatcttggcacccttgatctggttgtagtaggtcgaggagagggtcttggaatccaccttcagcgagcaatccggcgtgttcttggtccaggtgtccatgagctcggtgccgtctttaacgttgagcgcgatgccttgggcgcagacgcggtcgccctcctcgattacgtcgccatcgcccttttgcagcaccacataggagccgtcggacacggtcatcggcgtattaaaggagatggtcggcttctcgccgagcttgcccttggcggtcacgccggcaatttgccccttcttgtcagaagagtcggaagaggatttcgagtccgagctcgaactggagcaggcagccagcgatacgcacatcgccagcgagcaggcaagagcaacggccttgccgagaggggataacatagatttaacagacttacgcatgacacaccaccctactggtgaaccttgattttctgcgctcctaggtaataaacaggtgaagattgtagaatggttaagttatgagtgctgaagaacagactacaagaccggataagggcgccaagcgtccatcccgtcatgccaagatcatgcgtggagtggtgacgcctatcttcggtctattggccgtggcggctgtggtgttggggtacatgaatgccacgatatggaagccctccactgaaatcaccgcttccgcaaccatgagcggctcccggtatgccgtcactgatccgaatgtgctgaccttgttggatcagaacgccacgataaccgtggactcgggatcctctcaggacgaggcgtgcgtggcgttgggtccgtccaaggatgttgccggatgggtcgcgtccgagaagtcctatacccgtatcaccggattggcgtcatggagcgagctgagcacccagaagggaagcagcacgagtcagggagcgcctgccagtgccgatgacgcggtggcgttcaaggattccgatatgtggactgccgtgaaatgcggcaccgggtccgtttcgctggagagcaagaagaccggcgcctcgacggtggccattgtggatttgggtgaaaatgccaccaacgccaaggtgcagctgcactgggtgcgctccgaagtgccggactttgcgatgccgttctatctgtccggtggattgctggccgtgctggccgtattgtgcgcctccgtgttcgccatgccgccgcataagcgccgcaagcgcatggtggaaggcacggcaagcgccgtaattgaggaagaggcacccgccagcatcgcagtgtccgggaagccggatggtgcaagtcgacgtaatcgtcgccgccacgccacaaatcggcgttcgggccgtgcgtcctcgcaatctgaagccaccgaaacaccggttatcatcgacccaagttcacgtaacctggtcgccgaccagcagactggtgccgagagcggcgctgagaccggcttcagcgccggcgataacgaatcgacttcggtaatcacccctgacgaactgcaggcctacttctcccgcttggcccaagaggtcaataccggagacgactcggccgatgacggacaggaggaaagctgatgaacaagcgatggaacaaactgtgtgtggccgccctcgcctgcgtggcgttggtcgtgccgttgaccgcctgtgaaggccggctgccgacgccggctgctgatacctccaccaaggttgcgccggatttgaccgaggcacaggagaagaagattcgcctgaagattctcaagacgatcgatgaagccgatcaggccaagaatcccgatggatatgcggccgttatgggcgggccccagctggacattcgcatcagccagaccacgatcaaccagcgcggcggcggtatgtccaaatacgcgaccattcccaaggacatcgcccagacggtgattcccatggacgacggatggcctcgctcggtgttcaccatcacgaccaccaccgaagatcagcagtccaagcgtttgctggtcttcgatcaggaatccgcccagcagaattacaagctgatggccatggctcgactgtttgagggggccaagctgccgaagttcgagattccgactattggctcgcggatgggcactgcaaaggatgagaagctggtggccactcccgccgatgccttgacccaatacgccgatgtgctgcagaacggctccaagagccaatacgcttccaagttcgcagacgatttgctgcgccaggaactggccaataccacggccaaggtgcaggaaggtatgcaacgcaacaacggtacgcaggagcagaaattcaccgttgtgcctgaacagatgtgggtgatgcgtgctgcagacggtgccggtgatttggtggttggccgtattaacggcgaatggactcgcaaggcgggggatggccgcgaatcgcagccggcttccgacgacgagaaggcgctgttcaatagcgacaagtacaccagcaccatgaaggtcacgtatgtgaacgtggtggccttgtacattccgttggcaagctccggtgagcaaatcaccgccgtgggtgccgaccgtcagccggtaaaggtcgaagcgctgtagttgttgccgccgcccaccgcgcggttaacgccccaccacgatatgattcatccaccacgatgtcggtaagttttacctttcgcacaatggtgccgttttgagtcacatcgtggtgggcgttttgctacgtggtgggaatttcaccgcgtagtggaagaatccctacgtggtgggaatcggcattacaatcaatgtcagcaaatgtgattgttgttgtacgcgaatcgcgtggaatcgggaggcattatggtagagcagcagttcaatccgggagtctcattggcgggcgccgtcgatttggaggcgctgaagcatcaggtcaaggccgagcccggccaggcgggtggcgctcctgccgctggtgggtacgtgatcgacaccaccgaaaacaccttccaggcaatggtgcagacttctgcgaccttcccgatcctgctgctcctgtggataccgaccgatgaccgcctgttcccgatggcccgtgcgttgggcgacgcggtgaacgccctgaacggccagattcagctctcccgtatcgatatctcgtccaatccttcgattgcccaagcgttgcaggtgcagggcgcgcccgcactgttcgcgttgattgccggccgtccgatgccactgttgcagggccttccgggtgacgacgagctcaagcaacttaccgacgaggtgattccgaagatcattcaggccgccgcgcagtctggtgtgaacggtaccgcgccgtactcgggtgatcctgattccgatgccgccaagagcgctggtgccaccggtgccggcgtgggtgctgagcaggtgccgccggagcatgccgaagcccatcgtttggccgaggagggcgattacgccggtgccgccgccgaatacgagcgcgtgctcgaatccgacccgtccgatgcactggccgcccgcgaacgtgcgaaggcgctgttgctggcccgctccgggtccgctgatgtacgtgacgtgcgtgccgctgccgccgcagcgccggacgatgtggaagcgcagttggctgtggctgatatcgacatgatcggtggccagattcaagacgctttcgaccgtttgctggactttttggccgccgggcacaaggccgatatcgagccggttcgcaagcgtctgctcgaatacttcgccatccccgaacccaccgacccgcgtctggctcgcgcccgccgtcgcctagccaccctcatgtactaagtggttttggctcccctctttgagaggagctgtcaggcgtagatgactgagaggagcgcgcgagcgtacttgattgattcccctaaaccatccgattcttcccgaaatattgctggaaccttggcccctccagcgccagttcctcctcgaaatcatccgcccacttgcagaacggacggttggcgagaccatcgttattgaatcgcgcctgatcggtgatttcggtgatgcagaatttcggaatcgtcagattggtaaccggcccggatcgttcggcctcggctacgatcagcggcgcgttcggcccgccgaacacgtccacgctccagccgtcttccgcaatccacacggaataccggttcttgatgattaccgagccgccgcgcttgatgagttcggcggcgatgcgcgtgtcgatctcgcgctcgacctcgtagcgcgtgccacccacggacggacctttgacggtgacatacgcttccgagaaccggtcgcggtactcgtccagcacggccaccggatttacgtcgggcgtcatgtcgacgtgaaccttgtgcgagaccagccgcacgcgcaaggcgtaattgtcggcatgcacgtagtagctctgaataatgagggtcggggcgtcgccgtcgtcgtattccgccggcagctcgcggcagaagaagcggcgttcgtattcgaagtcatctgtaggttccgacataaccccattgtagggccgatgatggcgattttctcgttattttggcgacgtatgtgcctcatgcagcgtgatgtggtgtacagtaaagaagttgctcgggtttgtagctcagtggatagagcgtctgtctccggaacagaaggtcgtgggttcgatccccatcaagcccaccagcatggctttcggctagccgtcggaagccttttgcatattcggcgcgtgatattaagcgcgtgcaaagctggtgctggtgcaaagctggtgctggtgtcggggtcggtgatgccggctcgcttgggtcgtggaaaaaccgcccggtttggcgagaacggtagtcgaatcgtctggaatcgtctggaatagcaaggaatagtctgttgatggccgtatgccgggcatcatgcgcgctaaacgcgacttcgctcagtagactgctacgtaatcggcattgccaatcgttgctgatcgtgcgattggtcgtagccggtggtgatgtgtaccggcgccggccgcagcaggtgggcgcccccaagatgagaaggagcacaatatgagcgaaaagatggaagccgtagccacttccgaggcgccggccgcgctgggcgcatacagccaggcggtgaaggccaatggcttcgtgttcgtatccggccagctgggcattgatccggccaccggcgaactggcgggcgagaccgctggagagcaggctgcacaggcgctgaagaatattaagcacattctcgacactgccggtaccggcattgagcatgtgtgccgtgccaccatctacctgaagaacgtcgaggacttcaaggaagtggacgcacgttacgccgaggcgttcatcggctccgtcaagcccgcccgcgtggcctttggcaacaacatgattcccaagggcgcgctcgtggagatcgacgccatcgcggtggagtgattcgaacgtttccccggcggcccgtctgcgcgcatggtgtgtgcagacgggccgccgcgtattgtgcgacgcattccggggaatgtcgcgctaggcggggtgtgaggggtggttccgcggcacattcccgggaatgttgcgctggaatcgttgggcggtggtccgtgccacaatagagaccatggcatccaaaggaaaaccgtcgccgcgttcggccgtaagcccgctgagtgatgagcaggtcaagcgtctggccgcccgccacacgcttgtggactcgacacagtattacccgaccggccctcgcacgcccaatcagccggaaatcgacgcccagaatcccaaggccaccaaacgactgctgggaggggtgtccattgtgttccgcgccagctgcaagaccaaggcctggggtctggaacaggtgccggaaaccggaccgttcatcaccgccgccagtcatatcaccatgtttgatgtgttcgtgccgatgatgagcctgttccacatgggccgccgcccccgttacatggccaaggccgagatggcgaagtggccattgatcggcaagtggttccggttggtcggcatgcagccggtgcagcgtcattcgggcaaggccaagcagatcgaagagacctcgattgatattctgacgtccggccgcccgctgacggtctggccggaaggcaccgtgacccgcgacccgaaaaagtgggtgatgagcattaaggagggcgtgggatacatcgcccttgaatcctcgcgcagactggggcatcaggtgccgctgtacccggcggtgacgtggggtgccgcctccatcaaccactggtggccatggccgcgcaaaaacgtggtgatgtgctatgaccatgcgctcgattactccgatctgcttgccgacatggactcatggggtgaagagccgcctgccgaggccgtgaacgagctgatgtggcgcgtgctcaaacgcatgaacacagtactggaggaaattcgtggcgagcagttccccgctgaaggctactgggactaccgcagcatgagtcgtaagccttggccggaagccggcggcccgttcccggctgagaagtagccgcaccggttcccgtacggggagcctaggcgagtagcatggcacaagattgtgccgatgaagttgcgcgacaagcgaaggtaggaatctgatatgggtaaaaatataacggttctcggtgcaggagcatggggtaccgctttcggccaagtgctggcggacgccggcaacacggtgaccatgtgggccaaggagcagcggattgtcgaggacattcgcgatcgccaccacaacgccgtgcgcctgccgtccgtcgaaaagttgccggacaacatgaccgccaccggggatcgcgccgaagccgtcaagaacgcggacatcgtggttgtggccatcgccgcgcagttcgcgcgagtggcactcgtcgaattcaagggactgattcccgatcacgccatcgtcgtcagcctgatgaagggcatcgagcgtggcaccaacaagcgtatggacgaagtcgtccgcgaatcccttgacctgccggccgaccggttcgccgccatttccggaccgaacctgtccaaggaaatcgccgatcgtcatcctgccgccaccgtggtggcttgtacgaacctcgataatgccacgaaggtggccgaggcatgtaccacctcctatttcaagccgttcgtgaccaccgacgtcatcggcctggaaatgtgcggcagcctgaagaacgtgaccgcgctggccgtgggcatggcccgtggtgccggctacggtgagaacaccgcagccatgatcgaaactcgtggactggccgaactgaccgcgctgggcgcagccgctggcgccgatcccaagaccttcttcggcttggccggtgtaggcgatctcatcgccacctgtggctctccgctgtctcgtaactatacgttcggcgcgaatctcggcaagggattgacggtcgaggaggccaccaaggtcagcaacggtgtggccgaaggcgtgcccaccacggatgcggtggtggctcttggcgagcagcttgatgtgccgaccccgttggcgtatcagatgagccgcgtgctgaacgaaggcatttcctgctcggagatgcttgccggactgttcgggcacgaggttaccggcgaataacgagagaagcgacgtatacgtggcgtatacgtcgtacgtgcaaagtcgtgtggcgtatacgtcgttgacgtgcgcgagtagactggtgtgcgtctcttgtgcgcggcggtccgagcgcggttcggtccggttggcggtgcaaagcataggcttgaaaacggttgtagtttcaataaaaggatggttatggccaagaagcgtgttgtggtgctctatggtgggcgtgcagacgaacattcgatttcctgcatctccactgccggtgtgctgggggccatggacactgaacggttcgagccgattccggtcggcatcaccaaggacggcaagtggatcatcaacggcgaagatcctcgtggctggaatctggatggcggcgagctgccgaccgtaaagatcaccccggaatcgcgcccggtgatgcttgacccctctcgcggccaggacggtttcttcatcggcgagcccagccgcatcaattccgccgattccggcttcggcaccagcttcgtcagcatgtccgacccggaaatgcaccatgcgctgacctcccttggccatgtggacgcggtactgccggtgctgcacggtccctatggcgaggacggcacggttcaaggcctgctggaaatgatgggtgtgccgtacgtggggtgcggagtgtttgcttccgccgcctgcatggataagcattacaccaaggtggtgctgggtgccgccggcattcccaccgcgcccggtgtgacggtcgatgcgcgcaacttcaccgccgccgatgtgcttgccaagatcgaggacgccggtcttacctatccgctgttcatcaagccttcgcgcgcaggctccagcttcggtgtgaccaaggtcgagaaagccgatgaccgcgagacccagcaggatcgtctggccgccgccatcgccaccgccggcgagcacgattggaaggtgctcgtcgaacaggggattgatggtcgcgaaatcgaatgtgccgtgctgtgcccgaaggccggtgacgagcccgaggccagctggcccggcgaaatcgtgctcgatcatcagaacgacgaccagttctacgatttcgactccaagtacatggatgcctccgccagccacgtggaagtgccggccaatctgccggtcagcgtgcttgaggacgtgcgtgacgtggcccgtcgcgcgttcaaggccgtggatggtgccggcttgagccgtgtggacaccttcgtgacgcctgatggcacggtgatggtcaacgaaatcaacaccatgcccggcttcacgccgatttctatgtatcccaaggcttgggatgccaccggagtgagctacaccgaactcatcacgcgattgattgagggcgtgctgaggtaagtgtggtgcggaatcggccgcaggccggttccgctattgacacattgcccatacctgtcagtaattcatgccaagttttcctaagttcaacaggcgtacggcaaatggcggacgcaattcacttgcacgccagtgtcaggacagattaggcgcatagtttcttttctggattcacgggccgcgcgaatgccgcgcataccaagcccgactccccagactgtcgtctggatgatgttgagaaaaggaacagtatgaacaacctgcgtaagatcgcggccggctcccttgccgccgtactcgcgttctcgatggccgcctgcggctcgagcaacgcctcctccgatggcaccggcaaggccgtcaccgtgaacgagaagtccgccaaggccacctccctcgccgatttcggcaccatggaggaccttgagaaggctgccaaggaagaaggcgcgctgaacgtcatcgccttgccgcatgattggtccaactacggcgaggtcatcgagggcttcaagaagaagtacccggagatcaagatcaccgagctgaacccgaacgcctcatccaaggaagagctcgacgccgctaagaccaacaagggcaccgacgccgcccccgacgtcttcgatgtcggccaggccatcgccgccacctccaccgactacttcgccccgtacaaggtgcaggcctgggacaagatccctgatgctgccaagaacgccgacggcgcctactacgccgactacaccggcatcatgtccgtgggctggaacgccgacaagtacggcgatgtcgcctccctgaacgacctgctcgatccgaagttcgccggcaccgtgtccctgaacggcaagcctaccgaggccggcgcggccttcaacggctatctgatggtcaaccagctcgccggcggcgacatcaacaacctgcagcccggtctcgacttcttcaagaagctcaaggaagccggcaacctgaacaccatcgatgtgaccaacggcaccatcgactccggccagaccggcgtggtcttcgactggacctacaaccaggcctcctacaagaaggaactcaagtccaagggcgtgaactggaagtacaagaccttccccaaagcccaggtcgtcagctactacaaccaggccatcaacaaggacgcgccgcaccccgccgccgcacgcctgtgggagtaatacctgtacaccgccgaaacccagaacctgtggttcaagggcggcgccaacccggtgctgctcgactccatgaaggccgacggcaccgtcgaccaggccaccctgaaggacgccatcaccatcgaaggccagccggtcacctacagcaacgatgactccacccgcatcaccgagtggcttcaaaacaactgggacaagacgatcggcaactgagagtccacgatgaccgccgcaatcgcacccatcgcaccgaacggacccgccgcctccaaggccgcgggtccgtccgccgcatcgacccccgcttcgtccgcactggcgaagcaccgtcaggagcttggcacgctcgccaccacgctcccgttcttcgcctacaccgcctgcttcctgctggcacccaccgtgatcgtgatcatcggcgcgttccaggatcgcagcggcggtttcacgcttgcgaacttccacaagatgttcgaagccaacaccatcgccgcgttcggcacgtcaatcctggtgtccgtggcctcatccctgatcggtgccgtggtgggcgcgctcgcctcctacgcgctggtgatcggcgccaagccgaacggaccgctgcgccgtatggtcgccgccatctcatcggtgctcgcccagttcggcggcgtgatgctcgcgttcgcgttcatcgccactcttggcatcaacggcatcggcaccatgctcatcaaaaccctgactggctataccgtgaacccgaattggctcagctccctgccggggctggtgaccgtctactgctacttccagattccgctgatgatcatcatcttcctgcctgcggtcgattccattcgtccacagtggcgcgaagcctgcgagtcgctcggcggcaacaccgtccaatactggacgcgcgtggcctgcccgatcctcgcaccccgcttcatctcggcgttcctgctgttgttcgcctccgcgttctccgcatacgcgaccgccgcagccctgttctcgcagcgctcgattctggtgccgttgatgatccaaggtgccatgcgcaatgagatggaccccaaccagcagggcttcgcgcaggtgctggcattcgcaatgatcatcgtcgtggccatcgtcatgctgctgagccacgccgtggaaaagagggccggacgttggcaatgaccgaaacttccacaaccaagccgccgcagctgcgtgccgcccgcgtgcgcaaacagagcatcatcaaattcgtgatcctgttcgtcaccctggcgttcctgttcgtgccgctgctggccatgttcatcttcaccctgcgtcacccgttgtccggtcgctggtcggccgcgccgtggacggcgattttcaccggcaacggcgaatcgttgggcgccgatctgagcgtgctatggcagggcgtcggcatctcgctgtcgttgagcgccgtcaccgtcgtgatcatgctcatcctgctggtgcccaccatggtcatcgtgcatattcgctccaaagccttggagcgtgcaatcgaatgggtggccacgctgccgctgaccattccggccatcgtgctggtggtgggtcttgggccgatctaccgttggctttccgccgacgtgttgagcaccaacccgatctggctgtgcttcgcctatgtgattctcgtgatgccgttcgccttccgcgcgatcgccgtgggcctcaactccatcgacgtcaagacgttggtcgaagcctcccgatcgctcggcgcctcctggcccaaagtgttcttcaaggtgatcatcccgaacctgtggcagtcgatcctctcggcatccttcatctccatcgccgtggtactcggtgaatacaccgtcgcctcgctgctcggccgtatgaacctgcaggtcgcgctctaccagctcggccaatccaatgcccaaatttccaccgccatgtcgctgctggctctgctcttcggcgtggtgctcctcgttgcgctcgacctgatctccgacgcaatgcgtaagtcaagggaaggtaagtgacccgatgaacaacgattcaactcccacccgtcaggaaaccggtaccgcagtggacgccgccccggcgtccccggccatcccggcagccgtgtcctccactgccgaggacgccttcaagaacgatcccaccgctaccctcgagggcgtgcgcggcaaggacgtgaccaaggccgccaaggccctgctcaaagacaccgccaagcgcggcggtggttccattcagatgcagaacgtcgtcaagatctatcccggctccaccgttcacgcgctcgacgacttcaacctggacatcaagcccggcgaaatggtcgtgctgctcggtggatccggttgcggcaagtccaccgcgctgcgatcgcttgccggtctcgaagacatccaaggcggacgcatcatggtcggcggacaggacgtcaccggtgtgccggtgaacaagcgcgagatggccatggtgttccaggcgtactcgctgttcccgcacatgaccgccctggagaacgtggaattcggcctcgaagtgcgcggcatgggcaaggccgaacgccgcaagatcgccatggaacagctggagctcgtggggcttgccgatcaggccaagaagtacacgcagcagatgtccggcggccagcagcagcgcgtggccctggcccgggcgctggccatcaagccgcgcgtgctgctgctcgacgagccgttgtccgcgctcgacgccaaagtgcgcgtccagctgcgtgaccagattcgccgcatccaactcaccaccggcaccacaaccgtcttcgtgacccacgatcaggaagaggcgctggccgtggccgaccgcatcggcgtgatgaacaagggcaagatcgagcagatcgccgccccgcaggacctgtaccagcgccctgccaccgagtacgtggccacgttcattggactcaccaaccgcctgctcggcgcatccaatggcgacgaggccgtggtcttcggccagcgcgtgccgctgctcgccggctccgccaagggcgattccgtggccgtgctcgtgcgcccggagaacctgatgctggccttggctggcagcagcgattcgcacgtcggcgaacgcgcccgcgtggaggtcattcacttccttggctctttggttcgtgtggacacggtcatcacctccggcgaataccagcgctggaacaaaggtgaacagctcaaggccaccgtgcagctgcccgccagcgagctgccggccggtctggcggtgggcgatgacgtgattgtcgccccgcgtccggtcgccgcgctcgcctgctgaatggcgttgcgatgatcgtgcggttctgttctgttttgtgactgtacgatcgtcgaatggcttatcggcaatgatatgtgtgggacggcggcgatttttgggcgattatcgcgtgccgtcccacgccggtgtgggacggcatgaacgtcaaacgatgtacattcgtgccgtcccacagattgtattgaggaatcgttgcaatgacgccatttcttcgtgcggcgtcatcagtcatatgtggagtggtgtgggccgccgcgaaaaaatcgggcaaaatcgcgtgccgtcccacaacaatcccgcagaggagaggactctctcggcatggggattgattgacgtagatcattccttgcccattgatgattttccccattcccaatgcaatcgaaacgccgtgccgtattcttgaagagtattgcacgtgtgatcggtccgtttgcggccagtgactatgggggataagtatgagcgaaccaatgccgtcggcgcagcagccgcaacaaaccccacgcgattggtggttcacggcccatcgccggttttcgacaatcggctcggcgctcgccattatgatggtgttctggatcggactgaatattctggccactgaagcactacgaacgctgcttggcgccgatgtgcccgcttgggctgtgttgctcgcctcctccgggccgctgtatgtggtggccatgccgctgagtatgttggccttcactcgcgtaccggttattcgcacccggcagtaccccatgaaggcgggggagttcattcggattttcgtcatgtgcattccggtaatgctcttgggcaatatgatcggcaatatattgtctgccggagccactgatggtcaggccaccaatcgcatcaacgacgtgattcttggcagcgactggcgggtgaacgcattgttcataggcctgttggcaccggtttgcgaagaatggatttttcgcaaggagattatctcccgcctgcgccggtacggagaaaagaccgcaatcatgttctccgcattggcattcgcgctattccatatgaacgtgttccagttcttctacgcctttggcctaggactgatgttcggatatgtatacacacgcacctcccgcctgcggtattcagtggctatgcacatgctgatcaacctgaacggggcagtgctcgccccattggtgatacaacagatcgatccccgcatcctcgacggcacaatcagcgaggccgaaatcatgcgtatggttgaaaccggcaacatgggcggcatgggcatcatgatgttgtacggcacagtgatgttgggcctctgcattgccggtatcgtgctgcttatcaccaagcgcaagagctgggagttctatcttgcgccagaggagttgcctgcggggcttaaaatacgcaccgcctatgccaatcccggcgttatctcgtacctactgttgactgtgattcttaccggttggatgctgttcgcatgactgtcatagccggacccagagaggtgagccgggagatatcacagattgtctgacgagccgctatcttcaacaaggtatttggtgcccgaaccggcgatggctcgcgccgccatatctttgatggtggaaggtagcacaccctcgcgcgcgaacacaagcacttggccggtcatgccgtaaggggagaagccggtgaacttgaccagcggtggctggccctccagtgccacgtcggcggtggctttggttacgcggtcgagaatatcctgactgatagcggacgggtcgccagaggccttggccgtgaactcgagcgtggccatgccttcgctggccggcgtgagcttggtcaaggcggccgtgttgagcaccgaattgggaatgaccatcatgtccccggaacgggtgcgcaccacggtctgacgccaggtgatgtcgtgcacggtacctgtgacgccttgaatggtcaccagatcgccgggttggattacgcggcccagcatcaggccgaagccgccgatgacgttggcgatcgtatccttcaaacccagtgaaatcgccacgcctccgacaccgagggcggtgaccagggtggtcggattgatgccgaacaccggttgcagcaccatcgccgtaccggtgacccagatggtcacgcgcgtgagattcacgaaaatcgaggcgctgggaatctgcgaactatccagaaccctgcgcagcacgcggctgatgacgcggtcggccacaaatacgatggccaatacaatggccagccagatgagcttgcccgcattggcctggaaccagtgtgcgatgtcttgtgcatattcggtcatatgccctactgtatcgaccatttctggtgaagtcgtaaacatgcgggcccacgtcgggttttggccgttgcggtggtgcctagtcccgatgctcgcggcaggtctggccgaggccacgggccagacgaatcggatcgagaatctcgtccagctgctcggcgggcaggtcggtgcgttcgccggccacctcgcgcacggtacggccggtgtgcacggcttcggcggcgatgtcggccgcgtgctcgtagccgatgtaatggttgagcgcggcggaaatcgacggtgaggactgggcatatgaacgccccaggtcagcattgatttcgatgccttccacgcagttgacgcggaacgtctccatggcgcgcgtcagcaacgccatgccggtcagcagctcatgcaccatcaccgggtcgaaggcgttcagctgcaactggccctcggccacagcccagttcacagtcacgtccatgccgaagatcgtgaagcagcactggttgacgcattcggggatcaccgggttcactttggccggcatgatcgatgatccggcctggcgagccggcacgttgagatcgttgaaaccgcagcgcggcccggaattgagcagtcgcaaatcgtcggcggccttcttcaggtgcacggcaaggctcttgatggcggccgacgtggccacgtacgcgcccatatccgtcatggcggccaccggatcgggcgcggcggtgaccggcaagccggtgatctgcgccagatgcttgatggcggacttgcggaatcgcagatccgcgcaaatgccggtgccgatggcggtggcaccgaggttgagctgggccagcagcggcaccacgcgatcgaatgcagccaaatcagacttcaacagcgtggcaaacgcatggaattcctgaccataggtcattggtacggcgtcctgcagctgcgtgcggccaatcgtcacgtcattgatatgtttgtcggccagatcgtggaaggccttggcgagtttcttggtggactcggcgagcggcccgatcgcgtcgataagcgcgagtttgcaggcggcagggtaggtgtcgttcgtggactgcgactcgttgacgtcgtcgttcggatggatgtatgtgtaatcgccacgctggtggccggcgatttccagcgcacggttggcgatcacctcgttcatgttcatgttcgacgaggtgccggcaccgccctgcatcacatcgaccgggaactgatcggccagtttgccggcctcgatttccaggcaggcggcgcgaatggcctcggccttggccgggtcgatcaggcctaattcctcattggcgatggcgcaggcgcgcttgaccgtggcataggcgcgaatcagctcgggatgttggctatcggtgatgccggagaccgggaagttgccgatagcgcgttgggtgtgaatgccccagtagacgttcgccggcacctccatctggccgatgcagtcatgttccagacgggttttgttcgatgtttcgctcatgcttccatcttcctgtgtgagggctggaaacgccagcatgagaggctgattgcgccttgtgagaaacctcacgcagggttcattcgacggaaacaatccagactcactggttttcggtcaagcggtgtacccggggaatcctgcggggccgttcgacggtgagatgggggatggcgcggcatgcgtggcggcggccggcatgccgggggcggccgaatcctgcgcattgtgcacgaagatgcgattccagtaattaagcatgtccttttggctcatggccaggtatatgcccatggccagcacggccacatcttctttaagcaggtctttgatttcgatggcgtcgctcaattcgggccaacgttgcagcacggcgagcatgccgcccacggtgaactcgaccatgagatcggttttcaggtcaaggttcttggggtcgcgttgcaatgtgctgagcatttgcagacggcagaagtcgcgcagcgattcggtcagttcaagcgtgctgtgcgggccggccaacagggccaggcggtcgaggcgctgccgctgctccgggtcggagagcgtggcggtgacgcggtctcgccattgttcctcgggattgccatttgggtcgggggtgcggttgatcggaatcgattcgacctgatgcaggatggctgaatcggccaattcaggcaggctggaaaagtgataatagaacgaattacggttcacgccagcctcacgcaccacatcggtgacggtgatcttgcggtagtcgcggtcggcgagcaattcccagaaagcgttctctaggcgttctttggcgggcagcacctcggaatcatggcgtggacgtggcatctcttcctcctgatgcaccagcgtgatatggtcacgctgtctaataacttatcgggcagtataactattatttgtggacatgtctatgagctaatcggcgatttcagttgcgtcctccgctgagggcgaagctgcggtgtcagtgtcggtgtcggtatcggcgctggccggggccgcgctatctgttcctgtcgcagttcctgctggggtttcggctgttcctttggcggtcgcagaactcggcgcggaagccggggcgggcgtcggcctgcgtttggccgtggacgccttgaacagtatcgccagggcctcaaccaaatgacgccggtctgcgggggtcagccctacatacgcgccaagcatcgccggaatcgaagcggggaagttgctcatcacctcgctgaagctggtggcgccgttggcgtgcagcacggtgaacagcgcgtccaccgcacgctcgcgctgttcgggcgtaagcgtggcgatccaatggttcagctcctcgttaaacaactgcgagctggaactcaaatccggctcggtgatgaactggtcgccatccaatagccaggtgaaggcggaatgctgcataatgccatccgaatcggaagagaccacgcggcaaggctccggggtctcgaaaatcatgcccacaatcgacgaacttggcacgattttcgtcaccttcggctggatggtgcggtaggcggggctggtcacaatctccggcgggaaaccggggccgtccagtgaatagacatgctgaatgcgcttgcgcaccttggggtcggcgttcatggccgcgtaaatcgccagattgcctcccttggaatggccgaccagaataatcggaccctcccacagtcgcgccaccgtatccagataggcgctggctgaacgttgcgccggcaccggatactggaaagccatattgaaatcttccttccatccgatgagcgaatcatcggtgccgcggaaggaaataaccaacgtgcctttgtaggtcggctttcggcgcttgtggccgtcgggcagttggaaggtggcggcggcgaattgggtttgctcaccctgattgatgtgctcgaccaccgcgcccagacgaacgttggcgtagcgggggttctcgcccgcggcctggaacaggtcgtgggtcaggtccggattgaccactgaaaccatttgggcttcgtgcgtcttgtcgtcggcatgcgtttccggcgaacgatgcagctcgcggttggcctcgtcaaggctcaccgattcaagctcgggatgccagatacccttcagccagatcagtggatgcttgggctcgaaagcgcgaatgcgtgcggcgaacgagcctgactgcgtctcatccagcatcaacgtcggacagatactggccacatcctcatagatgagcgtggagatgatcaaggcgtcgatttcattgaacggcaagtcggcgaaggagcgcgtttcggtgtgcgcgtaatcgataatgccggtcatacgcacctcctgcttccgttgatattgcatatccccttgggccatgtggtcttgcgatcgcgtgcggccgtgcggctgcgcgcagcaattaaccatatacattccattgtagggattgtacggttttggccggcgcgatcgagcaagactgcaccgacggcgaacaattcgtgggaggattcccgtcagcttgtcgaaaattgtcgggtagcgggggttgcgatgccagccagccgaccaccctccggcgttacgtgccacttcccgccggcgggaggggtaaccactcaatccttttgacgaggcggaccgctggggccgtcaaaggttcggcagatcgaagcgcgccagatccacgccctcgagttcaagcaactcggccttgatgtcgagtcggccgccgtagccgccaaacgcgcggcccgagccgactacgcggtgacagggcacgatgatggtaaccggattgcgcttcactgcgcctccgaccgcctgcgcggccatgcggccgccaccgcgtcgttcggccaattcggcggcgagttcgccgtaacttaccgtcatgccatagggaatttcggccaccagattccacacttcatgttggaatggcgtgccggcgggatgcaacggcggcgtctgatctaggccggggcgctcgccggcgaaataggcggtcagccatacgcgggtcatacggaacacatcgggttcacgatcggattcgcgattcgaatcgagaacggcttggtgatcggtggcccaccaccagtcttcaagacagagctcggtcaggccctcgccgtccgaggccatcatcatccggccgatgggcgtttcgactgtggcccgcatcagttgtcgttgcgtcataccgccattatcgcgcgttgagggatgaagcccataccgtgcctgatttcatgaaggacgggtcgtgctgtacggtcagtattgcgtgctgggcagcgatatctgacatagtgggggttcttgggccggcatgagtgttctttccgacatcccaaccgtctaactccgtttcgaggggctgatttgggctgttccggaggtctatctccgtttcgaggggctcctcatccgggaaaccacaagtataaacggctccgggctaacgtcattacgccgtttttggcccgtgtctactcagccaccagccccttgaaacgggagtagacctccggagaaggccaaatcagccccttgaaacgcagcgacccctctgattggagtcaatcagaggggttcggcacattgctgatgcagctggtccgccgtccgccttgaggcggaacgtaaccaagattcaggcgggattactccgcaacgagcgccaggaaggcggcggccacggcggctgtcgggttcgggaattcctcgtcctggttgaagaacggcacgtcggcgtagttcaggaacttcacttcggcacggtcgccgatcaaggccttggcctcttcggccagctgatcggttatcgtcatgcgttcctgatttccacggccatggccgtgcaatgtgcccatcgcttggttctacccgctgtttatgctggccatgcccatcgcctggctgctgtatacggccaccgcgagttatgtgcacggcggcacccgataatcgttggaaaaccggtgggacacgcgggggcttggctttttcctgagattggcgtatctttgtcacctgttgcccgtgaaggtaacacatgcggacatagcttagttggtaaagcgcaaccttgccaaggttgagaccgcgggttcgagtcccgttgtccgctctcggatggctggttcaggatgattgattcagcctgaggatgacccgggcggttggcgcagtggtagcgcacttccctgacacggaaggggtcacaagttcgaatcttgtatcgcccactcgatgaatcgccggcagaatgttgccggttttttcatcacaagctcgggcgattggcgcagcggctagcgcacttcgttcacaccgaaggggtcgtaggttcgattcctacatcgcccacccgatatcacgctcgtcagtctatgatggcgggcattttctatatctgccgtgccacggttccttatatggcatccggcctcgggtggcatttggctgtgagcggtttccgatcatgagtggcgtccggccgtcgtgcaatcccgctgcgcgcggtgccgtttgggctgtaatacgggtgctttgaaccggccataacttcttcatatgtcccggggcttgtgtcgtgtgccgcggcgcgcttccatagtggatatggcggtgcggaaggggagccgccatacttacttacttacacaaggacgtcttggtccgccagggcaacgcgcatggaaaggggtttgcgatggtgtgcaccacgctgaatttcgcggagaaatacctgctgaaaaccgaagtcaggttcgttgccggtatgtccggcggtacttccgatgctggtactgatttcgatgtcgatttcggtggcgagggcgacctcggaagcgatcatgccaccggtttcaatcgctcgctatcggccgacgattattgggctgcagccggatatgccgatgagtcattgtattgatggacgtgatgacgcggtaagggcgcgtcgataagtgcggctggtgtcgcggctgatgccgcatctggtgctcgttcggtggtcgcggctgatgttccgtacggagcctgcaatggttttgcatcggtggtgcgtcaaaatccggaccgtcgccgacgctgtggacgtttggcggcgttgaaaggacagataatggattgtcaacgccgctgagaacgattggcgacggtggtgggacagcggatgccccaccaccgtcgccaagagtggtacttgtgtcggtggcgtccaagacatggctcggcaccgacatcagatactctgaacgtcggcggattcccgttctgtgtcccagcgccgacgtttgattcctgcttatgcgagctggcgtcggtaaaaaggcagaacttggttcaccggcgatgtctcagcacgtttgcgcgcgtcggatccttctggagcagcaggaaaacgagcgccacaacgagcaggacggcgatggagagcacgccgaacgaggcgttgccggtcagggacgtggtggtggctaccaggaaggtgccgatgattgaggccgttttagggaagaaacaatagtgagaccggggaacccttgaaatcattggggaatcatggtggcgatgcatgcgattaacacatgttgttaacacagatgtggaatgaggaggcgcgtgaggctcgtggtctgcgacgcatgagtgtgaccgtgagctccccagctgatgagcgcaaaggcagagattggtttcacgcgggacttgtctgccgaagagcggcgattgatgcagggtctgtgcgatgctctgcagcagttgctgaacaagcagtaccagcggcacatgtgggactgttcgatagcctgaaaaattttgccgca

SEQ ID NO: 3380 - DNA, 10995 bp, Unknown
  R151_18m  MAG No. k141_26962
gtcgtagtcgacgccggtctcggcgcgctgctcgtcggagatcggggccggagcaccggtcagcgggtcgcggccgccgccggccttcgggaaggcgatgacgtcgcggatggagtcggcaccggccaggatggacacggtgcggtcccagccaagggccagacccgcgtgaggcggagcaccgtacttgaatgcctcaagcaggaagccgaacttctcgtcggcctcttccttggtgatgcccagcacatcgagcacacgggcttggatgtcgtcacggtggatacgaacggaaccgccgcccatctcctcaccgttgcagacaatgtcgtaggaatcggacatggcgtgctcgggatccttgtcgaacttgtcgatccaatccttggagggcatggtgaacgggtggtgcatggaggtccacttggagtggccgacagccacatcgtcatcatccggatcgtcggtgggcttgaacagcgggaagtccacgacccaagtgaaagcgaacttcttcggatccagcaggccttcgcgggaggcgagctccacacgcacggcacccagcagcagctgggcggactcgcgagaaccggcggcgaagaagacggcgtcgccttcctcggcaccgacggcctcgcgcaggccgttgcgctcctcatcggacaggttcttggcgacggggcccttgagttcgccgttttcgccgaagaccacgtaggcaagacccttggctccacgctgacgagcccaatcctgccaagcgtcgaactgacgacgcggcgtggcggcaccgcccttgaagaccacggcacccacgtacggggcctggaacacgcggaacggcgtgttcttgaagtactcggtcagttccaccagcgggttgccgaagcgcaggtccggcttgtcggagccgtacttgtccatcgcatccttccaggtgatgcgcggtagcggcagctggacctcatagccggcggacttccagatggcggcgatgaccttctcagtcatggccatcacatcttcctggtccacgtaggccatctccatatcgagctgagtgaactcgggctgacggtcggcgcggaagtcctcgtcacggtagcagcgggcgagctggtagtaacgctcgacaccggagaccatgagcagctgcttgaggagctgcggggactgcggcagggcgtaccaggaaccgggcaccagacgggccggcaccacgaagtcgcgggcgccttccggggtggacttaatgaaggtcggggtctcgacctcggtgaagtccatgtcttccagcgcgtggcgggcggccttagccatgtcggaacgcagcttcagattgtgctgcatggacggacggcgtaggtcgaggtaacggtacttcagacgcacgtcctcgcccggcagcttgttctcggactcattctcgagagcggtggaaacctggaacggcagagcgtcggacttggcgaggatctcaatggtctcggccacaacctcgatcttgccggtggccagatgggtgttctcgttgccatccgggcgcaggcgcacttcgccggtaatctgaatcacgaattcgctgcgcagcgggcgggccatatcctcgtcgtaaatgacgacctgcacgaggccggtcgaatcacgaaggtcgatgaaggccacgccaccgtgatcacggcgtcggtcaacccaaccggcgagggtgaccttctggccgaccagggcctcggtcacttcagtggcatgatgtgttctgtaagccgtctggctcattatcttgtttctcctcgatttttcgcgcgaatacgtcagatttcgacggtttgctgggcaaccacagtatccggctcccacgacgtgcaatcggcggcaacctgctcgcccgtgacgatgttcttgacctcgtcgccggcgggctctgcaccttccgcaccttcggcagcggtggccgggaaccacacgtacggaatgccgagtttgtccgcgtacttgatctgcttgccgagcttggccgcggtgggtgccacgtcggtggcgatgccgcgcgcacgcagttggttcgcaatacggttggcggccgggcggtcctcttcattccacacagcgaccagcacggcggccgggctgacgcggttggcgtgcgcgccggcagcgtgcagcatgtagctgaccagtcggctcaggccgatggacaggcccacgcccgggtacttgcggttgccctgggaggcgagattgtcgtaacggccaccggaacagatggaaccgagtgatgcggcaccgtcgaggaaggtctcgtagacggaaccggtgtagtagtcgagaccgcgggcgatcttcaggtcggcgatgacggaaccggggcggatggcggcggcctcgtcgacgatcatggccagggtatcaagtccctgacgagccagcgtgtatgcctcggaatccttggcgatgccgtgagactcgcacagcgcatcgaacttggcggcaagctcggcaccgtcggaggcggtgagctcggccaattcgaggcaggcgcgtgcctgtgcttcggtggcgccgcaggtctcggtgagcagtcgggccacctcatcggcaccgattttgtcgagcttgtcgatctcgcgcagcacgccttcgacgtccgtcaggccaaggccgcggtagaagccttcagacagcttgcggttattggcgtgcacggtggccttggggaggccatacgcgcgcagctcttccagcgcggagaccatgaccagcggcagttccacttcatagtggtcgggcaggtcgccggcaccgatcacgtcgatatcggcctgcacgaactcgcggaagcggccttcctgcggacgctcgccacgccacaccttctgaatctgccagcgcttgaacgggaacgccaacgcacccgagtgctcgaccacataccggctcagcggcacggtcagatcgaaatgcaggcccaaccgctcttcaatcggagtgtcggattcatgaccgacctcctgcaaacggctcagcaggtagatctccttgctggtctcgccttttttcaacaaagaagcgccggtttccaccgctcgcgtctcaatgccgatgaagccgttgagctcaaaaaccttacgaagcgtatcgataacacgctgctccacaacacgttcggaggggagccactccgggaatcctgatattgatgcacctttagccacgaaatcaatataataggtgagggttgcgtcaaaacttcctggttcgcccgggatgggagacgctcccgcttatgcattctacgctttaaggagctggccatggccgacgaaactgtcaccgaacccgtaaacaccgctgcgcccgaagagcaggcaacgacacccgcacccgaagccagcgcggccacgccggcgccgactccgtcccccgcttccatgccgaaaccgcacgcgccctcccccgccgccttcgccaagaagactccgtcggccaagccgcgcgctgccgccccggccgccgccaccgccacctattccgaggctgatgtcaaggccgccgaggccttcggccgcgtggatgacaacggcaccgtcttcgtcaaggatggcgacgccgagcgcgaggtaggccagttcccggatgtctccaaggaagaggcgttggcactgtacgcccgtcgtttcctggatctcaaggccaagctcgatctgctggccacccgtctggcttccccgaacatcaaggcccgtgaaatcgacgagtccgtgaagctgctgggcgaagaaaccgccgaaccggcggtggtgggcgacctcgcggccctcaaggcccgttacgtggaactgaaggccgccggcgaggccaagaaggccgagatcgccgaagcgcgcaaggccgctcaggccaaggccgtcgccgagcgcaccaccatcgtcgagaaggccgaagctctggcggcctccctgggcgacaacaccaactggcgctccaccgccgacaagttccgcaacctgttcgacgagtggcagaaccaccagcgcaccaccgtgcgcatcgacaagccggaggccgaggcgctgtggaagcgcttctccgccgcccgcaccaccttcaaccaggctcgccgcaagtgggctcaggctcgcgacaacgagcgtacagccgccaaggaagccaaggaagcgattatcgccgaggccaatgagctcaaggattccaccgcttggggtgaaacttcccgcaagttcaacgatctgatggaccgttggaagaaggccggccgcgctggccgtaacgaggacgacgagctgtgggccaagttccgcgaagccgccgacaccttcttcaacgctcgtcaggctgatcgcgatcagatcaactcctccgagaaggagaatctggctgccaaggaggctctgctggtcaaggccgaggctctggtgccggtgaagaccgacgccgaggccaagaaggcccgccaggagctggccaagattcaggaagagtgggatcagatcggttacgtgccgcgtgacgatatgcgccgcatcgagaaccgtctcgacgccgttgacaagcagatcaaggccatcgaggatgccgcttggaagcagaccgacccggaggccgacgcccgcaagtccagcttcgaggagcagctcaacgcccagctcgccgagctcgacgccaagatcgcggccgaatccgacccgaagaagaaggccaagctcgaagccgagaaggccaccaaggagcagtggctgaacgccatcaagtaagggtctcgtgccaggttcccctctgagggaagccggcagcaaggctgactgaggggagtttacggttataccgcaagctcccctcagtcgcctacggcgacagctcccctcagcgaggggagcttcgtcatatttatgccgttttcttctgccctatactcataactccaccccatagttcctcagtcacccagcaattggtgtcttacgcctgagtccctaccggtgctgcaacaattgccgtgagcccttgatgtgcggccagatattcatgcaacggctggctgtatggcatattcagctcgccgtaattggttccggcacggaaggcggggtaactgtcgccgccctgaagcagatatgaattggatgcgataatcaccaggtcatcgttcgcaatcggtcgaccgtcaacggcgaggttcacgatacgaaccgccgcatgttcgtcggcagcacactcgtcagcgtcagcgttggtatcagcggcggcatcagtatcagcggcggcatcagtatcagcggcggcatcggcattgccgctcccaccggtcgtaccgcattcggcataccgatacgtcacgttcgaggagatgccgagccagcgccgctccagtcgcccatcgtcacggtggaattgctcggcgagcactctcttcacatcgcgcccggtgagcgtctcatgcgcggccttgaactgcaaggccatgagactatccacctcgcgcacggtgactttgccgtcgccattcatatcaagccgtggagtccgcagactgccattattcgaaaatccgattaccggcaagcgatttccggcatacacatgcttcatgattgactcgcggttcgcgtccgccaccagcacaccgaccgtattcccgtgcttatccgaaccttgtttgtcgaaattcacgccggaggccaaggtgccaatcaccgcgctgccggcatgattcgaatatgttgccgccgcctggtaaatatgctgagcgcgcgatacctcatcgttcgcctcagcaccggcagacatccaagcggcttgcgccggatgcgcattaagcccttccacgcccagcacgccgtcagccgccgtatggctggtgccattgccgaggtccacatcggccactcgcaccgtggcgcgacgcccggcaccggtgatgatcaaatcctgcacggccatattccgcccgaagctgcccgcctcgtaaataggcgcaccaccagcggtcgtaccacgcttgatcgcgtgattgtggccggtgtataccacatcaacatctcgcccaatatcggcggcggctgaggcatcggcgtgcagcaaggccaccaccgcatccacctttccggagcgcttgagttcacgggccacgcgattgatcgcgtccaccgcccgttcgtcaagatcggcatcacgcgtaatctgcggagtggctaccgagccgagcgcatcagtaagggcgcccacgaaaccgatccgcttgccgttcaccgttcgaatcgtagagtcacgtacatggctcagcagtccgtcaggcgacttactggcggcagacgtgttggcgcacagccagtcgatgccattgctgggatcagcgatgcgattgttgaaatcggcgacaccgcggtcgaactcatggttgcctaccgccgaaatcgtcaatccccacgctttggccatgtccagcgtgggttggtccttctccaccgccgactcatacggggaacctcccaccaaatcgccggtcgataccgggatcatattgccgggattatggctgtcggccacggtgaaggcggtggcgttgtccgcaccacgttcgatatgcccgtgaaaatcagtgatgtcggcgatggtcaccgtacgggtgccggaagatggattatcgccggaaaaaggaacggctcccgtggttcccgcacaagcataaggaaccaccagagccgtaaggataagcgctactgcaccaaaagcgatccccgatcgcttgccggcccaccgccggttcttcatattcctgctcacaccagtcacgttaggatcgtcgattgaacggccatgcctaggaaggcgactctcaggtgaattcttagcggcgtcttgggatgggaaaggcctgaccccgtactatcagggtcaggcctttgcaacccgtgtcactacgaatgcgtcggcaaggggagattactcggcaaattcctcgacgcagatctcagctaccgcatccacgcacgcctcggcaatcaggcggccgcgttcggcgcttgagccggccggattggcgagtccgccgtgagcgggaacgtcaccttgacgcaccgggtagcgtacataggatttcgccgtggcaccggcttcctcgaccatacggtccatgtgcaccagttccggcgcgtagtggagcatcaacgaagtttcggtgacggccgcatgctccaatgcccagccggggaacaccaatccatcgaacaccttgtcgataaccgactgcggaaccgggtcccaccaattggtttccacgatggtggccactcccccggtttcgcgggtgaccaggtcgatggcctcgacgatgaacgcctcgttttcaaaatgcgcgttcatgacgacgatcttggtgaagccatcagcgatgagttcgctcagcacgtcgtgcatttgggtgatcactgtcacgccgttcatgtcgatagtacccgggaacagcggcccgccaccggagagcggcttggacttgtatccgtagctcagggtgggcagcacggtgccgtcgatgcgttccgccagatcttcggcgacccgcgtggcgagtaccgcgtcggtaccgatgggcagatgctggccgtgctgttcggtcgaaccgatcggcacgatgacgggatgagtcttcacctccttgaattccggccaggtcatgtggtccatacggcggttgctacccattgcagtactcctttgggttggtggtggattggatggtcaatgaatgcgcccggctccctcgggaaaggagccggagctgaggagatcagatgtgattcagatccttgtcggtgttttcatgggaaagaatcatcgcgaccaaggcgatggccgcaacacccaccatgtaccaggccggggcgatggatgaaccggttagggcaatcaggccagtggcgatgaacgaggccgtaccaccgaagatggcattggccagattgaagctgaacgcgaatccggtgaagcgcacggaggtggggaacgtctcggtcaggtagctggacagggtaccgtcgttggcggtcagggtggcgcacattgccagctcaaccagcagcacgggccagaactgggaggtgttgaggatgaggaaggcaggaacggtgaggacgatgaacgccacgcaagcaccgatgagcaccttcttgcggccgaatttgtcggagatgtggcccatgccgaacaccatgaacacgtaggcgaccaagcagatggtggtgatggtgccggactgggtggcgtccatgccgacggtgtcagacagataggtcggcaggtaggtgagcacggtgtagaagccgaccgcattcagcacgcaggctccgaagctgatgatcagggccttgagatggttgtggaagagttcggcgagcggggcgaacatgccgctcttggaaacgacttggccgtcagcggaggcggcgctcttggactcaagagcatcgttcattgactggtacacgggggaatcggaaagcttggtacggatgtacagcacaatcaggccgagcgggccggccagcaggaacggcacacgccatccccaaccgaccatcgcgctggagttcatgttggcggtcatcagcgtggccagcgtggagccagcgagcagaccgatggcggtggacgccggaatcagcgagcagtagatgccacgctttgaggtgggtgcatattcgccgaggaatgtggccgcaccggcatattcaccggaagcggagaagccttgcaccatgcgcagcagcagaagcagaatcggcgcgccaacgccgatcaccgagtaagacggcaggcagccaatcaggaagctcgcaccggacatgaacataatcgagtgggccaatgcggctttacggcctttcttatctccgtagctaccccagaacagtgcgccgattggacgcaggatgaaggatagcgcgaacacgccgaaggtctgcagcatggcgacggtgtgattgtcggttgggaagaacaccagggcgatggtggtggcgaagtacgaataggaggcgtagtcgaaccactcgatgaagttgccaaggaaggaagataccgcgactttcctgaccatggcctgttcttcagtttgaggggtgaaattcatcagtcgtgcagatgtagtaatcgttgcggaactcatgatgtcaccgtcctttcaaggatgtgctgttcgtgtgactgaatgggattcaagtgggaattcgtttcgcagcaggtcgaccagcgccgcgatagcctcgactatgcccttgagtatttgctgaaacgtgaatcgtcgattaacccgttcggcgtagaagtggacaggttgcccagtggtgctggcgcattattcaccatgctgttcttgccatgatttcgtgagtttggcggcgaatagcagcatcgaccagttcggtttgtcgttatagtcgacgccgaccatttgtgtcactttgtccagtcggttgtacagggtttgccgtctgatacccaattgctcgcacgcgccggttttgctatcgaggttgtcgaagcagacgcacagtgtgtccagcaacaacggagaggcggcgacctcgaatccgatggtctgcaccacgagcatgcgcatcgccttgtccatatcagaggatgcgacgaaacggtcgacgagtgcggacatggtacttacgattcgcccgtatgccggttcctgattggcgatgtcacgcaataccgcgaacccgtcgaccagcgtcaccgtgtccaatgccactcggccatgcaccacgtacacaccgtcgccttccagtacggcaagcgcatccatgcaatggcgtccgaatgcggccgcaccgtctgaggaatcggtggtggagcaccatccgaccatcaagtcaccttccagcatgcaggagacggcgcatcccgaccgttcttcgaaccgttcgaccatcgtcgatacatggttgatgccttccaccaccgatctgaaccgaaaagcgaatggcatatagatgcatgatccggcaaaacccagcgcgtcgagcatcgcatgcgcttcctgcgcctcaaatgtattgacgtgcacgccgtcggccgggcccatactcagatgatgcatcatgcccatgcgcgcgccgccgtcaatatagagggcggccaccggagacacgatggtggcgatggcccgacgcatcgtggcgtcgaaagtcatggcgcgttgcgtgatctccaatgctcccaccggccgggagcgactttcaagggcgatgacggcgctcgattcgttgccggcatcgaacgcacgacccgctcgagcggccaacagaccgtcaccatcgaaaatggcgacgctttcgccgaacagcgacgcaatggtttcggccacagcctcgatattgccggtacgggacaatccctcacgtaatgaagtggacattgtgtccacctccaattgcaagtgcatctgttcgtgcacgatagcggtattgacactctgacagatgtcgacaaaaggtacgcgagatttcagaccaatcaacgtcaacccatgcagcctggccgcagacaccagttcgtccggcatccgcaccacaccctccaccagttcgaccaccagagcggcgacaccagcctgtgccaggcttgctacatattgtcctaacgtgccgtgccaatcggcggcgagcagagcgttaccctcgataatcagcatctcaccgcccgaaaggaaactggagacatcctctcgctcgttggtaaacacccatcgcactggcgtatcgaggtctttgccttcgacctccaccacaggatcggctcgtttgaactgcgtgttatgaagcgcactgcgaatcgatacagtcatacaatctgtccattcccccgcggaacaccggtcgttccggttaacctcaccgcaaagcgtgctgttgacaataacctcagttggttacgcgggcagtcggttcacgtaaccgttcggca

SEQ ID NO: 3381 - DNA, 4796 bp, Unknown
  R151_18m  MAG No. k141_26988
cggcatggcctctatgcgcaagctctacctggatcgcttcctcaaccacgagatccagaccgacatcctgcaggaagccctgccgaacgtcgtcgcggcgcacgtgatgcagtcttacatcggcggttacggcaacatgatccagccggtttccgcctgcgccaccgccgccgtctcccttgaggaaggcgccgacaagatcgcgctcggcaaggccgacttcgtggtcaccggcgcaatcgacgacatcggcgtcgaatccgtgatcggcttcggtaacatgaacgccaccgccaactccgaggagatgtacgccaagggcatcgacgcgcgattcttctcccgtgcgaacgaccgtcgtcgcggcggattcgtggaatcccagggtggcggcaccattctgctgacccgtggcgatatcgcgttgaagctcggcctgccggttgcggccgtggtcggcttcatccactcctacgcggatggtgcccacacctcgatcccggctccgggcctcggtgccctggctgccggcctcggtggcaaggactccaagctcgtgcacgacctggccaagctcggcgtctcagccgacgacatcgccgtggtctccaagcacgacacgtccaccaacgccaacgacccgaacgaatccgagctgcacaacacgctggcccacgccatcggccgctccgacggcaacccgctgttcgtgatttcgcagaagacgcttaccggccacgccaagggtggtgcctgcatcttccaggtcaacggtctgacgcagctgttcaagtccggcgtgattccggcgaacgcggcgcttgattgcgtggatccgaagctccagcgcgacgaccacatggtctgggttaggaagcccctgcgcatcggcggtggcgaggacgagttcggtcgcgagaccgctggtcgcccggtcaaggccggtctggccacctcgctcggcttcggacatgtttccggcttcgtggccctggttcatccgggtgccttcgaagcggccgtggccaaggccgatggcgaggccgcgctggaagcctggcgtgagcgtgccaacgcccgcctggccgccggccagcgtcacctcgaggaaggcatgatgggtcgcgccgcgctctacgagccgatcgacaaccgtcgcttccgcgaggatcaccgtggctacgaccaccacgaggtcgaaaaggcgatgctcctcaacccggacgcccgcctcggtgccgacggctactacgaggcctgattcctctggctcccctcggttgaggggagccagtagcgcaccggatctcggctcccctctttgaggggagctcccgcgaagcgggtgaggggagtttcccctggagctttctcgctggcacaaactcagtgagagaaatatgcagaacatacgaaagcccctccctcggagtgagctttctgcgtttcaaggggctgatttggcattcgccggaggtctacttccgtttaaaggggctgttgcccaagtagacaaggcgtaaaaacggcggaatggcgttggcgttatgctgcggatactcgtggtatggaggatgaccagccccttgaaacggaagtagacctccggaacggtcaaaatccgcccctcgaaacggagatagacctccggggcggggcgcggatgttttttggacggctaggcagccagcccaagatgtttgcggtattgcgcgaggtcatccagcatagtgaatcttttccccctgaaatggaaatcaggccccaattctgatgaggtgtagagattacgcgcgaagcggtacacaataggaagcatgaatacttgtggtttggggcatgacgtggtggatgtggccgcattcgccgaacagttggcggagccggggtctcgcatgcgtgcgctgttctccgtgcgtgaggtgcggcaggcatccgaccgcgcgcgccagaagaatgacggggaggccgtccatctggccgccaaatgggcgggcaaggaggcgttcctcaaagcctggtgcgattatcttggcgatgccccctatccgttcacgcttgataatttcccgtggcctgaaatcgagatcttggacgattcccgtggtgtgccgcatgtgtctctgggtaagggggcggcgtcagtcttccaaactgattacgcgaattcggctgccggcgctcgctattcccctgcttattcccttgcttccgataacgggccttatacagtgatgcaggagcggcggaatgcgcgttcggcgcagcgctcgactagcggtgcggggtcgatgccgcatatccatatttccctgagccacgatggtccgattgcctccgcggtggtgacgatttctgtggaatagcgcccgaggcccccgagtgctacatgctgtacaacgtctccatcatggttaacctgtggagcgcgctcaccggccgcgacgtgcgcctgctcaagaaccagatcgacaagctcgactcgctgcccgaaaactgctggttcgtgattctgaatgcgatgggcgccgacctccaaccatacgagtcccagctcatccatttgtgatttcgacggtttccagctcccctctctgaagggagctgtcgccgtaggcggctgaggggagtcctcggcaaagccacaatccatcaactagattggctggtcctgctgcagccacacgcgtttgccatccccgaagaaatatgtataataactcaagtcgccaaaagcgacgcttaacgcggatgtagctcaatggtagagcctcagtcttccaaactgattacgcgggttcgattcccgtcatccgctccactatttatatgttggtgtatctaattgggaataccggaagggtgagctaccccgagtagtattagtactcattgtgttgagaatcgacgaagctgaactgcgtgccaagctctttgagcacaaagagcagattggtttcgggccgattgccaatggggtcgtcatcatcatcgaaggattgttttacattcctgctgctctcacatctggactcgaccaaatgtttcaaggattgctccttgcattgagcattatcttcatattctatggagtatggagtttgattactgcttgcagaaataagtatgatgccataacactgtatgaggatatcgccaacatggatagaaccgaacgaagaagctcgatcattgcggtgaaagatgctaaccgatatcttctgtatcgtgatttaggttggggatgcgactttttccctaatcatgcaaccgcaagcagtactgatgaggatgttcgtcagctgacgacgtattttgccgatgaattcgaaattcctgctaaagactttactctgtctcacatttgtgtgaaggattctgagaagccatccacggagcatgatggagagattcgttattacgaatacacgctataccgcgctagcgtaacggtaatgcctgacgcctggcgttccactgagttccatgttggtgccaaggactgccgctggatgactcttgatgagatgcttgccgaccccggcatcaacaaaatcaatcatgatgtcgttgcgatggtgcgggataacttgtaattgttgccacttcgggcatatgacgattgagccaaagcatgttctatgtttcgataatcatcaaaagcagagcatagtatgctctacggggatttttctataccctgaaaataccgaaaatcaggatatagggcagtagcacgaattagccaacagcggcttgtctgcgggcaatgatgacgttgctcccacggattcggataaggagaatcgtagcgaggatcatggtgagggccatggcgagtaatcgatcgtatcggagacttgcccaacacgcacgctaagatgggcatcgcaataatcggcaatgagcaggtaatcggcgaggcggtgcatggagcaggaatccaacgagcaagaacctaacgaggcgacggaaatcgtaggcggcaaagtagagaccgtcgaggtttccaagcaccccgaggcttccatacccgagaccgatttgtctctggcggatatcgagcgccgtcgttcgcatccgttgcgttgggcgctgattattcttgccgtactgtgcgccatcatcgcgccgtactggttcggccgttcgttggcggtaaataatactgactccattgtgaccgtgctcgggggagtgtctccgcaaggcatcgcgctggtcggttgggtgaccgtggtgattgcgtacgtcggattggcgatggcggtggtcgtctcgccgtcctggccgtggttgatcgtgttcgtgatcgggttggccggcgagcagttcatcgcgggactcagtatgctcaatctcaatttctggtattccacgtacgtggtctacggtaagcaggccggcctggcgaatgccgcgaatctgggcattatgggtgcggcgatcggcatcgccgtatatgccctgatgttcgtgggtctgctggtgattatccggaagacctcaccactgaacgtactgaccaaaagctgggcgagcttcattctgtacttcgtgattgaaaccatcgccctgctcgtggtgttgtttggcggattgctcaccactgtgtgagcgcgtgtgccccagtccggcccctgccgtatagtttccatttggcgtaatttcgcccgcggatagagagcgtttcgagcgaacctgcacgaaacaccgcgcaacgacacaataaggaggacgccgtggcactgacggctgacgagaagacccagattatcaacgagtacgcgacgcac

SEQ ID NO: 3382 - DNA, 6890 bp, Unknown
  R151_18m  MAG No. k141_27254
atggcggagatgcagaaaaacggcatcagcgcggatccgcatctcatcaaggttggcgactacgtatctgacaaggcatacgaggcggcatgcgatctcctggacatgagggagcaggaccgaccgaccgccatcttcgcgttcaacgatctcggcgcgatcaacgtctatcgcgccgcccgacagcacggcatcagtctgcccgaacaattatcgatcatcggtttcgacgatgtctatcctgcggcaagcatgtgtccatccctgacgaccatcaggcagccattcgacctcatcgccagacaatgcatcaacctgattctcgaagcgcgggaaggaaaggtggaacagaattacttcatctttcccacgcagcttgtcgaacgcgaaagctgcgtatcgccagcacgtccgtaactcagcaacggaacacagaatcagcttccacgaagcacccatgcatatgcaatccgtctctggcacaagcatttacttctgtttaccagatgaaaatacaatatcgtgcgattacgggggggcgcagccctagcctcagctggaggtcaggaaggtttcgttgcctcgggtgaagtcgaggacggaaccggcgagttggacctcgtctgccagttcggggtcggcagccagaagctgctcggcacgggtgcgggcgtcggcgatcatgtcggcgtccttgaccacgcgcaggagcttcaggctggacttgccgccggattgggcgtcgccgagcacatcgccggcaccgcggaattccaagtcggcttgggcgatttcggcaccgtcgagcgagtggtgaatcacttcgagccgttgctcggccggggagccgggttccgcacgggaaacaaggaacgcccacgagttggtgccgccacgccccacgcggccgcgcagctgatgcaactgagagaggccgtatcggtcggcatcaaagatcacgatgcagctggcctgtttcacatccacaccgacttcgatcaccgtggtggacaccagaatcggagtctcgccgccggcaaaatcggccatgacctgggttttgacgtcatccttgtcgcggccggtcagagtcgcaaaccgaatgccttggaattgcgggagtttctgcaaccggtcggcgatttcggccaccgcatgcaatggcgggcgagccacggtttcgccgttttcgtcgaaggtttcgtaggggtcgtcgatgccgatggcgtcggccgccgcgcgcgttgcacggccgcccgcagctgtgcgggcactggaaccagatgctgcggcgcgtccgcgggcagaaccggctgctgccgaaacgccggaaccgccttcgttcccctcatcatccgcatcaatgcgcgggcacacgatataggcccgctcccccgcgtcgactcgcgcgcgaatgtgcgcgaacatacggcccatggtggcggcgtcggcctcattgaccaccacggtgcgaatcggtttgcggccgccaggcaattcggtgagccaggaaatatcgagatcgccaaaccaagtcatggcggcggtgcgcgggatgggcgtggcggtcatcaccagcagatgcggcgtggtgccgtcgtcggttttggcgttgagactttcgcgctgctccacgccgaaccggtgctgctcgtcgattaccaccaaggccaagtgcggggcttggaaggtcttggaaaacgccgcgtgcgtggccacgataatgcccggctcgccactggacgccgcagcaagtgctttacgtcgcgcagcaagcttcatgccgcccgtcaacaacgcgactggaatcgctggcttgagttgctccaccatccggccaatggtttcggcatgctgctcggccagcacctgagtcggggcaacaagcacggcctgatagccggcgtctacggcttggagcatggcagcgagcgccactacggttttgccggagcccacctcgccttgcagcagacgctgcattggccagtcatgagccaaatcggcggcaatatcatgaataacctgctgctgccctgcagtgagggagaacggcagggatgcgatgaactgatcgcgcagactgtcggttaccaacgggcaagagtgagccgcggatttatgggcgtgcgacctggctttaagcagcgaggtctgcgaaacgaaagcctcctcatagcgcagggtttcgatggcctccttgaaccgggccgtggaggccggatcatgaatggccaggaacgcctcagcccgatgcatgaggttcttggccttgcgcaccgattcgggcagcacatctggaatggattgggagagcgcctcagcaccggattcggcggtcgtgccggaattctcttccccgttttggacggcgatggtgtcggtcgtgggagccacaatgccggctgacccagcgccagcgagttgcccgtcaggcgtggatgacgtgcgggcccccatcatccacagcaatcccagaatcgtctcatgaatatgttcggacgagatacgcgaactggcgtgatataccgggcggggccggcagacgcgggtaagcgcctcttgcacggtatcggcgtcgtatttcagcgcggccccggaagaggcagccgcggccggcggatacgcggactgcacactggcatacggatcggtacttcccgcaaacgcaccattgccggatgccgcaccccgagcgtaaccctcaagccccgctcctgctccggccgacccgggcgcgacagtgaggatttcggggtgcgtgaattgcagctgccccatgtattcgctgggcataccggagaccaccacagacgtgccggcgcgcagccgcatgctgacccaatccacatacgatttacgatacgaaaagaacgtgagccgggccgtgctgccgggtacgcgacgagaccgggcgaagtcggcgtcatcgaccgtcgcctcgagtcggtagccgcggcgagcgttcatcggcaccacgcgcatgtctcgtatcacggcggcaaatgccatctgctggccgggtgcggcctcgcggatggcgcgaagcggcaccggttcggtgacgcggaagggatagtaggtcagggcgtcgccgacagtgacgattcccagcgatttgagcgcggacacgcgacgcttgttggtgaccagcgaagcgagagtggtgtccatagtgatgctcatattggcctattctattcgcacggcctctttaggccgcagaaacaacaaaacccgctgagccgaagctcaaacgggttttgctccacgttagtacgcgattcacgcggccacgcgctgaaccttgccggccttgaggcacttgacgcacacgcgcagacgagtgttctcgccatcaatcgtggtgcgtacagactgcaggttcgggcggaagctacgcttggtacgacggtgcgaatgggaaacggtgaaaccggtctgcggtcccttgccgcacactgcgcaacgagctgccatgatggactcccttaaccttgatgtgtcaagtctttcacgcattcgaccgccggtttcacccgacatgccgaacacacaacttcacaaatatatagcccaataccgacaaccgcaactcttgcgtgtatcatgggcgaacttcggcggttcacgcgcggttcgagcgtaacttgcgagtgggccatcagcggttcgcgagcggttcggcattggttcgccagcggtccgcaagtagttcgccagcagttcgccagcggttcgccagcggcgaattacgctgcaaatcgtagcgtatacccgataaaacacgccggactgcctattccgcatccaacaaactctcatataatctcggtataagagacggcaagggacgaaggggtcctcgtgcaacttacgacgaaggaggctgtcatgttgaatctcaggcgaggtatcggcactcacgagcccagcgtgatttcactgggtcaagtctgggtggacattatgctcaatgtggacgaggtgccggcacagggcggattcgccgtggccgatcatccgaagccctccattggcggcagctatcgcgtgctgcaggcggccagccgcatgggcgtgccgaccgagcacgccggcattctgggcaacggcctgtgggcgcatttcatccgccagtcattccaagacaacggcattacgcatatcggccaggatcgtcttgatgaggattccggtttccgcgtggtgctgagctccggcgcgccgaagaagacgttcatcgcttcctatggcgccgaggctcatggcgacgcggacacgttcaacacgctggagccgcagcccaaagacgtggtgcacatcagcggcaacacactgatggaccacacggccaccggcgtggacggattcctactcaaggccggtaccgacccggctgcacgcgactacacgctggtgatcaatcccaccaatacgttgcgtctggtcaatgaccacatgctcgaggatctggtgctcgcacgcccggtctggtcctgcaaccgtcaggaggccatgacgctggccgagcgcctgggcgcgccgatcgacgacagcaaggtcaccatcggcggtggactcgacgacttcatgcaccagttgtgtgacggcttgggcactacactgcgcgcgccgctggtggtgcgtgtcggcgcccgcggcgcttggattcgtgagccaggtggcgagacgattcatatcgagggatacccgaccaaggccgtacacacccgttcggcgggcggttgccacaccggcgtgatgtgcgcgatgctggcaaagggccatagtctggccgaatcggtaaagatcgccaacgcggcggcatccatcgccatccagcgcagcctcaacggcgtgccgcaatgccccgattacgacgaggccatcgcgctgatcggcgaatagtttccggacgattgagtggatttcctcatctgggggaatccacgatcggctcccttcagtccgcttcgcggccagctcccctcagcgaggggagctatttttttgctctggctccccttagaaaggggcccggcattattcacccgccgttcaactttggcggttttctaccctagtccgcgcttctacgatagattgagttgaataccgtcgaggagtgcatatgaccgatcccacgaatgtccacgaaccggtgccgcaaagcgccaaactgaccgcccgcgagaagaagtggatcatctacgacgtcggcaattcggcattcgtgctgctctccaccgccgtcatccccatttacgccaaatcgctgatgccggcggacggcaacatcgtgtccgcctggggctacgcgcaaaccattgcttccttggtcatcgcgctgctcatgccgttgctcggctccatcgccgacgtgcaaggcatgaaaatcaagttcttccttggcttcttcggcaccggcgtggtcacctgctgcgcaatggccctgcccctgacctggctgccgttcctggtcgtctacattctggcgaccatcggcctcaacggctcgctgacgttctacgattcgatgctcatcgacaccacctcgaacgagcgcatggacaaggtctcctcgcacggctacggctggggctacatcggctccaccgtgccgttcatcttctgcatcgcgctgatcttcggcggcccgtcgctcttcggctggtccacggtggcttgcacgcgcgcctcgttcatcatcaccgccatctggtgggtggcgttcaccatcccgctgcttaccagctatcgtcaggtgcactaccgtgccacccgcgaccagctgggctcgtccgtgcgcggcacgttcagcgaactggcgggcacgttcggcaaaatcgtgaagaacaagccgttgtggatgttcatgatcgcgttcttcttctacatcgatgccgtgaacacggtgatttcgatgagtacctcctacggtgccgagcttggcatcgactccacccagctggtggtggcactgctcgtcacgcagttcgtggccttcccctgcgcgattctctacggccgtctggccggccggttcggctgcaaagtgatgatcacggcggcggtcgtggcatacatgtgcatcgtgctcttcgccgcgttcttcatgaaatcggccgtggagttctggattctggcgattctggtcggcatgttccaaggcggtatccaggcgctctcccgctcgtactacggcaagatcatccccaaggatcacgccaacgagtactacggcttctacgatatcttcggcaagaccgcctcgatcatcggcaccttcctggtggccaccaccacgtccctgaccggcaacgcctcgctcggcgtgctctccatcgccgtcctgctcgttgtggcgctcgttttcctgctcctgcaaaaggacccgacgcgggagtgatttgccggccctcggcaactctgcgccgcgggcgacatctcgcaacccctgcaacgggccctaatagcaatggaccatcgccacttgatcacttacgctcgcgataatccttgatcagctgaatggcgacggccgcaacgccgcacagcacaccgccaatcggccacggcagccagaacatcgccccgtccgcggcgctcgacccgacggccgaccaatcgccgcgcaatgccgcagggttcaaaaacagcaggcacaagccagtcgccgtggctatcagcataatgatgccgcacaccgcgccggtcagtctggcatagaaatcctgttcgcccgcatgctccttgcggtcgtcctcggccgctttgttgtatgcgttgatattgagcagactgtatctcatgccgcagtagacaaacccgaaaacaccgggcgcacagagcagcagaaaaattgcgttgggccagccatcggagac

SEQ ID NO: 3383 - DNA, 8632 bp, Unknown
  R151_18m  MAG No. k141_27309
accttcggcggccttggccagatcctcaagcatgttggtcacgatggcaagtgcgtcggacttggtggagccgatcaggcccaccgggccgcgcttggcccagccagtggcgtacagacggtcgcgcacttcgccgccgtcggcctcggtggtgatgcggccgtcgccgttggcgttggccaggtgggcgccgtgctcgtcgtaggtgatgccgggggcttcggcgggcttgtagccgatggcgtggtagacggcctcaaccgggtagtcggtgaactcgccggtgcggctcatcttgccgtcggcactggtttcggtgcgttccacgcggatggccttgaccttgccgtcctcgccgaggatttccgtgggtgcggagttgaagtgcacgtaatacttgcggtcggccggattgccttcgaagtcgacgtcgccgtcatcttccatgtcctcggccatctcgcggatggcgaacagttcctcgaccatctggcgggtgagcttgtccttgccggccacctcgatggtctcgtcgtccaaatcgaagtcgtcctcattgatgatgagctgcacgccgggcagcttctccatctcgcgcagttcctgcacgctgaacttggcctgggccacgccacgacggatgaacaggtgcagcaccttggccttgttgcggccgatgccctcgtacacgttgtcgggaatgtcggtcttggccttgaggtcgtcggcgttgcgcatgagttcgcgggccacgtccatggccacgttgccgccgccgatcacggcgacgttctcggccgtaagcggccattcgcgggcaccggtggggtaaccgtcataccattcgacgaacttggcggcaccgtacacaccttcaaggtcggcaccgggcaggttcagcggcttgtccttgaccgcgccggtggcgaacagcacggcgtcgtaacgggccagcaggtcgtcaagagtcacgtccttgccgaattccacgtcgcaatagaggtggatgttcgggttgtcgagcgtcttctcaagcgcggaggcgatgaacttgatggacgggtggtccggggccacgccgtaacgcaccagaccgaacggtactggcagcttctcgaacaggtcgatgcgggccttggtgccgaggccgagttcttcgcccagtttcttgagctggcgcaggaagatgtcggaggaatagacgccggccgggccagcgccgattacagcaatgcggagttcagtattcacagattcagtcacgcgctctagcctaacgcaaagccttccgttgcaacagagggcgagtggtgggaattctgtgtattaggccatagtttgtgcgtttgggaaacctacgagcactgctaatgtcagattatgggtttccctattggtcaagttattgccgttctcattccaagaagcatgcgaggcggatcaggcccttacttcggatacgtttatgctgcaaggcggttatccacgcatttatgacacgagaatgccgctcaatctgttcttctcgaactacatcgacacttatatcgaacgtgatgtttccgaatatcttgatgtacgcaatttggctgaattccgccgattcttgactctttgcgcactcagttccggagcactcataaactacaccaacatcgccaatgaacttgatgtaagtccgcgaaccgtaaaggcatggatgtcgattctggaatcaagttacatcgcattccatctcatgccgttctacacgaacgcacgcaaacaggtggtcaaaacgccgaaactctatttttatgacactggcttgctgtgtcatctcttgggcattcggacggtcgaagcactggttgcgcatcccaagttcggcgatatatttgaaaacctcatcattgcggaaaccatgaaacagcatttgaacgccaatcaggagccacaattattcttctaccgcgatgccagcaaggtcgaggtggatttgttggatttcaccgatcctaacaaccgtatgctcatagaaatcaaatccggacaaacctatcatgaccggttcgcccgccatctcactttaattggcaatgttctcggtataccgtgtgagcaacagtacgtaaccagtcgggttgagcatagttatgtctcacaaggaatccgcgtcacctccgcccctcgattggctagaaggccgacggtaaagagccgccgcagagcagtaggaattctgtgcaatcagtgaatcccttgaggcattaaagacgtcacctccaacggctctttacgacctcgattgcattcattaggtcatttcttcgttcattaggtcggagggtgctgaagccatcccttggaacggcggggtttcaagggccgctccgaccaaggaccgacctaataaacgtcaaatcgacctaatgaataactccgatgctattgctgctttcgtgggtgggatttccgtttccgccacgtcaccaaccgtatcgccccgattatgtttcgatgcggtggactcgacatacgaccatcccggtcagtcaactgacctacaaaaacagcagaagcctcatattcttaatcagtcccgatcaattagggcagtgagggcccagaggatgctcaccacgtcgatggcctcctggaggaaggcaccgacgacgaccgggataaggttgaacgcggcggcaatcatgccgatggtggcaagcacaaggcccgcgattacggcttgaagcatcacgcgcttggtgcggcgtgcaatggcgatggcgcgcggcacggcggcgatattgtcattcataatgaccacctgagcgctttcggaagcggcggtggacgtgccatcggtcatggccacgccgatatcggcaacagcgagcaccggggcatcattcacaccgtcaccaaccatcatcgtgacggttttgccggctcctgtagcggccctgactgcggctaccttatcctccgggaacagttcggcgtgaacctcgtcaatgccgacttcgctggcaatgatattggcggaagcccgcttgtcaccggtaagcatggcgagctcggtgacgcccaactcatgcagtttggcgagcactgccttggcgttggcgcgcggcacgtcgcgcagcacgatgcgcgcgatcagccggccgtcaacggacacatacgacgccatctcatccggctgcagcaggccaaagcgagtgcgcaggtcatctttttgctgagctccccctcttagggggagctggccgcttcgcgggctgaggggggcagcctcgccgaccgccaggaatccatcctccccggcggccgcgaaagacagccggccaacgcgcaccgcgtggccgttcacctcgccggaaacgcctttgccggcgtcttcattgatgttcttgacgaccggatactcccgtccatggccgggccagctggcctccggctcggggcataggcgctgaccatcctcgaaccgctggcgcagtcgggccatcgcctccacgccagccttggcaatgcctttggacaggatgtgcaccgagtagctttccaccacgccggccatcatcagcacatggtcttcgttgagacgggttgcggcgccgggcagcatctcgacgcgcacgacctgcggctgcttgacggtgagcgtaccggttttgtcgaagaacacctgcgtgacgcggccaaggttttccaacacgtcctgcgctttgataagcacgccggctgcggcgaggcgtccggttccggcgatgtacgccaccggtgcggcgatgagcagcgggcagggcgtggccagcaccagcacctgggcgaatcgcgtcggcaccccggacatcgcccatgcgatgccggcaatcatcagcgagagcacggtaaagggcacagccaagcggtcggcggtttttaccacggccgggcgcgactcctgcgcggaggccacgagctcgaggatgcgctggtactgcgaatcggcggccacctgggtggcacgcatggtcaatgcagtcgagccgttcaccgcgccggacatcacgcgggcgccggcgaacacttcacgcggcaccggctcaccgttgatattgctcaggtcgagcgtggccgtgccggacagcagctcaccgtcaaccggcacggtttcgcccggcaacaccatgagcacatcgccgagcttcacctgctcgaccggcaccgtgtcgaagcggtgcgtggcggccgcagccgacgccaagcccacacgccggaagccatcggacgaatcgcccttatcggtagcaaacccacaccccacaccaggcaggttgacgacgtgtgcggtctgcggcgcggcttccataagcgcggtcagactgcgctcggccttggcttgggcgtattcctcaatggcctcgccggacgtaatcatcagcgtcaccgcccaacttgcccagtattcggcgacggccacggtggagaggatcgcgaccacggccagcacatcaaccccgacctgcccgtggcgcaaatcgtcaatcatgccgcgcacagtgtcaatcacgataatcagcaccaatgcgataaccagccactggccgaagcccggattgccaagtaccggaatcgccatcgcattgccccacggacgccaatcgcccagtaaagccagcggaattgcggcgatgacgacgaccggaagcatcggcacaagcttgcagatgtcgagaattttggtgaagaatctgatgagtgcgcccatcattgctccttacgctcgtatacggagtcgattgcggtacggcaagcgtggcccgcgcaatcggcgctgcggtcacgccttgttaacccaccggcggctttgcctggggcttcgctttgctcggctcccgcgcgaccttccgatacacggcgtaaagaaatgttcagttttgtattgaattatgcgctttgttcggagcaccgcccgaactcagtgcttgacctaccctatcaacgagcgttgcgcgacatgccggatatcgaaactacgttggcggcatgggcgcagggcacaatagcgtatacgaaaggcccgtggcaggagtttgctcactgccacgggcctttgcttgtctgacacggtgttcagcggttaccgctcaacaccgtgtgacgttgtcgagtcggctttaccacaggccgaatgggtcggagaagccgccgccatcaccggtgccgccatcgttgttgccgttgccattgccgtaaccattccggccgttgccgttctggttgttctgcttattctggctgttaccgttggaatcggagctggacgaaccgttcaccgacgactcctcctgatcgagcgtcacgtccacatccatggtcttgccgtcgcgcacgatggtcagcgtcaccttgtctcccaaagccgcggcacgaacgtaaccaagcagcgagtagttgttgttcaccgcgttgccgttgaaggccacgatggtgtcgccctccttgaggccggccttgtcggccgggccgccggagacgaccgcgctgccagtggcgctggacttggtgatggtcgcgccgccgcgagtcacgccgtcggcttcaaccgtgtcggacttgatgaccacgccgagggcaacgtgcttgaccttgccgtccttgatgatttcgtcggccacacgcttgacgaggttggacgggatggcgaagccgatgccgatcgaacccgcggagtcggatgaggtggcggtcgaggcgatggacgagttgatgccgatcacctggccggccgcgttgaaggtcgggccgccggagttgccggggttgatggccgcgtcgatctggacggcgttggtgacgatctcgttgttgttgtcgtcggtcacggtcaccgggcggttcagggcggagacgatgccggtggtggcggtgtcgtcgtagccgagcgggttgccgatggccatcacgttctcgccgacggcgagcttgtcggaatcggcgaatttcacggccttgaggtcgctcggcgggttgtcgagcttgatgaccgcaagatcggtggtggtgtcggtgccgacgagcgtggcggaatacatgttgccgttggcaagcgtcacctgaatctgctgggcaccggagatcacgtggttgttggtgatgatgtggccttcggtgtcgatgatggcgccggagcccttggcggtgccgttgctcaacgcggtctggatggagaccacggagccggagacatcgctggcgacagtctgccagtcgggggcttcgccgctcttggcggtggcggacccggagccggacttattcgagctgacgttggacagcgaattgctggtcggcaaggtgatcaggccgctggtgagggcgccgtaaccgaggcccaggcagagggccgcagccagaacggcggcgaccacggcgatgaggatgttgctcgccgtcttggacatgccctgcttggcggggccgggctgaccgggctgtcccggctgggccgggccttgaccgttcggcgtaccggtaccgggagtgccgaaaccgaacagaccgccctgctggggctgctggccattccggccattctgaccggactggctggcaaacgggttgccgttgttctgctgcggctgcgtgggcggattgaacggattgccgttgccctgcggctgcgggttattggtgtagtagggattgcggttgccctgctggccctgtggggtttgctgtgcaggctgaccgaacgggaattgctgcgtgggctgggcattgctgccggcctggccgccctgctggccctgtgcctgagtcggggtcggaccataagcgccatattccggggccggacgatacagcggagttgtggccgaggtctggcctgcggccggtgctgccggagaagccggcgaggaggagaccaccgtgctctcgcccttggcggaggcgtagtccgggatgggctcggtggcggcagtgtcggtagcggcttgcgtaggctgctgatcggcagcgagggcggccgaggaaaccggggcttgctgctcgctggaatcgctggcgttgccggcatcaaccgagtcgccacccacaaacgggttcttcggctcggcgttgccggtatcggcagtactattggggttttcgttattccgcggggtctggtcgacgccctgcgggttaaattcgtcagccattgctgctccttttcctaaattcctatcacgtctgttcggcggctattcgggcacttgcccattgccacttctcgtgtgctacctcagtagtaaaggcagtcaatctggaggttttctgaacgttgattgaaagtctatgcgtaatcatcgcagagtcttatgggcatctcggcttcgaggggctgatttcctgtttcgggaacatctacttgcacttcaaggggctgttcgcgcggtcaattccgagtatcaagggccctcatttaacgccattccgccatttttgcagccggcctacttgaccgggagccccttgaagcggaagtagacgttcgggagcggcgaaatccgcccctcgaaaccgagttcttcacaatttccggcccttttctggcccttctgcctaaagtgaacatatgacgatcagccttcttgaacatccgttgggcgcacagcccggacagcccggcgaccgcagcgctttccatttcgaaacgatcacccgcctgccatccacggccagcgggcttgggcgagacggtgcccgatacggccgcaccggcatcattcacacgccccacggcgatattcgcacgcctgccttcgtgccggtgggcacgcaagccgcgatgaaggccgtgttgcccgagcagatgaaggatctaggcgcacagtgcctgctggccaacgccttccacctgttcgagcgcccgggcgaggacgtgctggacgcggccggcggcttggcgcgtttcatgaactgggatgggcccacgttcaccgattctggcggtttccaagtgatgtcgctgggcgtcggcttcaagaagacgctggcaatggacgtgaccggcatgaagtcggacgacatcatcgccaagggcaaggagcgcatggcctgggtggatgaggacggcgtgacgttcaagtcgcctttgaatggtgacgcacatcgtttctccgctgagatttcgatgggcatccagcacaaaatcggcgcagacatcatgttcgcgttcgacgaactcaccacgctgatgaacacccgctcctaccaggaggactcggtggagcgcaccttccgctgggcccgccgatgcgtggacgagcaccagcggctgacggctgagcggctgggcaagccctatcaggcgctgtatggcgtggtgcagggcgcgaattacgaggatctacgccggcgcgcggcctcgcagatcgcctcgctggacttcgacggcgtgggaatcggcggcgcaatcgagaagcgcatcattggagacacctgcgcgtggatctgcgacgcgatgccggagaaccgcccgcgccatgtgctgggcatcgcctccgtggacgatatcttcgcgtgcgtggagaacggcggcgacaccttcgactgcgtggcccccgcgcgctgcgcccgcaacggcgcgatctacacgcgcgccggccggtacaacatc

SEQ ID NO: 3384 - DNA, 10074 bp, Unknown
  R151_18m  MAG No. k141_27726
caaggccgtggaaatcgaaatgaccatcgacttggctgcctccactgccgagcgtgcgggcctgaagattcatgccactgaggacggtgcctacacctacgtggcttatgacgaccagatcggccgcgtggtggtggatcgccaggccatggccaacggcgatcacggctaccgcgccgccccactgaccgacgccgaactggcctccggcaagctggacctgcgcgtgttcgtggatcgcggctccgtggaggtctacgtcaacggtggccaccaagtgctgagctcctactcctacgcctccgaaggaccgcgtgccatcaagctcgtcgccgagtccggctccctcaaggtggattccctgaagctccaccacatgaagtccatcggactggagtagctctctcacctccctcacagagggaggttttttgtgtgcccctgtcgttcgccttcgcctatactgatggacggcatataacacaatccatcacacgaccggcaggcgcgcaggctcctcaccttactgttccacgccccggccgcaagcgccaccagcaaaccggactggcgcggaaagcaaggtgacatcccatgtccatcgccaagcgcctcaagcgccgcatgcccaccgtcatcgccgtcatcgtattgctggcagtctgggaaacgtgggtggatctaggacatgtctcccccacgatgatctccgcgccaagcgagattttcgccgccaccatcgaaacgtggaacacgctcggcccggccgcggcgatcaccggctatgagggcgtggtcggcttcctgttcgccgtgttcttcggcattatgatcggcatcgcactgtactgctcgcacacgttcaacgcggcgttctatccgctgcttgccgccgcacaaaccatgccgctgatttccatcgccccgttgttcctgatttggttcggctttgagatttccggcaaaatcgtaatcgtggcggtattcggcctcttccccatcgccgtgcagaccgtgcgcggactagaagcggtgccccagttctattccgacgtcgcattgacctgcggcgcgaccccggtctggacgctctggcacgtgaagctgcgcgttgccgcacgtcagatctatggcggtatccgcgtatctgccgcatacatcttcgccacggcatccaccgctgaatatcttggcgcgcgcaagggcctcggcatctggctgcaggctgcttacaattcgttccgcacgccgctgatcttctccgccaccatcgtcattatcctgatgacatgcgtactgatgctggcggtgaacgccagcgagcgcatcctgctcggcccggccggcgatgacgaagaccccgacgcggaccagtagttctttttaccgtcaaagacacaagccggcggccagaaccgactgaacggggcggcttctcatgaggtctccagccctgtctctataatggaacagctttaccagcgtgtggcaaaccggctttcttgagctttcatagggaatgccgggggcgctggtcgaacggaaatcaaggccctccatatcgttttctgccgacttccgttcgaagcaatcccagagaacgatagagagacaacgaattagggaaccatcattatgaagaaaagccttgtatccaaggccgctgccctcgtgggcgcccttgctatgactttcggtttcgccgcatgtggtcagaccaacaccgccgactcctccaactccaacacctccgacctcaagaaggtcactttcatgctttcctgggcgcccgataccaaccacatcggcgtgtacgtggccaagaacaagggctacttcaaggacgccggtcttgacgtggatatcgtggccgtggcccaggccggtgccgaacaggccgtgaacaacggtgtggccgacttcgccctgtccaacctgaccaacgtgggcatctacacgctgaagggcgctcacatcaagcaggtgctgcaggtgcagcagaagccgagcgccatttggtgcgcactggcgtccaacaccgccatcaagtcccctaaggatttggatggcaagaccttcgccaccttcggctccaacgagtccgacgccgtggtgcgccgcatgatccagaccgacggcggcaagggcgagttcgacaaggtgaccgtcggcacctccaccttccagaccatggaatccggcaaggccgatttcggcggcttctacgccacgtgggaaggcgtgcaggccgacatgtacggcccgaagctcaactgcttcaccgagcccgactacggcgtgcccggcaacgccgacgccatcggcatcatcaccaacgacaagaccatcaagaacaatcccgacctggtcaagaagttcactcaggccactcagaagggttacgagtacgcgtacgccaacccggatgacgccgcgcagattctcgtggacgaagcccctgacgccaacctcaagcccgaattcgtcaagaagagcatgcaggttatcgtcgacggccagtactggggcgatccggccaagatcaaggacggctctttcgtgctcggcaccaacgacttcaagggcactcaggaatacttcgacttcctggctgaagaagacgcctacactgacagtcatgacaaggtgattcatgaggccccgcaggccaaggaccttggcaccgacgaattcctcggcaagtaatttccgatattccgagtttgaatctacgcaaaaatgcgtccttcccatgaggaaaggacgcatttttgcgtatcggccgataaggttattcatagcgaatcatgctaacaaggaggcgattccatggcccaacgtcctgaccgcattattgccagcatggataccggtgttgatgatgcgttggcgttggcgtatttgttggggtcggcggatgagtgcgagctgagcggtgtgatcgccagttatggcaatgtggatgcgaacacggcttatgccaatacttgcgcggtgcttgatttgtttggccgggcggatattccggtgtttttgggctccgagcatccttcttgggctgatgcgtttattcccgatgcagggtgtgcccagtttcatgggaaggatggactggggaatacttggctggcaggggccggggctctggctgatggagctggtgtgcctggtgatgatatgtctggggatgacatgtctgaggatgtgcccgatggggttgtttctgttggcgggtatttggtaggggacgctcatgctcatccggcgtcggggtcttgttctcgtgtgggtcgctctcggcctgtggaccgtccccagtcggctacatcgacagctctcgccagctggggcaaaaggaggcgctccgttgatgctgcggatgggattgagtatctgattgagcaggttcgtgagtttggccgagacgttaccgtgctggctaccgggccgttgacggatgtggatgcggctattactcgggcaccggatattgcgtcgaaactcaggctggtgatgatgggcggtacgcttacccaacccggcaattgttgggatgcggtggccgagacgaatatcatccaagaccctgaggccgcgaatcgtgtatttcattccggcgcagacatcacaatggtgggacttgatgtgactcaccagtgtttgctaccgcgatcggcggccgaccggtggcgtgcgacggggaccaagcgcgggcggttcttggctgatctcgcggacttttccatcaaggcaaatttggaagccgaccccgcactgttctctggcggcatgccgttgcatgatccgttggcggcggcggttgcacttgattcttcactggtcgattgttttgatcttgcgttgcgcgcggagaccaataccggtgatttcaatggagtacgaggccggaccaccggagacccggttgggctggtgaatcattccatgccgcatgtgcatgtggcacttggtgcggattcgggacgttttttggatgagtttgcagagaggatggctgaggtgtgccggtaactcccctcagtccgctacacggacagctcgaccgcaattacggacaagctgccgctcgcattcttctggctcgactctcgtctcgccttcgcctacaaacagcccatcgggctgtttgttttacggctcagccccctcaattttgaggggcttaacaaggactatttcacacccccagcaatcaaggaccggcttcgccggactcatcattacctggtcatgtcctatcggcctcggccaggcggcgtgaacgaacagtccataggactgttctttatttcacgccgccaaatcggcgatcgcggtggatgtaatggtcgatggagcgccatagcacgtcacggccgcagtccgggaagagttcgggcacgaagtcgagctcggcgtaggcggcctcccacggcaggaagttggaggtgcgctgttcgccggaagtacggatcaccaagtcgcaatcgggaacgtccggattgtacagatggtcggcaatcatcttttcagtcacacggtcgccggaaatcttgccatcacgcacttcgcgagcgatggcggcgcaggcgtcggcgatttcagcacggccaccatagttgatgcagaacaccacatcgatgaccttgttgttcttggtacgctcctcggcggcctcaagctcgtcgatcaccgacttccacagcttggggcgacggccggaccaacgcacgcgcacaccccactcgtccatctgttccacgcggcggtggatgatttcacgcgagaagcccatgaggaagcgcacttcctggggcgaacgcttccagttttcagtggagaacgtgtacaggctcaaataccgcacaccggcttcgatggcaccggcgatagtgtcgaacaccaccggttcggcggcctgatgaccattggtgcggaccatgccgcgctgcttggcccaacgaccattaccgtccataatcacaccgatatggcggggtaccttgttcttggagaagtcgggaatacgggcagggtcgctgaacggagctgcgggaatgtccaacgacgtgtaatcaacgttctcaaaagccatactcatgaatctatcaagcgcagcgaacgaatcgggcgttcgaggtaatactccccccaatcttcaaccaactcctgcacaacccgctccacaggcgcggcatcaagcaccgaccaatcgccacgaatcagtgcatcgaactggtttaacacgaacggcgcgatacggcgcgcatcggtagtgtggtcggcttcgcacatcacgccgccggacgcgatggacaggtacgccggctccgccttgccgcataccacgcaagtacccaatcgtggcgtccaaccggccaaggccaaggcgcgcatcacataggagtcgcctatggcttgcggggcgtgggattgtttggcgagcgcgttcaacgcgccgatgagcagccgatattggttcgtcagctgctcgtgttcggtgctggcgagtttatcgatggtctcgacgatgacgttggcggcctcatacgccgcataatccgccgcgatcggagcaccgtaagcggcgaccgcttcagcctgggagaccacgtcaagcgagcggccttcagcgataagcacatcgactcgcatgaacggctcgagcctggcaccaaagcgtgatttggtgcgacgcacgcctttggcgaccgcccgaatcttgccatgcccacgcgtcaggatggtgatgatacgatcggcttcgcccagtttggaggtgcgcaacaccacaccttcgtctcggtacagcgacatctcatctcctttccccgcgacgcccggcagactctactcaatgaagtagtcagtaaataaacaggccccagaaggcgaacaccaacagtatgtacagcatggtgaaagccaccagccagaacaggactcggcccagacgggtggaggcgagtaccgggtcggcaccggtgacgatgtctcgaacggattcacgacgagggggtatctgaatcagtccgcgggcggaagcgacctctatcagatgcataaagacgcgggaccaagcccatagcaccagcacggacaccacttggatgaccggccagctccaatacatgacgcccggcgtctcggtaggagcgctgccccatgcaagtttgaccacacccataatcacctgtccaagtccggcaaagaagatgagcagcgtggcaagagtggtgagggtcaaagtcagcagcgcgttgccgaaaccatgtgcgaaaccgagtatcacaggccgttccggtatcagcatgcccgcacgtttggcctcgcgtttctcgcgccgccatcgggcatccgccgcgattttgcggcccagcgccgccagtgccagcacgatggatgcgagcagcagcagtaccaccgtgacgtgcaggatcacaccatatatggtgccgacgcgtcttgccttcaaagcgcccggcagaccgattgattggtacagattggtgccggccaccttttcgctggtctgcgtgagtccggcggaagtgccgacggcccaatcgatgagatcgtccacataggcgtccgcaaacggggtgcccgcttcggactcatcccccaaacgcagcacatggttggcgaccggatagctgcgcacggtcacgttccagttatcggctttgtgggcgttgtagagaatcgcacgcacgccgtcgacctgcgccgtcatcacgtcttttgaaccgtaagccacataggtgggtacggcgtaagcggcgggtttgagcgtggcgaggtcggaattgttcagtccgaacaggccggtgtccgcgctgaacacgcgttggacgatggatcgatagccctcgttcgcgccgacaagagtgaagtcctgggtgacgaaaaatcccagtgattggcgtgggctgaacaccatcgggctcagaagaatctggaaggcgacgtccggatcgtcctcgagcagatatgaggagatccatgtcgattcggaggtggcatagatgccgaccttggcggcgtctacatcgctttgggctcgtaggtattcgatgacctgatcatatgccttggctgaggccggataatcgcggttgatgtcggtggtgctccagacgggtttgtcgagcactgcggtcacaaagccggccgaagccatatcggaggccacatcgccaaaggagttgtcacaggtgccgtatccggcaccgtgcatgaacaccacgccggggcgcttgcctgatgcgttctgaggttcccgaatcaataccttgatggcttggacgccgtccgcattggccttgccccgatcaccaggctccttggtcagattgccgtcgctggtcatgttcagcgtgatgtatcgctcggtgacctcatacgtgcctttcgccggcagcgtttctccggacgggttatcgaaggtgacttcggtatcgtcggtgagcgtggccatcgactggccggtgggttcgatgttccaaggcaccgtggtcaggttggaaatggagaccagcacgccgatcaggataatgaagatgggcaggctgaccatcagccggtgggtgctggtccacggcttggatcgaacagtcaggcgatgctcttcttcttgcgacacgtgcgctattgtaatctgaccgcgatatttacgccgagggcctattcggccgaatcagtgaccgggatgctggattgggaccacgaccgggccggtggaattgacgggcacttggccgtcggcctccatttgggcggcgatatcgttcgctatggtgagcagcgtgtcgacgatctggtcttcgggcacggtcttgatgaccttgcccttgatgaagatctggcccttgccattgccggaggccacgccgaggtcggcttcgcgtgcctcgcccggaccgttgacgatgcagcccatgacggctacacggatcggcgcggtcacgtccttcaggccttcggtgacggcggatgcgagctggatcacatccacttgggcgcggccgcagctcgggcaggagatgatgtcgaacttgcgggggcgcaatcccatgtattccaggagtttgcaccccaccttgacctcttcgaccggcggcgcggaaagggacacgcgaatcgtgtcgccaatgccctcggccaagagcgcaccgaacgccaggcaggatttgatggtgccttgccaggcggggccggcctcggtaacgccgaggtgcaacggccaatcgcccttggatgcgagcagtcggtacgtttcgaccatggtgatgacgtcatggtgtttgacggagatcttgaaatcgtggaagccgacgtcctcgaacatgtgcgcttccttcaaggcggaggccaccagcgcttccggagtcgggccaccgtatttggcgtagagttccttgtccagcgagccggcgttcacgccgatacgcagcgagatgcccgcgtcggtggcggccttgcagatgtccgggccgacttcgtcgaacttacggatgttgccggggttcacacgcacggccgcgcagccggcgtcgatggcttggaacacgtatttggactggaagtggatatcggcgatgaccggaatcggcgatttgcggcagatttccggcagtgcgtcggcatcgtcctgactcggcacggccacgcgcacgatgtcgcagccggcggcggtcagttcggcgatctgctgcaacgtggcaggtacgttggccgtgagcgtgttggtcatcgactgcacggagatgggcgctcccccgcccaccggcaccgggcccaccatgatgcggcgggacttgcggcgcgggtgcaagggcgattcgctggtcaggtcgaccggatcaccggttttgcggaacggcttttcgatgggattttccgtattcaaggtattcatcattgcttgtttatcaggttgtcggcgcgtcggcgggcttcaagctcaagctggttcatttcctccacgtccgtgaacagcgggttaccacgaagctcggcgtccatctggtccagcacggctttgaccgtgtccacgatgccgaggtacggcagccgatgatcaagaaacgcatgcacggcctgttcattggctgcattgagcaccgccgtatgcttctcggaggcggccaggcagtggcgggccagttgcacggcggggaacgcctcatcgtccaacggctcaaaggtccaagttgcggcttgcgtccagtcgcacgcggcggccacattggtcatgcggtccggcgcggacaggcccagcgcgataggcagacgcatgtctggcggcgaagcctggcaaatcgtggcgccgtccacaaattcgaccatggaatggacgatggactgcgggtgcacggtcacgtcgatgcgttcaggcgacacattgaacaagcgggacgcctcgatgacttcgaggcccttgttcatcagtgtggaggagttgatggtgacaaccggccccatgttccacgtcggatgatgcagcgcctgctcgggagtgatgttctccatgtcgacacgtttccagccgcggaatgggccgccggaggcggtgaccacaagcttggcgacttcggcgtgggttccggagcgcagggattgccagatggcggaatgctcggaatcgaccgggttgatttggttctcgcgcacttgcgcgctgaacagcagatgcccgcccgcaactacggactccttgttggccaatgccagctgggaaccggccttgagcgccgcgatcgacggttcgaggccgatggagccggtgatgccgttcaatacgacattcgcaccggagccggccatggcgatgaccgaatccggaccgccggtcacgcggacaccttgtgcgccggcctgtgcgagagctgcttgcagcgctggaaccttggtctcatcaaacaccgcgacttcggacacatggaactgtgcggcctgttgcgccagcagctcgatatgtgctccgcccgccgccagaccggtgacgttaaatcgttcaggatgacgcgagatgacgtcaagtccttgggtgccgatggatccggtggatcc

SEQ ID NO: 3385 - DNA, 6218 bp, Unknown
  R151_18m  MAG No. k141_27921
aggccgaggacatcactccgcgcaccgtgttcttcggtgccaaggccgctccgggctactacctggccaagatgaccatcgagctgatcaacaacgtttcccgcgtgatcagcagcgatccggccgtcaagggcaagctcgccgtccacatgctgccgaactacaacgtcgagatggctcagaacctcatcccggccaccgagcttgacgagcagatctcccaggccggcaaggaagcttccggtaccggcaacatgaagttcgctctgaacggcgccctgaccgtgggtacgctggacggcgcgaacgtcgagatccgtgagcgcgtcggcgccgagaacttcttcctgttcggcatgaccgtcgacgaggtcgagaagaagtacgccgagggctacaatcccgcctcctactacgaggccgatccgcgcctgaagcaggccatcgatctggtggccgacggcaccttctccaacggcgaccgcaacgcctactccccgctcgtggccgactggctgaccaaggactggttcatgaccctggccgacttctccgcctacatggacatccagtccgagatcgaggccctctacgccgatgagctcgaatggaaccgcaaggccctgctcaacgtggccaactccggctacttcagctccgaccgctccatggaagactatttggaacgtatctggcacactgctcctctggcctgacggccgccggagcagcgcgccggctacgtgctggtttctgcctcgcggctgtcgccgctcggcgtcgcctacgggaagcccgccgggcttcccacttaacggctccgcatatctggcacactgctcctctggcctgacggccgccggagcagcgcgccggctacgtgctggtttctacctcgcggctgtcgccgctcggcgtcgcctacgggaagcccgccgggcttcccgcttaacggctccgcacatctggcacactgctcctctggctgactgagtcggtggggcggctcccctcggagaggggaaccagaacataagaagccccgcaaccgacatccatcggttgcggggcttcttgcgttgaaagaccgccctatcaggcttcggccggggcggcttccgcctcgccatcggcctcatcttcggccttgttcagacccaggtcgaccggcgaggagctgttctcccacggctcctcccacggatcgtaatctgggttctgctgcttgtagatgtacaagccaacaagcgcggcgagcaatccgccgaacagcagcgcgaagaacttccaaccgttagaagacttgttctccatgacggctcctttccctagggatcgtctggtcggtatgcccattcagaccgactctgctccctattctaggccgctgtttgtgacgattgggtggaatgacattcgtgggcgattcatccacgcccgcatgccctcggccggctcagcatcttcgcggcgcgtgaaacgcatccgagaccttcgatacagtggattgcatgcatattcctacacaacgggagattcgataccagtgggagcgcggtggtccggtgatgacctgggcgctgattggtgcgtgcgtggcagtgtggctactggaggtattgctgggatttattgccccgggcctgagggcttggttgatgtacctcggcatggcggctccggtcagactggtggctgagccgtggacgctcatcacctcgatgttcctgcatgcgccgaactcgctattgcatatcctgttcaacatgatcgccctgtattccgtgggcccagtgctggaacgaatgatcggccactggcggttcttgggactgtatgtgatttccggccttggcggctctctgggacttatggtgtgggctgcggtggctccgggaggcatcggctggcagatggcagcctatggggcttctggagccttatttggcctgtttgcatcattgctggtggtatatcgccgtatcggcgccgatatccgctccatgttgatctggatggcggtgaacttcgccttgccgttcgtggtcgggggcgtggcgtggcaggcgcatgtcggcggctttgtagtgggtggaatactcacatggctgctggtgggtggtgtgccggcgtggcgaggtaaaagcctgaaatggcgtatgcaggtttacggctgggccatggtggtgctggtcgttgtgttgattctgttgtgcaatatggccaatccttacgggtggatgagtttcggctccctgcactgatatggcttgatatggctgtaaaaaacgattgatgccgggtattgcggaacatgcagtgcccggcatcagtgtatgtacggaaagcggcgatgtggatattagcgatgtggatatcgtcattcggtgagtgggcatgcgctgtatgaaggtatccacagtaatgaaggtatccacagtaatgagatgcgcgcaatgacgagttatccacgataacgagttatccacaatggtgacttgtgcacaagtgtgtagaaaagtgcataagactgtggataacttatgtggataagttaggaatgccgcggtattactgggtttgttgcagtggataactcgggtgtataactgttccctcgctgtggcgatgtatgccaagccaaagttatgcacgagatatacaccgagaaacgccgcttatccaccacttatccacatggttttccacattcggtggaaaactacatgggtgtgattcatccacaggctgtggataacgtagtggataagtcgtggataagtggtggatagctgtggatgaacaggtgaaggcacgaaaaaggccggcctccgcatacgggaggtcggcctttcgcataagaactaagaacaacctaacgatagaaaaaacgatctaccgatagataagcgcaacgagtcggaactcagcgccatcccatcgtcatcaggaatccgatcatgatcagggcgaagccgatgcccaggttccacgcgccgatgttcggaatcggccaggagccggacggggagaggtagtacaccacacaccaaatcaggccgatgatcataaacgcgcagaacagcggcacgaaccaacgcgggttcgacttggtgcccttaatggtttcttcaacacgcttggtgttctccgcctgacggttcatcatgcgctgcatctgcggggtcagcgtggccttatcggcagtggcgttgagcacggcctgcacctgctccatattcacgccgtaagccgcgtcttcctcggcagaagcgttctctgcgttctgctcggtgtctttgttggcggtctcgtcagcagcggtgctggatgaggtctcgctctgccagtccttctggttgttcgagtcggtctcgtgcagctcttcgtcagccatcagcatagtctccattcaataggctaaaagtcataatagtggctacactcgaaagcggcgaccagagtcggcaagaagacaggaaattcatggccagacatgtaggtaagcacggcgcacggcactccctatggggtggtgtcgcggtattcgtcgtcattgccttgaccggttttctgctgagcaccaacgtgagggtcaatcgtacggttgccgccaccaacgatacggccgatctggtggagcaaggcgtgggcgaggccaaccagctgcagcaggacgtcagcgatctgaccaaacaggtcgccaatcttacggacgcgctcaaggccgatggcaccgacggtactgacagcacgcagaaccaaggcaaggactccagcaatgtggattccagcctgatgctgcccgcgctcagcggcagcggcgtaacggtaacgctggatgattctccgttatgggagaacgccgtcaacaacaatggcacgaccgccaatatcaacgattacgtgattcatcagcaggacgtcgaatcggtggtgaatgccttgtgggccggcggtgccgatgcgctgatgattatggatcagcgggtgctgttcaattcggcggtcatctgttccggcaacgtgctgtcgttgcacggtaagaaatactcgccgccattcaccatttccgcgattggtgacccgcaaagactccgcgcagcgttgaacgactccgaagccattaccattcttaagcaatatgtgaccgcgtttggcattggctacaaggtggagaatgccgagggccttcagttccccgctaccgccgccttgctgcagcagttgaaatatgccacggtcgatacgtcaaagaccacagatgaggagcagactcagcaatgagacacggcaggcacaacagcggcgcaccggcgcccattgatctcgcgtccgtgtcggacgtacagcccttccccgaggacgacgccgcacgaatggcggcagacccggccaatgccagcagggcaaggtcccgtcgtgccgcagtacgcggcgcgtcttcgccccagcggagcctgatctggcaggcactcggcatctgcgccgaactgctgattaccgctgccgtgatttgcgccctgtacatcgtctggcagatgtggtggaccggtgtcgaggcggagcgagcccagaacgaaaccacccagtccgtcgactggagcgaccccagcaacaacgggggaacggtcaccatcgccaaagcccaggagggcgatgctccagtacagccgaaagacgcgaaatatggcgacttgattgcgcagatctacattccgcgcttcggctcccaatggcaccgcaacatcgtggaaggcaccacgctcgagcagctcaatcgccacggtctgggccattacgacaccacccagatgccggggcaggtcggcaacttcgccgtcgccggccaccgcaacggctacgggcagccgttgggcgatgtggacaagttgcaggaaggcgatcccatcatcgttcgtaccaaggattactggtacgtctaccactacacccggcacgagattgtgctgcccacggacgtgtatgtgatcgcgcccaatccggaagactccactgccaatcccaccaaacgcatgatcacactgactacctgtgagccgaaatactccacccccacccatcgatggatcagctatggtgagttggcgtactgggccaaagtgtctgatggcgtgcccaaagagctggctactactgattcgtccggtgcagtgaagttctccaccaccgaaaccccctcgatcgcttcccgcattggctcgctggacaaggtggtattcggcgcgctggtagtgtggctggttctgttcatcgccgctgcggtggcatggcgctggccggtgctgcgcgagattcgcgcgggtgagcgtcgccgcccggatgccagcatctatggcggactgttgcgtctgcagcccggcgtggcaccgattcgatggctgctgctggctctgctgctgttcgcagccgccgcggcgctgttccagtggggattcccttgggccgccgccaatattccattcctacagcagatgtcgaacttcgtggcagtgagctgacggcagcctagtactatggcttgcagtacacgtccctcaaggagagccctatgaccgattccgcgcatattttggtggtggataactacgattccttcgtctacacgatcgtaggctatctgcaaacccttggcgccactgttgatgtggtgcgtaacgacgctatcgacccagccgcgccgggtgtactggacggttacgatggcgtgctgatttctcccggccctggcgctccggccgaatccggtgccagtgaggatatgattcgcctgtgcgcggccagcggcgtgccgatgtttggtgtgtgcctgggcttgcaggcgctcgccgaggtgtacggctgcacggtgggccacgcgcccaccatcatgcacggcaagaccagcccggtggagcatgccgatgacgagattttcgagggcgtggccaatcccatgaccgccacccgctaccattcattggccgttgagcccgattcggtgccggatacgctggtggtcaccgcgtggacgcaggatgaccacaccattcagggcatcaaggtcaaggacaagccgatgtatgccgtccagttccatcccgagtcggtgatgacccaggacggctaccgtctattggccaactggcttaaggtctgcggccaagacaacgccgtggccaagtccgccggccttcagcccaaggttacgaagtagc

SEQ ID NO: 3386 - DNA, 23660 bp, Unknown
  R151_18m  MAG No. k141_28217
tcatctcccccggccggtgcgtggcgagcgcgcgcaatcccatgcgttccagccacaggatcgccgtgtcggtggcggtgcggtagggcacgccgtcgagcatcattggcagggcgatgttttcgacggccggaagttcgggcagcagttggccggattggaagacgaatccgaagacattacgacgcagtttggtgcggtcggcgtcgctcatatggctcaggtcagtgccacggaagacgaccgtgccggcagtcggcttgataatgccggccaacgcgtgaagcaaagtggatttgccggagccggacgggcccatcacggctactgtctcaccctcccggagcgtgaagttcacgtggttcagggcgagcgtgtgcatggtcggcatggcgaagccgggctgggctggctgggatggctggccggcctgaatggcacccggtccggccgcagcgggattcgccgacgcataaccggctcccgtgccggctggcatcacgccggtgacgccgtgccctgcctgtgcgcgggccatgctggcggtgtagtccatgaccaggtcgtgcgcctcgatgaccggggcccactgctgggtgtgcgatgccggctgctggaactgttggggttgctgagactgctgaggctgagccgccggtcccgacgccggctgaggctgctgcaattgcgatgctgctgtgttcatactcccgagcgtacggagcgaacgcccagccgaccatcgggctgcggtatgaacctttctggatcaccggcccgctcctcatccgcaaggattagagatacgcagtcgacgcgacaatccatatatcagatgttcattgctcgagaagacgaggaacagtggaagaccggttcggaagctggaaccacaacagaccaagcaaaggagcccacatggccatcgcaatcgacatcccgcacacaccaatcatgtccgtacaaaagtcgtacaacaggagtatgactacagagaataacaagaacagtcgttttgaaatgagactcacctaagagcaacgttccagaatcgaccaagcggccgagtccaaaggcatgacttcgttgcaatgggcattatcgaatctgctcgccgccgcagatcgggacatccatgaagctcatatcattcggctcaacagtaaagcgtggaatgatttcaccgcagcattaaacgaacctatgggcccacgtctgaatgaattgttggagcgtgatcccatatggacgtgaccaacttcactgagcctcggcacctgactgcgagcgaggatatttctggtttcgactgtggcctgccattggtcaatgattggctggtttccacacactaagtgcatacagcattgagcattcggaagcccggttggctgaggcgaaatagtccgaaccccattcccgtaattttgctaggcatgatgggcgtggatatcagatttcaaaccatgcacgtcgacagtcagttactccgagatgcggtacttcattctctgaacgatatgattttcggcatatccctgaatcatctagaatgtttactccgctcaatgtccacaatcaccaatgattaatggctggagaccgctatttgacgccgaccattgtctgaatcgcattcagacacaacactcctcattgcgcgcagaccagcgagttccgccgagtcggcgatgtgtctcttcggcggttgatttaggattttccgcatgcgacagctgaccacaccgctaaaaatgccattttcgcactgacttggggcggaggtcgtggcgaaacgcacgagggaacgtgtgtcatccgatatggtcatgcccgccaggcattgaagcgtcctgtctatgcgcggttgatgtcccggtggcggggtcaatcgatcgacatacgaaccgggacagattcggctgtcccggttcgggatctcggcctcttttggcgaaccgggacaggcccttccatgaacacccgatatatgcaaatccaaaaccccggaattccgccattccccgacggcgaccatcgcacgatagggcgtcaggtgaatgagattctgtcccggttgcccaaaaagaggcaaaatgacgaaccgggacagcgaaatctgtcccggttgtcccaaaagagacgaaatgacgaaccggggcagcagaatccgtcccggtccacacgcggttcacacgcattacccaggtaaactcatcggcaaaacattggcccagccaacaccactaccgatgtccagcacaggccagctcgtccaggcgggcggcgaagcggggccagtcggtcttcatagcggtgaggagcttgcggttgggcacgtcgtcaatcgggacccagcagatttccatgctttcgtcgtcgtttgccttgggctcgacggtgtggccgggcttttcaaaggcaaacacggtggtgtaggaccacgggccatggtcctcgcggtaggagccgaccacctcgatgtcttcgggggtgatgttggcttcctcgtagctttcgcgcagcgcgccttcgatggacgattcgccgtccgcagtggcaccgccggggataccccacgtgccaccttcggcgctccacgcggcacggtgctgcatgaccacgtgagtcaccttgccgctcgccgggtcgcggcgagccagcagaatgccggacgcaccgttggtgccccaatgcttgcggccgcaggcgcagtccacccagccatcgccgggctgatgcacgttttcgaccggcggcagaatgccagcgtgctggttgcccgaggccttgctttccggctccagttcgccacggccgacattccacaggtcggtccacgtgatgcccagttcgccggccagatgccgggccagcggcaggctgaggccgatgataccgtgcggatcgccctcgatgctgtcgatgaacgcgccgccgaagccttccagcgtgaacgatccggcgacttccagcggctcgccggtgacgatgtaccgttcgatgtcgtcatcggtgaattcgccgaaatggactttggcatggcttgcgccgcgcacggtacgtccggtcgcgaaatcgatcaggcagtggccggtccagagttcaccggtcgcgccgctcatgcgcttcagtcgttcgcgggccacggcttcgctgtgcggcttgccgtagcattcgccgtccaggaggaacatcgaatcacagccgagaatcagcgggccgaccgtcgcctcggtcagtcccggctgtccggcaatagcggtggcgatgggttcggtgatggtcggcatgtcgatgccggagaagtcgcgcgtggtggcgacttccgccttggaatagtcgatgggccggccagcggcggctttgcgcaggtcttcgacgacggcttcgcgttccgaatccttgatttccttggccttgagcgggtaggcaatcacgcgatcgccggttgcggcggcggcagtattggccacatcgcgatacgcacggtgaacggcctcggccttggctgcggcaagaatcatcacacgctgcttgatgctcaaatcgtcgacggtgacaccttcctcacgggcggccgcttccagcgcagcaggctcatcaacgtgcgagacgcgaattgtggggcagatacccgccgaatacagcacgtcacggcgaggcttggacttggaagcaagaattagcggaatggacatgacttaagtccttatgctcccgctggcgggagctgtcgaacgaagtgagactgagggtggtctctgccggtatggcggaccactctcagaccgcctgcggcggccagctcccgccagcgggagccttctcctcgacttagcgacgctcgatttcgacgccggcggtgttgatgggcaggtgaagcacacgccagtggccggaagcaagctgctccgatgcgatctggtcgatggcttcgcgggcgttgccgtaatgcagcacgagcacgcaggggccggcaccggagacggcggcggcatagcccttggagcggaagagcgcaatgagctcggtggacggcggcatcagggtaccgcgatacggctggtgcaacttgtcctgcgtggcggtgaacagcagcgcgttggactgggcctgagcggccgcaagctcgtcagcgaacggcgattcacgggttccgccagcgcaagcgcacgtatcggcatcctgagccggggcagcggcgacgccggacttgccctgctgggcggcctgggccagcaccatgggattcatcgcagcgggcagcagacccacgcgagacacgttgtagacggcgtccttgtatggcagttccctaggcagcgcctgacgggccttctcagtggacagctcatagtcgggcacgaacacggcggcggtgatggacgggtccaccgggtagttgacggcgtggaatccgccgtgcagcggttcaccaccaggaacggcgaccgagccgacgccttccgcggtttcgaagtcccaagagacggtcaggccaccgaacacagccggggccacattgtccgggtggccttcgatctgggcggccatatcgaagatggccggacggttgaggtcaccggtctgggcgaaggccgcggcggcggcgatgccggccacaatggcctcggcggaagagcccatgccacgagcctgagggatgttgttggtcgcttccagcgtgaagccgagtcggccgaggccgaacgtggcacaggcacggcggaaggtggagaccacgaggtgggtttcgtcgcgtgggagggtgtcggcaccctcgccgtggatgatcacgtgggcaatgccgtcgttcgggtcgtcgttgagcgtgaaagtgagctcgtcatggtagtcgagcgccagacccacggtatcgaagccggagccgaggttggcggacgtggcgggcacgcgcacgtgaacgctattgcagattgggttcatggttgttccttaaaaaggagctccccttgtcaggggagcttgggtattcagctttcaactcacgggcagccgttcgaccgcctcatcagagggagcctagatggtgtcagtccagcacgcgcaggatggacgggtcaccggtgacgaagtcgagcgcctgcacggccttgacggtgttgcgcagggtttcctcgtcggtcaggtgggtcacgatgcgcaactgctgaatctcgccgtcgtagccggggtcggtcatggtgggcttcagatcctggttcacaccgttgatggagacaccgttcttggcgaactcggcggcgatggcggccagcacgcccggcttgtcgtggatcaggaagcgcacggcgaatgcagccttggaggcggtaatcggagccttcggcagattcttgtacagcgggatggacgggccggtgcagccagcagcaatgtggcgggcttcggtcaccacgtcgcccacgacggcggaggcggtcggagcgccgccggcaccacggccgtagaacatgaggtcgtcggcggcctcggccttgacgaacacggcgttgaaggagccgtgcacggaggccagcgggtggttctcgtcgatcagggccgggtagacgcgggcggagacgccggcctcgccgttctcgaccacggcgagcagcttgatgaccttgtgctcggcggtggcggcggcgatgtcgtcggcggtgatcttggtgatgccttcgacggacacgtcgtcgatggtcacggaggtgtggaagccgagggtggccatgatggcggccttgttggcagcatcgtagccttcgatgtcgccggtcgggtcggcttcggcgtagcccttggcctgggcgtccttgagcacgtcgtcgaactggagacccttggtggtcatctcgtcgagaatgtagttggtggtgccgttgacgatgccaagcatgttggtcaccttgtcgccgaccagggactcgcgcagcgggcgcaggaacggaatcgcaccgcctacagcggcctcgaagtagatgtcgacgcccttggcctcggcggcggagtagatctccgggccgtacttggccagcagcgccttgttggcggtgaccacggaagcaccggattcgatggcggcaagcacgaacttgcgggccacggtggtgccgccgatgagctcgatgacgatgtccgagttggtggccacgctcaaagtatcggtggtgacgatggactggtcgatccacgggaacttctcggtttccttcgggtcgaggcaggcgacgccggtcagttcgatcgggcggccgatacgagcggacagttcgtccttctgctcgacaatcaggcgggcggtctgggagccgacggtgccggcaccaagcaggcctacgcgaatcggggtttcgctgttgtgagccaattcagggtccttccaaaaagttttctatatcccacgcctattttacggattatttccgacagcagaccgaaagtactcatcaagctgacggcccttttcgtattatgacggttttggccgcacattacagactgtcaggcgctcacctctgcacgctgattactcgctgacgtcgaggttgagtaggtcgtctacggtctggcggcggagcatgacgtgcgcgccggactcgctgacagcaaccaccgccggaatcagcgcctggttgtagttgctggccatggtgcggccgtatgcgccggtaaccggcacggcgagaatgtcaccgcgcttcaaatcggcgggcaactgcacctcgtgaaccacaatgtcgccggattcgcagtgcataccgcacacgcgggcgagcatcgtttcagcggaaccagtgcgattcgccagacgcgcggtgtagtcggcaccgtagagtgccggacgaatgttgtcggacatgccgccatccacggacacgtacacgcgctcggtaatcgggttgccggcactgtctttggcatcggacaagtgcacgtgcttgatggtgcccacgcggtacagggttacgccggcgggtgccacgatgtaacggcccggctcgaagctgatggctggcgcgggcatgccgagcgcacggttggtgctgttgaccgcatccgccaagcgagtgagttccacgtcaatgtccattgaatcttcgccatcggtgtaggccacggagtagccgccgccgaggtcgatttcgggcaggatgtaggcgtcggtggcccacagggtcttgcgcagcagcatcatgcgcttggccgcgtgaatgaaggcgtccgcatcgtggatgttggagccgatgtgcgagtgggctccgaccagttcgagtacgtcctggttggcgaggatggtcttgagcacggcgatggatggaccgtccgcaatggcttccatcgcggcggccagcgccttgtctgtgtcggagacttcctcgtggctcaggtcgtacgggtacttgacgtcgtagtgcagctcgcgctctgatttctcggtcttctccgcgccattttccagggaatgcgtcgcagagatacgcgcgttggtagcggcaggcgtcacgtctttgagggcgttcagcacgtcgagcacggcggcgtcggccccggcggccagcagcggcacgccgaacttctggtcctcgtgagcagtggagatgtactcgtggccgccggcgtggacaccgacggtgacgcgcagcatcacacgggcgcgtttgccgagcctgcgggcgatggcggcgacgcgctccggctcgtcgggctcgtcgatcacgattttggcgaagccctgttcgatggccagcgcgatttcctcatcggacttgttgttgccgtgcagtaccagacgacgtccgggaacgccagcggcgagggcgattttcatctcgcccatcgtgcaggtgtccacgaacatgccggcctcggtgaccaatcgcacgatttctttggacaggaacgccttaccggcaaagctcacgtgcgtagtggatgtgttgaatgcttcggcggcagcgcgcacgaagtgcctggcacgtgcgactacttcatcagtgtcgatgagatagagcggcgagccgaactcgtcaagcagcgattcggcggtacgaccgtggaatgtaatggcaccgtcggcattcacagccgtagcggccggccaaattggagaaatgggcataatcacatcttttcgggggcggtgacgccgaggaggtcgaggccgttggcgatgacctgctggacggcgtcattgagcttcaggcgggcggcggcacgggccggctccggattcttggcgatctccaaggccttgcgagcctcatcgtcgccacgggtttccggatcggtcagggccatcggcaccacgcgctccacgttgtaccacttgtgataggtggcggccagctcttcgagataacgggccaccttgtgcggctggcggtcgtcggccgcagtggcgagcacgctcgggaactgggcgagggcggcaagtacctcgccgtcggcctcggtgtcgagcagggccaggtcggcaccctcgtagctgatgccggcggcggctgcgttgcggtccacgttcttggagcgggcgtgcgcgtactgcacgtagtacaccgggttgtcgttggtgtgcgaggcgagcagggccaggtcgatgtcgaagttctggttgtagtcggagcgggccagcgagtagcgggcggcgtccacgccgaccacggagaccagatcgtcgatggtcacgacgttgccggcgcgcttggacatgcgcacgggcttgccgtccttcatcacgttgaccagctggccgatgagaatctgcatgttcttgccgggctcgtcgccgaaggccgcgcacatggccatcatgcggccgatgtagccgtggtggtcggcgccaagcatgtagatggccacgtcagccgggttttcggcgcgatgtcgcttgtcccagtagtaggcgatgtcggcggcgaagtaggcgaactcaccattggacttgatgatcacacggtccttgtcgtcgccgtgcttggtggattcaaaccaagtggcgccgtccttgtcgaagatgtcgccgcgggacttgagctcttcgatggcgtcgtcgaccttgccgtcggcgtacaggctgttctcatggaaccagacgtcgaagttcacgcggaagtccttcatggacttctgaatctcatcgaacatcatcggcacagcgcgcttgcggaattcctcgcgcacttcggtgtcggcctcgccgagcggttcaccgtcgtcgttgaggccttgatcttggtgggccagtgcggtcaggtccacgccgtcggactcggcttcggcctgaacacgggcggcgatctcgttgatgtaggcacccttgtagccgtcgcacggggtttcggtctggtaaccggcctcgccgaggttgttggcctcagcccaagcggcgaccagcgacttggcgaaacggttgatctgctcgccgtggtcgttgaaataatattcgcgcaccaccttggcaccgttggcctcgagcacgcgggccatggcgtcgccgacggcagcccaacgagtgccgccgatgtgaatcggaccggtggggttggcggagacgaactcgagattcagggtctggccgcccagatgggcgttgcggccgtattcgttgaccttgttgagatgcttgtcggtgtcggtcacggcaccggcggcgagtacggtgtccaccacggcggcggccgaggcggagtcgagcgtgatgttgatgaagccggggcctgccacctcgaccttggcgatgccgtcggcttcggcgagcgcggcggcgaacggctcggccagatcgcgcggcttcatgccggccttcttggccagctgcatggcgatgttggaggcccagtcgccatgcgcgcggtccttcgggcgcatcacggcgagcttgtcgacgggcggaatcagctcgtcggtcaacgcgccggcctggccggcggcgacgaggttgtgggcaatgctggaaatcagttcacttaaggcttcagggctcattcttctaaggataccggcgatggcgacaccatgccgcgtccggtcattgtcggcggccataatggaacgacgcgcgaaagaggtgcatatggccgggctcaacccccaatcattggtcacgttgtggcagatcgaacagtatggttcgttctccgccacggccaaggccacgggttggtcgcagccggccatcagccagcagatcaaaaagctggaggcacagtgcggttcgactctggtgcaacgcacctcgcatggtgtggaactcaccgccaccggttcgatgctcgcccgccacggcgaggccatcgccgatcggctggagcgggcggcccgtgaggtcgaggattatcggcatcatcggtttgctcacctgcatttggtggccccaccgtcaatctgctctactatcgcggcccgtaccgtggtcaagctcagtatgttcacggacatcgagctgagcctgattcagatggagccgccggaggcgatcggtctgatttcccaaggcaaggccgatgccgccgccgtgttccggtacagcagcatcccgaacttcctgcacatcggcgacgatctgaccttccagtcgctgggttacgatccgatgcgattgttggtccgccgctccagcgacatcgccaaacgattcgaggagaccggcgaacccgtgccgctgtccgccgccaaagacgagcattggatcgccggctgccccacctgccgcgcaaatttggtgaaactggccacccgtgccggattcaagccggatatccgccactgcacggatgattactgggccacgcagaacctggtcgaggttggcatgggcgtctcgctggtgccggcgctcgatacacatatcaatctgcaaggcgatctggtggcctgtcccatcgccgacgattttgcggcgcgcgaggtcggcatcgtgactcgtgccggcgaccatcgtcccgcgctcggttcattgctcgaagagctcgagcgcacggcactcaaatatttgagtgccaagtagtcggacagcgataagcaagcttgcgaacgccatcacgatttcggggagccagaccgttgagcggcccttctgcaccgggaacaatggcatgttatgagcatgaacaacattccccagtcaacgactgtgagcaacgcaaccgccggcgcctcttgctttgatgccaatcacatcgacgtgacgaccatcgaagatctggagcaggtcggttcggataaatggacccgttaccccggctgcatcggcgcattcatcgccgagatggattacggtctggcgccgtgcgtggccgaagccatcgaagaggccaccgaacgtggcgcgctcggctacattcccgacccgtggaagaaggaggtcgcccgctcgtgcgccgcatggcagcgtcgatacggctgggatgtggatccgacgtgcatccgtccggtgccggacgtgctggaggcgttcgaagtgttcctgcgcgagatcgtgcgcgccggcaactccatcgtggtgccgactccggcctatatgccgttcctgagcgtgccgcgcctgtatggcgtggaggttcttgagattccgatgctgtgcgagggcgccggcgagagcagcgggcgcaatgatgaatggctgttcgatttcgacgccattgagcaggcgttcgcgaacggctgccatgccttcgtgctgtgcaacccgcacaacccgatcggcaaggtattgacgcgcgaagaaatgctgcgattgtccgacctggccgccaagtacgacgtgcgtatattctccgatgagattcacgcgccgttcgtctaccaaggccacacgcatgtgccattcgcctcaatcaaccggcagacggccatgcaggctttcacctccacttcagcctcgaagtcgttcaacattcccggcaccaagtgcgcgcaggtgattctcaccaatccggacgatctggaactatggatgaggaacgcggaatggtccgagcaccagacggccaccatcggtgccatagccaccactgcggcctatgacggcggcgcggcatggttcgagggcgtgatggcatatatcgagcgcaatatcgcgctggtcaacgagcagatgcgcacgagattcgccaaggtgcgctatgtggagccgcagggcacgtatatcgcgtggctggatttctcgtcactgggcattgacgacccggccgactatttcttcaagaaagccaatgtggcgttgacggacggccgcgaatgcggcgaggtcgggcatggatgcgtacgcatgaacttcgccatgccctacccgctactggaggaatgcttcgaccgcatggccgccgcacttgaggcggacgggctgttgtaaaaaattgtggctcccctcagagaggggagccgaggaccggccgaattaatcgaagtcggcacccaacgcttcgagtttgccgcggaagtcggcgtagcctcggtcgatcaggctgatgccgtgcacgtccgaggggcctgacgcggccaaggccgcgatcagatggctgaacccaccacgcaggtccggcacgtcgatgtcgcgtccggtcagcggggtcggtccgaagatcacggcggaatgcttgtagttgcgctgccggaaacggcacggcagcgagcccaggcactcgcggtacaactggatggtggcacccatctcgaccagcggcttggtgaagccgaaacggttctcgtacacggtctcgtgcactatcgacaggccgttggcctgggtcagggccaccacgagcggctgctgccagtcggtcatgaacccgggatgcacgtccgtctcgatcgccacgggcttcaagtccccgcccggatgccagaaacgaatgcccttgtccgtcacctcgaatttgccgcccaccttgcggaacacgttgaggaacgtgatcatctccggctgggtggcacccttgacgaaaatgtcaccgtgcgtggcgagcgcggcggacgcccaggacgccgcctcgatgcgatccgtcagcgacgtgtgcgtgtacccctgcagttccttgacaccctcgatgcggaaggtgcgatcaacgtccacagaaatgattgcgcccatcttctgcagcacgcacaccagatccatgatctccggctcagtggccgcgcccgacagttcggtcttgccctcggccagcacggccgccagtaaagtctgctcggtggcgcccaccgacgggtagggcaggtggatcttcgcgccgtgcaggccgttgggcgcggtgatgtggatgccgtccttgtgttccttgtccaccgtggcgcccagcttgcgcagcgtctccagatggaagtcaatcggacgtccgccaatcgcgcagccgcccaacgcgggaatgaacgcttcacccaaacggtgcacgagcgggccggagaacaggatcgggatgcgcgacgaaccggacagtgtatccacgtcggccacatcggccagctgcacacgcgaggcgtcgatggtcacaatgccgttcgcaccgtccacatccacgtccacgccgtgcagacgtagcaaatcggacaccacatgcacgtcacgaatctccggcacgttcttcagcaccgacttgcccggtgccagcaacgcggcgaccatcgccttgctcacgaagttcttcgcgccacgcaccttgatcgtgccattcaaaggcttgccgccctcgacatgcaacacgtcatccggattctcagccacgccactctcctcaatcaatcaagattcaaaaaatgctaccgtccagtttgccataagccatgtgccgactccgtgaaatgcaccccagccgaactttgatcaccgtgcacaacggatcccataccccccgtcgaatcaaaccgataacgtgatcttcctcacatttgccgccacggtgttctccatacttctacgctacgattcagggcaatggcatcagacgccatggccacaagcaaaggagcattcatgaccacagtcgccgtcatcggctgcacgcacgccggcacgttcgccaccacctcgattctcgccgagcaccccgattggaccgtccatgttttcgagcgcaacggtacgctgtccttcctctcctgcggcatcgccctgtgggtgggcgaccacgtatccgacccgaagaaaatgttctactcctcccctgccgctctggccgaagccggcgcgaccatgcatatgcgcaccgacgtgacgtccgtggacctcgacgccagaaccctcacctaccgcgcgctggacgaggccggagaccccgccgaacagaccctcgctttcgacaaactggtcgtgaccaccggctcgcgcccggtcatcccgccgatccccggcatcgacagcccgcatgtgctgctgtgcaagaactgggatcacgccatcgccatcaaggaaaaggcgaaaaccgccaagtcggcagtggtgatcgggtcgggctatatcggcgcggaaatcgccgagcagttcagcgtcaccggcgtcaagaccacgctggtcgacggccttgatcgcccgctggccaataatttcgataagaccatcaccgatcaggtggcggccgcgttcgaggagcacggcgtcacgctcgcgctcggccagaaggtggtcgagttccgcgacaatgacgacgacaccgtcactgtggtcaccgaaaagggcgagtacacggccgaaatggcgattctggccgtcggcttcctgccgaacaccgacctgctcaagggcaaggtggacatgctgccgaacggcgcgatcgtggtcgacgactacatgcaggcgtccgcgccgggcgtgtacgccgccggcgactccgccaccgtgttctacaaccccaccggccagcacgattacattccgctggccaccaacgcggtgcgccagggcctgctggtgggccgcaacatcgagacgccgaccgtgaagtacatgggcacgcaggccacgtccgccgtgcagctgtacgatctctcgctcgccgcctccggcctgacccgcgccggtgccgaacgccgcgggctcacggtccgcgagacctcgctcaccgaggattatcgcccggacttcatgctcaccaccaccccagtcacgtcgattctgacctgggacccggaaacccgcaaggtcaagggcggccagttctgttccaaggccgatatctccggcgcggcaaacgtgatttccatggcgattcaggccggcttcaccatcgaccagctcgccaacgtggacttcctgttccagccgaacttcgacaagccggtctactacgtcggagccgtggccatgaaggcggcggccgagtaagacggctgtacccaccgcaaaaaagaaaccccggcgtgatgggcgccggggagagaaaggagagaagaagaaagaggttaagttatgcagcttgttcggccgtgattacatataacagcaacagtttcaatgcaacatgggcactgtctgggaatcgtctgggaatcacggcccgtacaggctgttgcttgtttttggagccgatttaccggctggccttgatcttgtgggccagttcggcgtcccacatcgcgccggtggcggacatcaccgagtccgcgccggcgtcacggtacgcctggtagtcggcgggcgagaccacgccgccgacgccgttgatcgcgaaatcgagcccgagcttttcacgaatcgcggccagacgggcgaccatgtcgaggccggcgccacgaatcgcattgccgcacacgcctgagcgatcgcggcccgcgccgggcagggcctgattgccattggcatcgaccagtttggcggaaatcgtattgatggtgctgaagccctgcacggtgccgtggcccacggtggaacgcaccataagctccagagcgtcgtcgctggggatgtaggcgagcttgaccatcagcgggatgtcgccgatctcctgcttcacggcctcggtgatgcggcccacgagcagcggattgtggcatagcaggcggttgtggccctcgttggggcagctggtgttcatcaccatgagcttggcaccggtctccttgaccaggcgggcggtagtggcatggtcggcgatgtattcctcctcgctcatgccctccacacgcgagccttggaagctcgggaccagcacttgaccgggaccggcggcctcgatggcggcgcgcatgtccggctgccagacgtcagggctctgcgagggcacaccgaagctgttggagatggaaatcggctgttcatagttggtgtcggccagcacgccttcgtccagttcggcgctgcccggcgtcagtgaaccgtccgccgacttggggtgtacggcgagcacgttcgggaacgggttgcagccccaggcgcgcgaacgcacggttttgtaggtcgccagatcgaaacccatgtggaaagcggccgtggtgaaacggctgttgagcagcgggcctgcgggaatgccgaaaggcaggttgaccggctggcccaaaaaggtggccaaggcaccctcgctggtggttccggcggcatcggcaccgttgccatccttcagcgcctcggcgaacgcgccgaacggcccttgctcatagttgtcttcgtaactgcggctgacatcgtaaaacggctcaaaatcactcatgcttcaacgataagccaacctgcatgcgcacacgcacactcaacccatcatcgcgccgacaaacgaaataatggcgaaagcggcattggctaccacaaagatgatgaacgtcggagctgcccagccaaagtacgtgtctggaatactacgattcgtacggtgatattggcgcatctctttgccgtatatcacgaatatgatagtcgatccgatcacgccgatcacagatagcgacaatgagaatatcaaatatgcgttgtcatcaagatagttgccggcaagggtatcgatggcgccggaaagaatcgcattgttgaagatgtgcagtgcaatcgaccaaaccaacgagtattccatggccacgaatcccagaatcaggccaaagaggaacgcgaatgtgccttgcactacgtcgtcatggaacaggccgaacaccattgccgaggtgacgatggcgaagttcttgcccaacggcttgagctccttcatcagtacgccgcggaacagtacttcctcgcaaatcggagcgaccagcccaacgtacagccacatgcttacggtgacgctggattcggcgatgctgtctgacgtgggagaggcaagatcggtgcccagcctggaaaaagcgacctgcaccaacataacgatgccttgcacgcccatgcccagcacgatgaacatcaacgcccagagaggctgcatgcgcccgccgccatattggctgatgtggccaagctgattgggctccccgtacgagtcgcgatgctggccaccaagccagaattcgcaggtgaagatgtcacggtggcgcatgagcagcagaaatccgaacgcgacgaacaccgatatcaggctgatgatgccatcccactgcacgccggacaaatcgctcgcggttattacgccgacgataatggtggcgaccattgcgcccaagagcatcatgccttcataggcgagagtcagtcccattacacgattgaccaccttgcgacgccacgtgcgccatacacggcgaggatcgatcggcatgaccacgggcattgctgcgggcatcgtggcaggcattgcgttgggcattgctgcgggcatcgtggcaggcattgcgttgggcattgccggagccgtttgcacgaatggttgcggcgcagcggaatagggttgtggcgcgtagcccactggttgagcgtagtacggatgagcgaggggctgtggagccgactgttgcgccgggtatggggaataggcggattgcgccggatacgtcggctgcgtgggatacatcggctgggcaggatacgtaggttggacgggatatgtcgggtatacgagctgcgcggcgtattgtgcaggctgcacagcaggtattgcggcttgcggcacaggttgtgaaacaccttgtgaaacaatccgtggaacaccccgtgaaacatcttgtggaggtagcggttgtgcccatgcctccggctgacccgcatattgcggctgcatgctcggcccaggctgaacatactgtggcgtctgtggcatcggcgtctgtgactgtgccgcagactgcggtgccggtcgaggtggcaacggttgcgctgacagcgattgcgccggagccgtatcggaatcgttcgacggattcatgtcattcatggtcatgatgctcaacctaaccgtcattactggatgaatcgtgattatgtccacaaatgtgtacgaattcaggcacagtatttcgaacgctaggacggagttcatgagtgttgaggaaagcgccgccacgccggtgttggtggctgcggtggataacgaccgtatggcgttgttggcactgaagggaatattgccgcaactcctgcccgccgcgcaatggatgtggggcgcgggcaccagtgagacctttgtttgatgcgatgcgagcgacccaataatctcaatcagacacagagccaacggccctgggcctgcaattatggactcgcctttcggcgaggctcaatgctggcctcgctgctgtcgcggctcggcacagggcctgctgaaagcccaccgggctttcagcaggccgatcgcggctaaataatgccgcgatcggccaacggccctgtccagtctgcgtcctcaggctcgcgggcggactcgattctttcttcggcccagtgtttggcggggatggtcttgggcttgaaggggaacttttcggcgcgcatcttttcgtaggcggcgatgtcgtcctcgtgctgcagcgtcagatcgatatcgtcgtagccgttcatcagacgccaacgcacgtaatcgttgacctcgaacggcagggtcacgtcgccgcaagtgacagtgcgggtctccagcgagacagtcatctcacgaccaggctcttcctccagtagcttccacagaagttcgacggactcctgcggcataatcgcggccagcacgccgttcttggcggtgttgccgtagaagatgtcggcgaagctcggcgcgatgaccacgcggaaaccgtaatcgtgcagcgcccacacggcgtgctcgcgggaggagccgatgccgaattcggggccggcgaccagaatctggcccttaccggcgtattccggcttgttgagcacgaagttcgggtctcggcgccatgcgtagaacagggcgtcatcgaagccggacttggtcacgcgcttcaagaacacagcgggaatgatctggtcggtatcgacgttggagcggcgcagcggcacgcccacgccggtcagtgtggtgagtttttccataacaattttcctttcggggatctctcccccagtcagtcttcgactgacagcccctcgtcagagggggctcacgtgtattgactcagagatcggcgggagacgagattgtgccgcggatggcggtggcggcggctacggccggcgacgccagatgcgtgcgcgagcccttgccttggcggccctcgaagttacggttcgaagtggaaatcgagcgctcgttcggcaccagcttgtccgggttcatgcccaggcacatcgagcagccggcgttacgccattcggcgccaaagtccttgaacaccttatcgaggccttccttctccgcctgcaaacgcacgcgggaggaggccggcaccaccagcacgcggtggatgttctcggccttgcggtggcccttcataatcgcggcggcctggcgcaaatcgtcgatacgaccgttggtgcacgaaccaatgaacacggtgtccacggcgatgtccttgatcggcatgcctggcttcaaacccatgtatgcaatcgcacgttcggcggcggcgcgcttggtggcgtcggcgatcttgcccggctccggcacggaggcggtgatcggcagaccttggccggggttggtgccccacgtcacatatggaccgagctcggtggcgtcaatatccaccaccttgtcgaatacggcatcgtcatcggtcttcagcgtcttccagtacgccacggcctgatcccacagctcgccttccggcgcgtgcggacggcccttcaggtactcgaacgtggtctcgtccggcgcgatcatgccggcacgcgcaccggcctcgatggacatgttgcacacggtcatacgttcgtccatggtgaggttgcgaatcgcctcgccacggtattcgatcacgtaaccctggccgccgccggtgccgatcttggcgatgatcgccagaatgatgtccttggccgtcgcgtccgcgggcagcttgccgttgacgttgacggccatggtcttgaacggcttgagggacagcgtctgtgtggccatcacgtgttcgacttcggaagtgccgatgccgaacgccagcgcgccgaacgcgccgtgcgtcgacgtatgcgaatcaccgcacacgatggtcatgcccggctgggtcaggcccagaatcggggcgaacgcgtggacgatgccctgatcggcgtcgcccagcgggtgcaggcgcacgccgaactccttgcagttcttctccaaagtcgtcaactgcaacgcgctcgtctcatccgggttcgggcgatcgatatcaacggtcggcgtgttgtgatcctcggtggcaatgagctgatccacgtgacgcggcttgcggccggccaagcgcaggccctcaaacgcctgcgggctggtgacctcatgcatgagcatcagatcgatgtacagcaaatcaggagctccgtcgctgcccttgcgcaccagatgatcggcccagaccttctcggccagtgtcgttcccatagtgattcctccaaaaaattccgcgcgaggtattgtgttcgcgccttgttcgtggtattagcctatgtgcttgcgatgggcccggccatgagcatgccggatattgagatacggtcaaatgatggcctcaatatgactcggacccgactcgaacatgacctagtcatgactcggttccgctccagacatgtctcttcggcatccacgaacgccctttcaacttcatggccaccctgtgagacacttccccaatttgccatttcactatgtgagatggcataatcgcccttattatgactgattcccgggaagaaccattgaacaacagcttgaccgagtccgagccggttgaagacaccaccgccaaggacgatggggaaatccattccggcgttggcgtccttgataaaaccgtaaagattcttgacgcactggaatccggcccgtctacgctgggccagcttgtggccgccaccggtctcgctcgaccgaccgcacatcgtttggctattgcactggaacgccaccgtttcgtactgcgcgaccagcatggccgattcgtactcggctcccgtttcgccgaacttgccgccgcagcaggcgaggatcgtctgctgaccgccgccggcccgatcctgcagaccctgctcgatcgcactggcgagtctgcgcagatttaccgccgccaaggcgatcagcgcgtgtgcatcgccgctgtggaacgcacctccggcctacgtgattccattccggtgggtgccatgctgtcgatggaagccggttccgccgcccagattcttctggcttgggaggattccgaccgtctgcaccagggattgcgccacgccaagttcaccgccaccaagctggccgccgtacgcaagcgcggctggtccgagtccgtgaacgaacgcgaagagggcgtgtgctcgatttccgccccgatccgcaacgcctccggccaggtcatcgccgccatctcgatttccggcccgaccggccgcatgggcgccgcccccggacgccgctatgcgccgctggtgatggccgccggcaagtacctcaccgaggcactggtcaaagccgttcgctgaaacataccagtcaatccaaccgatagcccaaccggcagaaatcccgcgtcacaacgaaagagacgcgggatttctgggctataggaacaagagtgtggtgttcgcgcaggatgggcaagatcgggtagccggcggtggcgatggtgacggacggtccgaacatcgtgtagtcgccgattcatatctccgcgtcgtcgaccatgctcatgaacgcgttgatgtagatgactttgccgaggtgtacgcgacggcatccgttgctcgcatgcaatggcgtttcgatgtgcacgccgtcgccgacttcggcgcacatgtctttgagcagttcggcgcgccgctcccgttcggtgggtttggtctggttgtattcccatagtttgttctgccatgcgagctgtccgtccatgatggccgggtcgtcgtagtggtatggcaatcccgcatccctgcgcgccgtattgtccatgtcgtagtcccttccgtatcggttcatcggtctcggcccatcccatcgtcctttgttcgggccggaacgcacacggcctttctcaccagcatgaggccgcccgcgctgaccgattcccatcgcaacgtcgccgcacgcccccacggttccgtttcatcgaggtcaaggccgaagacgggttggacatgcttgaagaacttggaggcttgtcggaggaagccgagagccgcttgacgaagctgaatgagaccatatcctcccccgatatcggtttgggttcggattaccatgtcggccctgcgtatttcctgaatctttccaaatccgaatccacggcgaaagcgttcgatgacttttggcgtgatttcctgcaaccgctattgcacgattacgtgcgcggcatgtataacgaaacagaaatcatggagaagctgaaagcggcatatgaagatgcttcggattcgccgccgcgagtgctcgcgcatgggcgacgccgtcgtctccctgctcgactcccccatgttcgcaggccgccgcaagatcctcgtcgggttctcccagggcggctatatgtcgtatcgcatggtgctcgagcatccgcacgtgttcgacgcggcgatcctgatgagcccgtcgttcaagggcgaggagtcgacggacctcaccggtttcgactcccccacccgtttcctgctcttgtacggctcgcgggaccgcacgattccacctgcggaccagcagaccgcgcgtcgcgtgctcgaggccaccggccggctcgaataccgcgagtatcctggcatgggtcagccatcgtcgacgaggagatcggcgacatccgcgccttcctcggtctctagccggttccggacggaccgcccggttccgctcggtccgtccaccccgccatccgaccatccgtcacacacgtcacgcacccgtcaccgcccgcaatcggtgtcggcggcacgcgtcgccgccgtcacacgccgaggctgcgtccgatgacgccgaggaacgtttcggcaccggcacgcacgttctacggttgcacaggtttcccgaattgcgggtactccaggccgtgcaggtgatttcgacgtgaacggttcccgccgcgtagactgttttctccggaccaggcgaacctcctgcgtcgcaccccgaatccgtccgcaacggctggcatcgccatgccggaccttgatccaa

SEQ ID NO: 3387 - DNA, 4003 bp, Unknown
  R151_18m  MAG No. k141_28465
caagggtcttggttccgtctcctggcttccaatcgcggttttttgttttggcgaatgaaaatcgtacacaggacgcgggccatgccctcttacgtcagacccggaatccgaaagtgcgcaaaaaatcgggcgttatccacgctcattcgattgtgtccaatactgctttctttctgcatgaacaacggtactcggcaaggcggtaacgatagtcgcaaaggctaagaagcccgtacataatcgtttttttgtagtgtttcagattttcagtagaatggcgacagccaaatcccgctggcttgctagtaaagcgttgtcctcggggggagttttgtttgttgttgaaagataacgcggcatcgaatagataggggaggcccggcatgggacgtcatcagcgtgcagaaacctccggactcatctccttcttgatttgcgccgtcgttggcgcggtatcgatgaacctgtacatggaatacgcgccggccatctggcagctgacgcaacgccgattcatggtatgttcgggcatcgtggcggcatgcggcgtcatttccttcattattggctatgcgcgcaaatcacgttcattgaacctcaaacatggtttgtttgcaccgattcgtcgcattttcgaaatcgtcgccctttcggtggtgtatgcctcgaccattttcctgtcgtcttttgcactcatcggtgcggccaacgacatgatgggcaatgccatcttctccggctatatctccagcgtctgcgccgccttcgccggcgtggtggggtacatgacctttgtacaggcggagatgatgaacgccaaaactattgccagtctgttgccgttcttcgtcatctccggcgtggtcaccgccggcatgaccaccgacgacccatactggtatcacaacaacttttcgcagctcggcgacagaaccacgtttgcggcccgtatgttcaactccacgctgattcttgccggcacatgcatcatcatcgtcagctacttcgccatctccgaactggtgaccaccgaacggctacagcgcctctggcacgaccgcaccaacagagatccgaatcgcggctacgaaatcccacatttcatgctgcgcatctccattctgtccttcctgctgatggtggccggcctggcattcatcggcatcggcgtgtttcggtacacgccacacaatctcttgcacaatatatgcgccaaaggcctgccgttcgtcatgctgctgctgttcgtgctcctgccgtggcttgcgccacgcctgtccaaagcagtgatggtggcctccgacctgaccgcgctcgtatgcgctgcattctgggtcaatatgatgatgggtcacaacaccctcaccaatgtggaggcgttggctggtctggcgttcctcggctggttcatcgtgttctcgcgccagatcgccgccatcgaggccgatcgcgcggccgctcagttgttgcacgcgcaggccatcgaaggcggttttgagcagccgtcttccgcacctgatcagcagatcgaatcccgcatcgctgccgaccggtgaataatttgtttgatagatttggccttatgactgaacgactcacgaatctctggcctgccccgctcgccgcacagccgttgaacgctacggtaacggtgccgggcagcaagtccctatccaaccgctacctgattctcgccgccctcggcagcaagcccgttactctgattggcctgctgcgttcgcgcgacacggaccttatgatgggcgcactcgaagccctcggtgtccgctgcgacgtggattccgcaaccgacaccaccgtaacggttactcctcctgtatccggccgattccatggcaacgtcaatgtgttctgcggactggccggcacggtgatgcgtttcgtgcccggccttgccctgtttgcagatggcccagtgaattttgatggcgacgaacaggcttatgcacgtccgatgaagccggtgcttgacggtttggaacagctgggtgcaacggttgattaccacggcgaggttggccgtctgccgttcactattacgccgcctgcaaccttgccggctgcccaggcgcaggtcagcatcgattcgtccggttcttcccagttcatctccggcctgttgctgattagttccaaactgcctgacggtctgcacctcgcgcacacgggggagaagaccccgagcctgccgcacattcgcatgaccgtggccgatgtgaccggtgccggcggtgcggttgaggccgacgaatccgcccgcacatggacggttgaaccgcgcgcaatgcaactgccgagcaaggtgaccgttgagcccgatctgtcgaacgcggcgccattcctcggcgcggcattgattgccggcggcacggtccgggtgcctcattggcctgaaaccaccacccagccgggcggcctgttgcccggatatctggagcagatgggtgccgaagtatcgttcccgaccatcggcggcgtgcgctattgcgaggtgaccggtgacggcaccgtgcgtgggctgggtacgttcgatttgacggcggccggggagattgcgccctcgttggcggcgattctggtgtttgctgataagtcgacagacatggttggtattggtcacttgcgcggccacgaaacgaatcgtctggaggcattggtcaacgagattcgtcgtgttgggggagcggctgaggaattgcctgatggattgcgtatcgaaccggtgccggcggagacgttgcacggtgccgtgatggaaacctatgctgatcaccgtatggccacgttcgccgcgatgctggggctgcgtattcccgatatcgaggtcatcaacgtggccaccacgcgcaagaccttgcctgatttcgtcggtatgtggagtggcatgctgaggcagtaaggggtcctgtgttctggtggaactcccctcagtccgctacgcggacagctcccctcagagaagggagccaagttatagggcctggatcccctctctgagtggatctgtccgccggaggcgactgaggggagtatgacgcaggggtagtggtctcatgaccatatacgaatgggggctgattccaatcggaatcagcccccatagtgttgcaactagagattagtgagatgcctaacggcggttacttacttggcgaaggtgttgccgtaggtatcggtgccagcctcggcgattgcggcggacttgcgggcgatggccagttcttcgttcgtcgggatcacggcgatgatcacggaggagtccggagtggagatgatgcgcggttccttggagcgggtggcgttcttctcctcgtccagcttgacaccgaacggagcgagcttgtcgcacaccatcttgcggaccacgtcgtcgttctcgcccacaccagcggtgaaggtgatcacgtcgcagccacccatctggtaggtgtagttgccgatgtagctgacgatgcggtgcacgtagacatccagagccagcttggcgtcctcgttgccttcggacaccagacggtgaacctcacgcagatcgccgtagccggtcatgcccatcatgccggaacgcttgttgaacagggcatcgagctcgtccacgttcatgtgggcgttgcggatcaggtggaagaccacagccgggtcgatgtcaccggtacggccacccatcatcaggccctcaagcggggtcagacccatggaggtctcaaccggcttgccggagacctcagcggaagcggaagcgccgttgccgatgtgcagaacgatctgcttcaggccttcagccggcttgccgatgacgtccggcaccacggaggagttgtactcgtgggaggtgccgtgggcgccgtagcggcggatgtggtactgatcggcgatttccttgttcagcgcgtaggtgctggcggccttcggcagctggaagaagaaggaggaatcgaagacgaagatctgcggaacgtccggcagcagggagcgcatgacttcg

SEQ ID NO: 3388 - DNA, 3313 bp, Unknown
  R151_18m  MAG No. k141_28639
atcaggcggcgaagtattccacgccggcctcgaagatcggctggtacttgttgccgggcacgttgacgtacaggccgttgccggaacgctccgagtgacccatcttgccaaacacgcggccgtccgggctggtgatgccctcgatggcgagcagcgagccgttcgggttcacatccagatccatgccgggggtgccggtctcgtccacgtactgcgtggcgatctggccgttggccctgagctgggcgagtacctcgtcggaggccacgaagcggccctcgccgtgggagatggccacggtgtggatgtcgccgaccgaagtcttggacagccacggggagaggtcggaggccacgcgcgtgcggaccagtcggctctggtggcggccgatggtgttgaaggtcagcgtcgggcaggcgtcggtcatcggcacgatgtcgccgtacggcaccagacccagcttgacgagcgcctggaagccgttgcagatgccgagcatcaggccgtcgcggttcttcaacaggtcacgcacggcctcggtgacggccggcgcgcggaagaacgcggtgatgaacttggcggaaccgtccggctcgtcgccgccggagaagccgcccgggatcatcacgatctggctcttgttgatctcatcgaccaacgcctgcgtggattcggcgacggcggccggtgtcaggttgttgatgatcagcgtggtcacgtcggcgccggcgcgctcgaaggcggcggcggaatcatactcgcagttgttgcccgggaacaccgggatcaccacatgcggcttggccacggaagagccgacgtacacggtcttcttcggcgcgtggaagtcgatggtctcgacggtcgcgcccttgtcctcgcccttggaacggtacgggaacacggattcgatgccggactcccaagcttcctgcacagcgtccaggtccagcgtctcgccggcggccttgaacacgtactcggaggtggtggtgccgatttcgccgatctcgaccaaattggagacggccggaagcttggcatcgtctgccagctcgacgatgaacgaaccatatgccggggtgaacaggtcgtccacggcgatgctgtcgttcagagtcacgccgatgcggttgccgagcgtcatcttgaacagggcttcggcggtggcgccatagcccggcgtggagacggccagggcatcgtggaagtcggtgagctcctcgatcacggagaacacctcaagcagcgcatccttgtccggggtcagaccgtcggccaggtagcgcggcgcgatgcgcacgatacggtgatcggcgtccttgaattcaggggaggtggcgcgcttcatgttgcccacggccacggcgaaggagatcagcgtcggcggcacgtcgagatcctcgaacgaaccggacatggagtccttgccgccgatggcgccggcgcccaggtccacttgggccatcagtgcgccgagcacggcggccgccggcttgccccagcgttccggctcgtcgcgcagcttctcgaagtactcctggaagctcaggtaggccttctcatgctcgaagccggccgcgaccagcttggccagcgactcgaccacggacaggtaggcgccggtgaactggttcttggacatgatgtacgggttgaagccccacgccatcgccgaagcggtggtggtctcgccgaacaccggcagcttggcgaccatggccatgttcggggtgagctgacgcttgccgccgaacggcatgagcacggtgcccgcgccgatggtggagtcgaagcgctccgaaaggcccttgttggaggccacgttgatgtcggtgaccagcttgttcatacgctcggccagcgtgccctcgccccacggggtctcgtaggactgctgtgcctcgacatgcacggtctggtgcttggaagcgccgttggaggccaggaactcacgggacagattcacgatcttgtcgccgttccaggtcatcaccatgcgcgggtcctcggtcacggtggcgatcaccgtggcttcgaggttctcttcgcgggcgtagatcaggaactcgtccacgtcctcggcggccacgtccacggccatgcgctcctgggattcggagatggccagctcggtgccgtccaggccctcgtatttcttgggcacggtgttgaggtccacgaacaggccgtcggccaactcgccgaccgccacggacacgccacccgcgccgaagtcgttgcagcgcttgatcagacggcaggcatcgccgcggcggaacagacgctgcagcttgcgctccaccggagcgttgcccttctgcacttcggcgccgtcgagttcgagcgattccacgttatgcgccttggacgaaccggtggcgccaccgatgccgtcacggccggtgcggccgcccagcaggatgatcttgtcgccgggggccggggtttcgcggcgcacatggtcggccggggtggcggccacgaccgcacccacctccatgcgcttggccacgtagccggggtggtagatctcgtcgacctgaccggtggccagaccgatctggttgccgtaggagctgtagccggctgcggcggtggtcacgagcttgcgctgggggagcttgccttccagcgtctcggagaccggcacggtcgggtccgcggcgccagtgacgcgcatcgcctgatacacgtaggaacggccggacagaggatcgcggatgcagccgccgatgcaggtggccgcgccaccaaacggttcgatttcggtggggtggttgtgggtctcgttcttgaacaggaacagccagtcctcgtcgtggccgttcacgtcaaccttgaccttgacggtgcaggcgttgatttcctcggactcgtcaaggccggtcaggacaccgttcttcttgagccacttggcgccgatagtgcccatgtccataaggcagacgggcttggcgtcgcggccgagctcgtggcgcatcgccaggtaacgctcgaaggcggccttgacggtggcgtcatcgatggttacttcgtccagctcggtgccgaacgtggtgtgacggcagtggtcggaccagtaggtgtcgatcaccttgatctcggtgatggtgggttcgcggccctcctcgctgaagtacttctggcagaattcgaggtcggccaggtccatggccagaccgcgctcgtcgatgaacttctggccggcttcggcgtccatctcgttgaaaccggcgatggtctcgaccttgccgggcaccggcacctgggtcttcagggtttccttggtctccaggctggcctcgcgggc

SEQ ID NO: 3389 - DNA, 5431 bp, Unknown
  R151_18m  MAG No. k141_28906
cttggcgtccttgagcatcgggtggtgcagatcggcctcggagcgctcggactcctccagcggaatcggccactggatgttcagttccggatccgcaaggttcacgaacgtgtaggtcttcttctgttcgagcgaccagtgcgcgttcaccagatacgtgtacaccgtgccgtcctgcagtgcctggaagctgttgcccacgccgcgaggcacgtagattgccttggacggatccaaacgggtcgtgtacacctggccgaagctctcgcccgggcgcaggtcaacccatgcgccgaagatctcgccggcagcgatgctgatgtacttgtcccacggctccgcgtgaatgccacgggtgacacccttggtggcgttgtagctgatgttgttctgcaccgggccgaagtccggcagtcccagacccatcatcttggcgcgctgccagttttccttgaaccagccacggttgtcgccatgcaccggcaggtcgaacaccagaaggcccgggatgttcgtcttctcgaccttcagttccttctcgaattcaaatgccatgatcggatcactgtccctgttgcttgtacttggcttcggtggcggccttggccggctcccaccaggcgcggttgtccgtgtaccacttgatggtctgctccaggcccttctggaagtccgtgtgcgtcggcttccagccgagctcggtccgcagcttggtggagtcgatcgcgtagcggcggtcgtggccgggacggtccttcacccagtcgaacgcgtccgggtcctggcccatcacggtcaggatgtcgcgcagcacggtgatgttgttgcgttccccgttcgcgccgatcaggtaggtctcgcccagacggcccttggtcaggatggtccacacgccggtggagtggtcgtccgtatggatccagtcgcgcacgttctcgccgttgccgtacagcttcgggcgaagaccctcgaggacgttcgtgatctggcgcgggatgaacttctccacatgctggaaggggccgtagttgttcgagcagttgctgatcgtggcgcggatgccgaacgtgcggtgccatgcgcgcaccagcaggtcggagctcgccttcgtcgagctgtacgggctggacggatggtacggggtccgctccgtgaacttggccggatcttccaaagccaggtcgccgtacacctcgtcggtgctcacgtggtggtagcgcacgtcgtacttgcgggccgcttccaagaggcggaacgtgccctccacgttggtcttcaggaacggctccgggttcgcgatcgagttgtcgttgtgggattccgcggcgtagtgcacgatggcgtcatggcccggaacgatcttgtcgagcagctcggcgtcgcagatgttgccgtgcacaaactccacacggtcgcccaggatgcccctgatgttctccaggttgcccgcgtacgtcagcgcgtccagcaccgtgacatgcacgtccggatggttgttgtacacgtaatgaacgaaattcgaaccgatgaaaccacagccgccggtcacaatgatgttatggggagtaaacagttcttcagccatatgggctatgttaccgaagcgtgtcgatacgatgactgaacgactcatgttttcacagtacatgcaatgtcatgcacaaatagcaaattcatgagagacgtccgaatatcagctaaacagaaacatctccagcacaatgcgatacttacaaccaatcaccaagtatagctcagcaatatcgctcatgagatagtattacaaattatgaatcagatacttggcacttccactaagagcggctcgcagcagggactagaagagcccagaaaaatcatgcagagtacatacatgcaactcgttctgcgattcttactgttaaccatacccaacttgatggtcttggctcttgtctaccccggtttccttcaggccgatcatcaaaataccatcgcgtttatggcaacaggcaaatttgatgaatggcattcgctgttatggggattttttgcatatccatttttatatttatccggatcaattgccgtatatggaatagtacaaatcgcaatattctctttatcgatattgtattcagtacatgcgcttcaaagcatgaacatagtttccaaccgttttgcctggggactcatattcttctttgccatatctcccacttttcttatgtacaacgagttgtatagttctgatgtgatttttagcgctttactcgcaccactcaccgttgcacttataaaagtgttggtctcaaacggaaaagcgttgtccaaaatcagcttttctatacctcttacgatactgttttacattattttcgaattacgcaagaatgccgtattaattattatagccggctttatttttatgttcttccttttcaaggaatatcgtaaacaatcgttcttaatgttcgttggatgtattgcactcattctttgcacaagtctatttaattccgttattctacattcagaaaaatcgccatcacaagaaatgctggctgtgcccgttcaacagatagggcgggctgtcgcagatggtggcgaaattccagaagatgctgtaaaaactttggagaagatacgtccactgcgggaatggggcgaggattatcactttgataattcagattatctcaaatttaacaacaaatacccggataaagaaaaagtaacactatcttccgaatttattagcgcttggataaaaattggaatcaaaaatcccacttcatatataagagcctacattgatttcatgcacccttattggcaacttggcgcggatcgctcaaccacatatatttccactgacttcctcaaccatgacaactacactatagacagctgccatggctcttgccgcgcacagtatattgagcaatttgatcgcaagaacacaagatggcagaatcgattaagccgggcagatcaaactatcgataatttacatatcccattattgactgatgcagttgacttcatattttttaatcgcgctcttcccctgtggatctttatatttggacttattgttgctattcgaaagaagactttaaaatattacttcttagtttcttctccgttatggtgcattttactgtccttgttcttcttttcgcctgtagcctgctttcgctacgcattgcaaatgtactacctgcttccgctcctggttgcatggctggtttcgatttccgttgcctcgaatccaaaaacttgcagcattcctccaagaatcagttgccggacaccaactgaccccgggttcaatttgtaagtgcaacgtttgtctgtgggtggcttgtcttcgagagtaccttgccgagttcgcggtaccaaacctcattgggtgtttccccagtccaggaccttcaacggggtggataaggggctgcggatgttttcttggagactgagcgaaaggtttttcgtatgtccggtcccgaggaacgggagcgcgcggtggagctgtatttcaccatgctgatgaccacggcccaggtggtgaggcgcctgggctatccggccaggcagtgtctggaacgccggttggcgaaggatccccggtatgccggtcgtatggcggaacccatcatcccgctggagacgagggccaaggcgatcggaaccggtgccgggcggcggaagcgggccgccgaacggctcggcgcgggcgtcggagcggtccacgaccgggccggggcgtacggggtggaatggccgcgttgcgggccgggaacgggaacgccggccaggccgacaagccggcgccgcggcgaagccggaacgccggagccgtctgcgatgacgcggaggcgttgcgtcgcggagtcgaggagtcggggctggaggacgcgttgatgcgggaggtggcggaggtcgcgggaaaagacccgggcgccgatccgcggcgcctgtcgaacagggggaagacgctgccggtcgaccgttcgaggctggcgtgttcgcccggctcgatggcatgcctgcccggcatcgcgccgggcggccaccactgccgccacgccgggctgagcgttgacgaatacgccgggctcgggacggaggcggagggcgatctgacggcgcacgttccgagacgtcggcgctacggctcccacgagggcgagaccacacccgcgcccggcaacctcgccgaccgcgacttcaccgccaagcccccgaacgagaagcggcccgcggacatcacccgggatcaaggccggggacgggaagggcgtgcctctcgccgccggtcgactgccatgacggcgggatcgtcgcgtacaccgccggttccggtcccgacgcggggttcgccgacaggatgctcgtcaaggccgcggcttgccactgccggtggcccggatggccggacctcatggaacggtacggcccggcgcggtcgacgggcgcgaagggccgttcgccggacaacgccgccgcggaggggttcttcggcaggatgaagaccgaggcggtctaccccgggcattgggaggaacgaccccgcggcgaggtgctcgtcccggtcggcgattgcatccactggcacgaccacaagcgcatcaaacgatcgctcggttggatgagtccggtacaataccgtcaaagccaaggaacggctgcgtgatcatctccaagaaaacgtccgcagcccctagtgcccgaattcttgcgcactttcggattcccgccatgacataagaggacatggcccggtcttggtacgattttcagccgccaaacaataaaaaccgcgattggaaacgaaggcacgaagccatgccgcagcagattctacaggtcgaccaggccatgttggagaccacgttggaccggatgggatagtgcccgtaaagttgcgcattttggtcggtggccagtcgttggcgtaacttcatgccgctgactgcaggttgtcatcgagccgggacatatccatgtagcgccggtcggaccagctgttggcggtgacgtacctgatgcgggcgcacacgagcatgagcgcgctgtcgccgtccgggaagccgcctacgacgcgcgtgcgccggcggatctcacggtccggccgttcgatcatgttgctcgtgcgcggcttggtcctgtggttcgagggggaactcgcccagcagataggtcgtcgtctcgccgatcccctcgcgcaggcagtcggcggcggccttcagcctcctggtctccatcttcgcggcgacggtctcggccttggccagtccgtcttcgctgtttttagtcaagtcggtgtttcgtgtttcgtcactaatttttttcggttttcggcatgaggagtgccggccggtggtttgttttactggttgtccgtcttgccgaacatgagggcttggctgacgcgtcggctggggcc

SEQ ID NO: 3390 - DNA, 8131 bp, Unknown
  R151_18m  MAG No. k141_29100
aaggaagaatcggccgacgttgccgaaggtgcggcttccgcgcagcatggcgtgactggcattctcgcggtgcaaggcgcgttcgctgagcatgccgcgatgctggatcgtctgggcgcgccgtggaaactgctgcgtgccgccgaggatttcgatgattcgatcgatcgcgtgattctgcctggcggcgaaagcaccacgcagggcaagctgctgcgctccaccggcctgttcgagccgattgcagagcatatcgccgccggcaaaccggtgttcggtacctgcgccggcatgattctgctggcccgcaagctcgataacgacgacaacgtctacttcggcgcgcttgacgccgtcgtgcggcgcaacgcatacggccgccagcttggctcgttcgccgccaccgccgatttcggctcctcttccggtgattccgccgtcgtggtcgcaccgggcgagcatgttccgcaggacgccccggccgacatcgtgctcaaagatttcccgctggtgttcatccgcgggccgttcgtggccgaagtcggaccggccgccaccgtcgaaacgtcggtggacggcaatgtggtcggcttgcgccaaggcaagatcctcgccacggcgttccatcccgagctcaccgacgacacccgcatccacgagctgttcctgagtttgtagcttgcgattctgtgtagcgcgcggtctgtgttgctcacggtctgcgtagcacgctgtgtactcgcttgagcccgtagcgcgacgcacgcaagcatatcggcggcttccaaggatatttccttggggccgccgattttttatctgtggactttcagcatcttttcaatcccaactaatactggggaattcatcggaaaaataatcccccgtaatacaccgacttgtccacatgcgtcctgcccacccgcaatacgctttcgggctgcgcgtctccggatggtgcgggcgggtcgtcgtccgctgtcgacggtgctgccggtatacgacacgccgatgttttgtaggggtagcggtcgatgggatgcaaatttccttgtttgaattgacatggtacaccggaaaacctatactgtttcaacaggtacacagttataccaaaaagggaaggaaatatcccgaatcaactgaatggtcagttgaagacatattgacgtgtatctaccgcagctggagtgggttcgacgaatgaacgcacgtaaagcggttgccaacgatggaacacaaggaggagtacatcatggagaagaaatccatcaggatgattgcggcggtggccgctgcggcgatgcttgttccgctggccgcgtgcggtggaggaaacgccgccgacggcaagaccacgctgtcgttcttctcgaacaattcgcaggacaagtaccagccgatcatcgacgcgttcgaaaaggccaatccggacatcaagatcgactacagcaccaccaccggttcccagagtggctaccagcagacgctgcagactcgaatctccggcggaaacctggccgacgtctacatcgttcctccggaggcgttgagcgatctggtcaaaggcaactacgccaaggacctgagcaatgaaagcttcatggataaaatcggcgatgccgcaaaaaaggcctatagcgtggatggcaaagtatacgccatgggcgtgagcacctggaccaatgcctgggtgtacaacaaggatctgctgaagaaggtcggttacgactccatcccggcgacgtgggatgaattcctgaccatgtgcggcaaactcaaagccgcgggaatcaccccataccttgagccgaaggatggactgggcaacgccgtcgagggctggatcggcgctgaatccgccaagcagggcgaggcgctcgacgccaagatcgacgccggtaaggacacgttcaagaacgtgtatggcaagtactacggcgaatgggacaagctgatcaagcagaacctgatgagctccgacgtgtccggcctgagcggcgaccaggtcaagtcggaattcaccgccggacgtcttgcggtctatccttccggctcgtgggacatcgacagcttcaatgagaccggcctcaactacggtttcggccagatccctatgctgaagaagggtgacaccccgtacgcgccgggctccatcgatccggccttcggcatcaacaacaagatctccggagacaagctcaaggccgcggagaagttcttcaccttcctgacctccgacgagggcctcaagctgtaccagaagcagctgggcctgatcccgtccgtcaagggcttcaacgccacggtggacgaccacttcaaggacgcctacgacctgtacatcaagaccggcaacgtgtacctgaattccgcccactggagcaagggcaccaccgcgctgcgcgccgagaccttcacccagctgcagcaggtagccctcggctccatcagccctacgcaggccgcggagaacctcgattccaagctcaagaccctctcctgatccatcgcgaacagacatccatcgcggcaggctggcgcggacccttccgtccgcgccacgcctggacctgccaatctcacgttttgtagaaagcaaccaacatgtcagtatcaacagcgtcagcggcgcgtccacattccgctgatcaggtagaggcgttgcatctcaagcagcgtcgtcaccgcaacttcatggagaacttcgcctcggcacgcttcctgctgccgatcatggtggtgttcatcgtggtgatcctcatcccattcctgcaaagcctggtgttcagcttcaccgattactccggttacaatttcgcggacgcgaagttcgtggggttcgcgaactacgtgcagtgcttcaaggatccgacgctgctcgcgggcctcggcttcacgctgctgtacacggtggccaccaccgtgctcatcaccgtgatcgccctgccgctggctgtggtgctcaaccgcaagttcttcggccgtaacttcgcccgttccctgttcttcttcttctcggtgccgtccatggccgtgctcggcttggtctggcagtacatcttctccccgctgaagtccggcgtcgtcaacacgctgctcgccaagatcggcatcgatgcgattccgtggttgtcgaattccgaacttgccaaattctgtgtgattttcgtagcggtatgggctcagatcggctggcacgccacgctgtatctggcgtatctgcaggctatccccgccgatatctacgaacaggccgccgtcgatggcgcaaaccgtcgccagcagttcttcaacatcacactgccccagatggttccggccatgggtgtgagcatcttcatgctgcttaccggtggtttgaaggtctatgatctgccgtatggcctcaccagcggcggtccgggctactccacctacaccgtgacccagtccatcatcctcacgggcatcggttcgagccggtacggactgggctccgcactgggcgtcatcttcttcatctgctgcgcgctgttggtcgccctgcagcaggtaatcaccaatctggtagaaaagaggctgtcatgactctgcagcaacgcgagcgtatcggctcgatcatccgttccgtcgtcgtcatcgctatcgcgctgatctgcgcggtgccgctgtacgtcatcgtcatcaacacgttcaaaagcagcgccgagatgtccatggacccgattgggttaccaaagacatggaatttcgagaactacacgtatgcattcgggcatctgcccattgtcaacgccttcaagaacaccatcatcgtgacggtggtcggcgtcggcctgcaggtgctgttcggcgcgctcgccgcatacggcatgatcctgaagaagagcaagttcaccgccgtgatcggcgtgctgctcatgctgtccttcatcatccccggccagacgctgctgattccgcagtaccgcatggaggcacaggtgggtctcgtcgattcgctgctcggcctgatcgtgctttacacgggcggcgcgaccttctgctacttcttgatcgtgcagtacatgcgcggcctgccgtatgagatcatcgaggccgcccgtatcgacggcgccggtccgttccgcatcttctggacgatcgtgctgccgctgatccgcccgatcctgaccaccgtcatcgtgttccagaccatgggcacgtggaacgacttcatgacgccgagcgtgtacatctcgtcgaccaacaaacagaccatcgtgctgcaggtgttcaacgcgatcagcaccttcacgacgaactggccgttgttcatgacggtcaccaccatcgcgctcatcccggtgttcgtgttcttcatcttctgccagcgttggatcgtggccggcctggtcgccggttcggtcaagggctgaccggtcctcctgcttgcgggaattcgacaaggagcagcgttatgcgctatgaggttgatctttcggaagccagcaagttcgcgcggacgcccgcatacgggatccccgtcatccgcgccgcagccgcatgcgggccggatggcgggaccctgggcgccacgaaccgcttcctgacccgtgacggatcgccatggatccccatcgccggcgagatgcactattcgcggatcgccgccgaacggtgggacacggaactcgcgaagatggccgcggcgggcatcgacgtcgtatccacctacgtgttctggaaccaccatgaggagcgcgagggggagtgggatttctccggcaacaggaacgtgcgccgattcgtggaattgtgcgcccggcacggactgcacgtcatcgtgcggctgggaccgttctgccatggcgaggtgcgcaacggcggacttcccgactggctgtacggcaagtcgtatgaggtccgttccctcgacgccggcttcctcgatgcggtgcgcggtctctacgcgcatatcgcgcagcagctgcgcggcctgtatttcaaggatggcgggccgatcatcgcggcccaggtcgacaacgagtacatggcgtcgtcggctccttgggagatgaccaccggcatcagccgtgaatgggtgccgtccggccacgatggggccggctacctggaacggctgcgcgacatcgcgatcgaggaaggcatcgacccgccgatgttcacctgcaccggctggcagtcaccggttccggacgacatgctgccgctgtggggtggatacgcgtaccggccgtggctgttctacgacggcgtcggtgccgaggggatgacggagcatcccgccaccgacgagtaccgataccggaggctgcatggctccagcacaagcgacggcttcgatcccccgtacgatccggacagccgcccgtacgcctgctgcgagatgggcggcgggatgttcaattcgtacgattaccgtttcgtgctgccgaagcgctccgtcgacgcgatggccaacatcaagctcggctcggggtgcgatttcctcggctactacatgttccatggcggaaccaacccgaagggcgcggccggattcctcaatgaggggcagaccccgaaacgctcctatgatttccaagcgccccttggcgaattcggacaggtgcgggaatcctaccggcggctgcgcaccctgcacgagttcgtcaaagccttcgggccggaactcgccggaatgccggtctcgttgcaggacgggcaggaccgcatcgatccgtccgactccgagaccctccggtatgccgtgcgcagcgatggcgaacggggtttcgtgtccatcgacaacttccaggaccatgcgcgcgtgccgagccgtcacggtgagcaaatcgacgtgacgacgggtaccggtgagcgcatacggttcaccggcatcggcctcgccgagggggagaactgcatattgccgttcaacatggatctggacggcgtgcggctcgtccgcgccaacctgcagccggtcaccgtgctgcgggtgccgggccgaccgttccgcacgttcgtgttcctcaagcccgatggcatggatgagctgacgttccatttcgaaggcgacatccaggacgtcaccgtcggcaaggcggatttcgaacgcttcatggtccgggacgcggcggagatcgtatgcgtcacacgagcgctcgccgggcggatgacggtgttggacggaggcctcgccttcgtcgacgacgacaacgcgttgctgtacgaggacggcgatgggtggacgctggaatcgccccgcgccgaaaacgggatcgccgcatatccggaaggcttgctcggctctccgcggccggtggagcccgtatcggtgtatgcgcgtctgagaagactgcacgccgatcggtacgaaatcgctttgccggctggcatgggacggcttttccgcgatcaacggcaggtcgccgatgtcatgctgaacatcgcataccagggcgatatcggctggctgttctgcggcgatgtgctgatcgccgataatttctgcaacggcgagacatggcaggtcggattgcgcgattacgcggatgccatcgatgccgctggtggaaagctgacgctggtcgtcacgccgctgaggcgcggggtccgcgtgaaggtaacatcgtcgatggcggcccgcctggagcagtccgatgcgtgcgtcgctgacgtcaccgacgtgtatgctacaccggtgtaccacatgccggtgggcgaataacgaatgtaatatacaaaaaaccatggctttatgccaattaccaaaggagataatcgtgagtgcgcgacgcaacttcgaatggccggaactgctgaccgcggatggccgcggcatcgccttcggtggcgactacaatcccgaccaatggtccgaggacatctgggacgacgacatccgcctgatgaagcaggccggcgtcaacaccgtggccctcgccatcttcagctgggatcgcatccaacccaccgaggatcgttgggatttcggctggctcgaccgcatcatcgacaaactcggcaatgctggcatcgtggtcgacctggcctccgcgacggcgaccgcgccgctgtggctgtacgaaagccacccggaggtccttccgcgtgacaagtacggccatccggtcaacgccggctcgcgccaatcctggagcccgaccagcccggtgttcaaggaatacgcgctgaccctgtgccgcaagctcgccgaacggtacggcaccaacccgtatgtgaccgcatggcacatgggcaacgaatacgggtggaacaaccgcgaggactactccgacaacgcgctcgaggccttccgcgcatggtgccgccgcaagtacggcaccatcgacgcgctcaatcaggcgtggggcaccaccttctggggccaggagatgaacggcttcgacgaagtgctcatcccacggttcatgggcgccgactcgatggtcaaccccggccagaagctcgacttcgaacggttcggcaacgacatgctcctcgacttctacaaagccgaacgcgacgcgatcgccgaaatctgccccgacaagccgttcaccacgaacttcatggtctccaccgaccagtgctgcatggactacgccgcctgggccaaggaagtgaacttcgtatccaacgaccactacttccacgagggcgaatcccacctcgacgagctggcctgctccgacgctctcatggattcgctcgcgctcggcaagccgtggtacgtcatggaacactccacctcggcggtgcagtggaagccgcttaacacccgcaagcgcaagggcgagaccgtgcgtgactccctggcccatgtggccatgggcgccgacgccatcaacttcttccagtggcgcgcgtccgcgttcggtgccgaagcgttccattcggccatggttccgcacgccggcgaggacacgaagctgttccgccaggtgtgcgagctgggcgcgtcgttgcacacgctcgccgacgccggcgtgcagggcaccgaattggcgcactccgacacggcgatcctcttcagcgccgaatcggaatgggccacccgctcccagaccctgccgagcatgaaactcaaccactggcatgacgtgcgtgactggtaccgcgcgttcctggacgcgggctcgcgcgccgacatcgtgccgct

SEQ ID NO: 3391 - DNA, 3697 bp, Unknown
  R151_18m  MAG No. k141_29443
gtggcccgcaacatggataagcgcttcttccgcttcctgtactacttcttcatcgccgccatgttcgtgccgttcccggtcgtcatgctgccgattgcgaagcagatgggctccctgcacctggacaaccaggtcggcctgatcatcctgtacacggtgctcggcctgggcacgaacctgttcatcgccactggcttcatccgttcgattccggtttcgctggaagaggcggcccgaatcgatggcgcatccacgtggcgcattttctggaccatcatcttcccgctgatgagcccgattaacgccaccatcgccatcctgaccgcactgtgggcctggaacgacttcctcctgccgttgatcatcctgaccgaccagtcgaaccagaccatcccgctcgcccagtacgtcttcagctcgcagttcgccaccaactacccgatggccttctccagctacctgatggccatggccccgatcctcatcgtctacatcttcgcccaaaagtgggtcgtcggtggtgtgatgaggggagcggtcaagtaaaacagcgcagcgctgctttacttcaccgcgtcgagcgagacgagccgattaaggaaacagccccgtgggctgtttcccggcccgggcggccggataggtcgcgtactcgcgaggtcatgttgggtctggccgtaggccagtcctgaattgcaggactctgtgaagtaaaggtccgcttccacccaagcctcctccggctctcaccggaggaggcttttctgtcctgttgccatactggaaaccgccacaataaaggcgacggtcggttgatgtggcggtggcgcacaaaggtcatgtggttttgctcgttgtgcgaatgaaaaagtgacgaaaccgtacggcttacggtgcaattgagcgcatctgctgtgtcgccgtgccactggcttgtcccggtccacatatcaaccgtttgacgcgcgaaccgggacagaatccgctgtcccggttcgcggtttcgggcgattttcacgaaccgggacaattttcattgtcccggtatgaatgtcaatcgttttatgtgaaaaccgggacaacatgttgattccgggatcggctctattccgccgattttgtattacggagcatatgaactgcggagattggcttgtccctgtttgtaaaaaaggacaaaaatcgcgaaccgggacagcggattctgtcccggttcagacggcaatcgattgacatacgaaccgggccaacgccgaagtccggagcggttcccgaggcggggtttgcttgaaatccggtgtgccagcgaaatccccaccagattcccgcaggcgtgtcaactaaatcatctatccccgcaccagtgggttcaagcaggcaatccaagcgcgctcgaagttgctcttgcgcgtcgcaatcagaagaaccgttaatatgtgagctgccgcaggtcaggtagattatggcggcggaacaagcgggcgagctccttcataggttcgagcctcgagtgcatcatccacgagcacaggcgatatagccacacccacgcctcgaacaggagcatgaaccctctgccgggctcgaagccgatcgtgatgtgcggctcccgcccgtcgccgtcggcgtcacggaagtccgcagacccgaccctccaaggcgaccgcagccgaagcgcggcggtgaacaggtgagaggcatccatgcctccaacctacccgaccaacatcaccccacggcacagtcacccaccacaaacagcgaaagggcccatatgttgctaaatagcatgtgcagcttatgagaattgagccgtagcagtgccttccggctctttgcggtttttgtttccggcacaccaacgcagttccccaatggaaatgtaattcagcgctttttagactatgagcaacaggcaatgtagaccataaataatggaggagccaacgatgaccacttcacaacgcacagtaattccagattccatccgcaccaacggtgccaccccaaatccgtggtggtccaatgcggtcgtttaccagatttacccgcgttccttccaagacaccaacggcgacggcctcggcgatctcaagggcattacgtcacggctcgactatctggccgacctcggcgtggatgtgctgtggctatccccggtatacaagtctccgcaagacgacaatggctacgatatttccgactatcaggacattgatcctctgttcggcacactcgacgacatggatgagctgctggccgaggcccacaagcgcgggctcaagatcgtgatggatcttgttgtcaatcacacttccgatgaacacgcctggtttgaagcgtccaaaaacaaggatgatgagcacgccgactggtattggtggcgtcccgcccgtcccggcaccactgccggcgagcccggtgccgagcccaaccagtggggctcctactttggcggttctgcatgggagtattgccctgagcgtggcgaatactacctgcatcagttctcgaagaagcagccggacctcaactgggaaaatccggctgtgcgccgcgcggtatacgacatgatgaactggtggcttgaccgcggcgttgacggcttccgcatggatgtgattacgctgatttccaagcgcacggacctgtctggcaagctgcccggcgagtacggttccgagctggacgatctgcccgtgggtgaggaaggctattccaacccgaatccgttctgcgcggacggccctcgccaagacgaattcctggccgaaatgcgccgtgaagtgttcgaaggccgtgagggcttcctcaccgtgggcgaggctcccggcgttaccgcacagcgcaacgaatacatcaccgaccccgccaacggcgagctggacatgctcttcctattcgagcacgttgattttgactgcgaaggcgtcaaatggaagccactgccacttgacctgccgaagctcaagagcattatggccggttatcaagcggccgtgaagaatgcaggctgggcaagcctgtttactggtaaccacgaccagcctcgcgtcgtttctcgttggggtgatgactcctcggaggaatctcgtgtgcgttcggccaaggcacttggcctgatgctgcacatgcatcgcggcaccccgtacatatatcagggcgaagagctaggcatgaccgacgcccacttcacgcgcctagaccagtaccgtgacctcgagtccctgaacgcttaccgtcaaagggttgaggaagccaaagtgcagtcgcccgaatcgatgttggcgggtatcgccgcgcgcggtcgtgataattcgcgtaccccgatgcaatgggacggctctgtctatgccggtttcactgcgccggatgccgctaaggagccatggatctccgtcaatcccaaccatgcggcgatcaacgcggccggcgaattcgacgatccggattcggtgtatgccttctacaagcagctcatcgcgctgcgccacgacatgcctgtcgtggcggccggcgactggcatctgctcgatgcggatgacgcgcatgtctacgccttcacccgcaccctcggcgatgagaagctgctggtcgtggtcaacatgtccggccgaaccgttgatctaccgcgcgaaaccgccgaactggccgccgccggaatcaccgagtcgaacgtggtaatcagcacgtatga

SEQ ID NO: 3392 - DNA, 3546 bp, Unknown
  R151_18m  MAG No. k141_29576
cggggccaacaacagttgcgcccgcgttcgtcaccgtttcgacgatcttcttcgccgattggtcgatgacctcgtggtcataggacttaagcctgatgcggattttctgtcccgccattgccgtccgccctttctagcgatgttcgttgtactgtttacccacctgcttctagggcaccggcgcgcatggcctcccttggacatacgtcctctggcggtcatccgacatcagtgcgcggtttccggctgtcacttcacttgaagtgtctcccggcccgcgctcgcttttttaattccaatttgcgagcccaaatcaggcaacttgtttattcaagcattgaggtgggacagcgcggaggaattcgcgcgtgtcgcgctcatgccgttcgtattacctcgcggcatagccgctcggcgtcgcctaccaacatccttctgagacttacctatatatagtggcacagctcacgttggcgaatatggattgattaattgagttggacggtaacgcgaattactcttaaggctcgtgacacaatcactggcaaagaacatcaaacctattcgtgagcacggtgccaacgtgttatatcagcacggcactttggccttactcgtgccggggctgctggaaggcaccaccaccatcggcgaattgctcaagcatggcgacaccggcatcggcaccggcgagggcttggacggcgagctcatcatcctggatggcgtggcatacaagataggccaatccggtgtggccgaacgcgtgccggacgacttcaccatgccattcgctaatagccatcgcgcggccttccagtaccagtgcgagcgtcatgatatcggcctagaagagctcaacgaaaagatcgtcaaggcgaacggccgcgcgaacacgttcttttcggtaattgtgcgcggcacgttcagcttcatcaagacacgcgcggtcatcaagcagcaggcaccctaccccacgctggtagaggtggccgaccggcaggccgtgttcctgcgccacgacgtcaagggcaccatgctcgggtacttctcccccgtgatgtttcacggcgcggctgtggccggattccacgagcacttcctgtccgacgacaagacgttcggcggccatgtgctcgatgcggtgctcgagcgcggcaaaatctacagtcaggtgttcgataccttggtgcagcatctgccggtggacgaccctgattatcgcaaccacgacttcagccaagatccgatagccgaggccatttccagcgccgagggcgatactcaacgagattagtctcacataaacacaatgtgagccaaatgaacatttccgaacaatcgcacatgttgcataatggcggaagcactggcttctcgcacttcctatgttcgattgtcgcaatgcaggtctcacatctttcttattgagaaccattcgctgcgatatcatgacagatatggcttcccgccgcaagactcttaaacgcgattggttcgacaaccaacctggcgcatgggtaatggttatgctgcccgctgtggctggcttctttatcggcgggcctaatcttgatacgctttggctgttggcgacgtgggccgtgtgctattgcgtgcagttcagcgccgcgcactggttcaaagcacacttttcacgccgttatctgccgccgatgctcacttatgccgtagcgctcatcgtcatcggcttgccattcctgattacgcataccggcatattgcgttgggctcctttatatatagtactggttgcgctgtcgatgctgtcctcgtggctgaggaaggagcgctcgctgtggggcaatgccgtgtcggtgattgccgcatcggccatggccacggtgatcgcgtcgtttggcaacgctgttgagacggcatgtgttattcccatcaacgcagcacatgcctcgtgcgcagccgctgatgtcaccgccgcacgcgccgcgattcggaatatgccggatttgagccagatattcgaccttcacgcctggtggcctgcgggttcattgcccgtgaacgggctgattgccaccgtgctgtttgcgctgacgcagtatgggtcggttttggtggtcaaaaccatgatccgggaacgcgggaagcgttcgtacgtggcggcttcgtgggtatggcatgtggcgctattgctgctagccgccgtgccggctggacgcagcccgtatctgattgcgatgactgtgctgctgttggcccgcgccgttgcgttgccggtggttacacggcgcacaaccttgaagcccgtggtgaccggcattaccgaggcgtttgccagctttattgcttttggctgcattattgcggtgatttagcgacgctcagcgattccatggggcggtaattccctcatggggcggtaattagcccatggggcggacggtaaaattttaccttccgcagaatagagccgttttcgtacaccgccccatggggttttcaccgccccatgggcaagttaccgccccatggggttttcaccgccccatgggcaagttaccgccccatgagtaggttaccgccccatggaggcacctgccggctgagggagcgccacatatgcaaaggagcccggcccctgtaatggggtcgggctccttgtgtccgctatgcagccactaagctgcaacaccgcggttggtggctactgctggtgccagcagccgccaaccgcctgcaatcagcgctcggaggcttcctcagtggcggcctcaccctcgcgctcgatgcgtagcttgtggccttccgcctgggagacgccgtagtaagcaccgacggcgatgtccttcatgtcgttgatcagcgggatgcgcgggttggccggggtgcactggtcctcgtaggcgcgcatgccgatctgatcgagcacggaccagaagtaatcctcgtccacgccgcaatcctggaagctcttgttcataccgagcttgttatcgcggtagtcctcgacagccttcgccaggttctccacggcttcggccggggtcttgccggtgtcgatgccgaggttgcgggcgatgtcccggtagcgctccggggcgatgtacttgttgtacttcggccaagaggtgggctcctcaggaatctggccgttgtagcgaatcacgtacggcagcaggatggagttggtacggccgtgggcgatgtggcacagggcaccgatggtgtgggccatgccgtggcacatgccgaggaacgcggagccgaatgccatgccggccatggtggcggcgttgtgcatcttctcctgagcgtcggtcttggccaggccgggctcgccgttgacggactcagccaggttgtcccagatgagcttggccgcgtgcagggccatgccgtcggtgaagtcgttcgcgtacacggacacgtatgcttccatcgagtgggtcagggcgtcgaagccggcgtcggaggccagcttgcgcggctgggtgcgggccagcaccggatccacgatggccacggacggggtcagcgcgtagtcggtgatcgggtacttgtagc

SEQ ID NO: 3393 - DNA, 32071 bp, Unknown
  R151_18m  MAG No. k141_29772
cggcacggtgagtgcgccgatggacatgatcgccatatccagagcggtccactcccaacgcgtgcgagacacgatggccacggagtcgcccttgttgacgcccagaccaatcaggcctttggccagatcgatgaccatgtcgcggaagacctgggcgctgtacggctgccaggtgccatcctcagttttatattcgatcatggcgccatcgggatcgcgcttggctcgctcatcgagcaaatcgaacaggttgatgtcgctgtcaatcggctccttgacgggattggtgaactgcttgacgatatgagtatcgtttatggccttatcagcgatgttttcagtcatactccccatgtaactccacggatgctacaaaacacgcgcgaaacaacggattgtccagaccaaatggccccggcaatccgttatttcgggcaaaccaggtaaatctgtcgcaccgtacattcagcagattactcggcggagtcattggcctttttcagctcgtcgcgaatctcctgcagcgtggcgagagtctgctcttcaacgctaggcccctgttcttcagcgtcagcctcatcctgggcagcagtgagatcacgaagcttattaatcggcaaaatcacacagaaatacaccgccacgccaacaagcaggaagctaatcagcgcgttaagaatcgcaccaaatgaaacagtcgagttgttgaacgtgatggtcagcagtccggaaagatccggtacgccgccaatcatgccgattaatggactgatgagattgtcgacgatggaattgaccacagcggtaacggcagagcccatcaccacacctaccgccatatcaatcatcgatccgcgcgacaggaatttcttaaagccattcaacggacctttatcggtcaaagcaacaactttgcgagcggttcctcccgtggccttggcaaagtcggtggcaatattcatgggattgtggttactcataacggcactccttacgaaattcagacacttcacttgtatccgactggttttcccacgactccattatgccgcttgttggaatatccctataccactgcggcgttcccgtacatgactatgtacgagaacgccgccacccctgtttgctgagaacctgttagagctgcttagaactgaatgtaatcgacttccgtatgttcgccggtttccaagtatttcgccacatcatcaggaccgacgaacaccagttcgaccgcttgcgcaatcatcagattgacacgatccattggcgtaaggttttcgaaatagccgtacaccgggattcccagcgcatgcgcatatccgatttcgaacatcgtgcccgggtcctcgtccataagattggcgaccacggctttagcagcattaatgccatggatatcgtccgcaaagcatccttcagggcctacttcttcgatctggctgacaaaccgcggcttgaacagtaccttgccatggtcttccaatatcttttccaaacgttccatacttgacgtttgttcaggatcaaagaacggaccggccacatagaagtcatactgtttgtcttcactcatggtctctagtcatagcgcagcaacgtcggacgccagccgttattttcactgtatggacaaggggtcgtatcgtgaacattactacgggataaccgtcaatgactacgtacgttgcccccgatcagcacactccgccactttcgccccctcccgtatcgtcgagcacgcgaaccaagccgaccaaatagccgccatcccatgcgctgattaccgtatccgaatgctgcaatgccttgaacaaccgttcgggccactgcgccgattcccaaccaaccgacttgaacagcgcctcaacctgttcgacagtaaaccgcttctcttccgtgtattcgatagccatggaccctcacgataaccgtgaagccccacatgtctttgcatagtttcacatgacgggatgatggatggtggaacctatacgtttacacatgcctaatgcctatggctcatcaccgatgaatagaggctgagataccgtcatgtttccgaagccaagtgcccgagatcggattcgaaccgacgacacccgctttaggagagcggtgctctatccactgagctactcgggcaacgacgtttcattgtacacggccgcacgcccagtcgcatcatgttcgcgtggcagcctacataagacgcatggcagtctgtgtaagctacctggcagaacccgccaccaaggcatggccggttttcgtgctggtttggtgcgaactgctcttgcgcacggcgaaaagacactgaaagacaagccgcacacggtacagtggcaaatcgcacgaaaagcaaggtaacagtaaacaagccggaggaaagggcagcatggcaaaggcacggagtactaccacaggtgcaagcgtacgagctcgcgccgctgccaagccacgctctgccaaagccacggcacgcccagtatccaagtctgccgtgaagccacacaaacggcatcgtctgcttggttttctcgccacgatgttcgcgcttcttgcccttgccggcactgccgcccgcgcgctgcctgccgatttacaggaactgccatttgtgccgattgtggtatcggcaacgccctggttcacgttgcttggcctgattgccctactgttggccatcgtgtcgcggcgtatccttgccgcactaatcgccatcgccgcaatcgcatgcaatggctattggcaatatccgttcttctactcgaccgacccgctcccccaagccgcgcagaacgccgtggctgcggcctcccccaacaccagcgatgcctacgcgcgcgtcatgaccttcaatgtatacaaggggcaggccgacccacaagccatcgtcgaactagtccgcgatcagcgcgtcgaagtgctcgctttgcaggagaccaccgaggatttcgtcaaaaaactcaacgaggctggcattgagcactatctgccgtatgcgcaggtctcatcgtctgacggcgtattcggtaacggcctctggtcggccacgccacttgccgatccggccgacgatgacgtgaattccagcgcctcattcatgcccggcggcacggtggatatgggtggtcagcagattcgattcgtatccgtgcacaccaccgctcccgtacccggctattggcggcagtggaagcgatcgctggatgagttgggtccgatgcgcgggcatacggatacacggtatattttcatgggcgatttcaatgccacttacgatcacacgccattccgtgattttcttggcgaccggttcgtggatgccgcacgtgaatccggacatgggtttacgttttcgtggcctacgaaccgcgtgtatatgccgatgttcgccggtattgaccacgtggtgcttgatcagggcatgaaggccgggcaatgcaaggtggtcaaagtcgagggctccgatcatgcggcgttgttggctaccgtggcggttgggtgatttcgtattcctcggccagccgcatacactgggacacggcttccagaatcgcctcgatgccggacttcttgattgagccgtcatcctttaaatacttcatcaggcgcactgtggatttggtgctggcctcggggtcagggcgagcgccgggagcggcgtcgacgataagcatgtggatagtgttcgaaccgatatcaagcacaccaagtcgcgtggtgcgcgaacgcagattgaccatgatccctattcctgaccttacccaacccgtgatggccgaacaacgggccgaccatcgcaatcagccagccgtgcgccaccatggcgagtcgttcggccggcaaccaacaccgcgaggccagccgaacatcacacaaactcgactaccgtacaacaatcacaccggatgccgcgccgttcacaacgattcgacgaacgttccgagacgttccagcccctcggtcagggcctcacgtgaggcggcatagctcaggcgcacatgcgtatccgctgtggccgcaccgaagtcgcggccaggagtcagagccacatgggcttcatccagcgcgcgttcgcagaacgtccaggcatccagaccagtacgggagatgttgaagtaggcgtagaacgcgccattcggctccacctcaaccggcaaaccgatgcgcttgagcccgtcaatcacaatgcggcgacgggcaagcaattcctgacgacgagcttcacattcggccaaactctccggcgtaaaacaggcgagcgccgcatgctgggtgggcgtgtgggcgcacaggtagtagttggtggccaggtcgtcgaccgccggtggggtcgtcgggcagaatagcccagccgagacgccagccggtcatgccgaagaacttggagaagctgttgcacacgatggcaccgggatcgcaggccagtacggacttgacttcggtgccgtccggctcacggtcggccaaatcaaggtaggtttcgtccacgatgcgccatgcgccgcggctggcggccagcttgcacacctcgtccaatacgttgaagtcgatggtggtgccggtggggttggacggcgacgtgatcattacggccttggtcttgcttgtccagtactggctgcacaggtcggcggtcaggtggaagcgggtggcggccgaggtcggaacgtcgatgacccgcccctcaaaggagcgcacaagttcgcggttgcacgggtaggaggggtcggccacaatcacatcgtcaccggggtccacggtcagcgcggtggccaacagcagggcggccgaaccgccggcggtcacgcagatacgcttggggtcgatgtcaaggtcatgacgctcgcggtagaagtcggcgatggcttggcgcagttcaggtaggcccatggcggcggtgtacggcagggcccggccatcgtactgttcgcgcatggcgtcgcgtacggcgggcggcgcgccgaaatcgggctcgccaaggcttaatttgatgacgctgataccttgggcgatcatcttgtctgcttgttcgccgaataccatggcacggaagggattggcctcacgcgctcggcgggacatgactggagacgcggccggagattggggctgctgcgctgcttcgttttccatatttcggttctatccgcctcacgggacaaggtttcttcttctataatcactgtaggtcgattgagtgtccaacccgtattcaaggaggaataatgagtcgattcaatggcaaacgcgccgagttcgaggccagcggcgaaaagatcaacgtcgcgattctgggtgcgggccgcatagctcacaccatggccgacaccctgacccagatggctgaaggttcactgtattcctcatggattcacccgtatgcggtagcggcccgtgatattacgcgcgcgcaggcttttgccgaccaatggcattttgacaaggcttatggatcgtatgaggagttgacggcggacccggatgtggatctggtgtatatcgccaccccgcacagtctgcacgccgaacaggcgatcctgtgtatgaaagccggcaagaacgtgctggtggagaagtcgttcaccgcgaacgccgggcaggcacgtgaggcgctggccgtggccgaggaaaccggcatgctgtgcacggaggccatctggacgcgctacatgcccagccgcaagctcatcaacgaagttatcgagtccggcgagatcggcgaggtgaaagcggcgagcgccaacctgtgctatccggtgtccggcaaggcacgtatgaccgatccggcctgtgccggtggcgcgctgctcgatgtgggcgtgtatccgctgaacttcctggatatggcgatcggtgccgaccatggccgcacgctggatcatttcgatacgtcgatgatggccgccgaaaccggtgtggatgcacagaattccaccacgttgtattacgatgatggcacgatggccgtgtccaccagttcgatgctggtttcctccgatcgcggcggctacgtgtggggcaccgaagggtatttggtggtcaccaatatcaacaatcccgagtccatcgatatctacaacaacgatcacaagcccgtgcgcagtgttgcggtgccgtcgcagttgaccggttatgagtatgaggtggccgatgcagccaacgcgctgctggatggcaagatcgaatgcgaggcgatgccgcacgccgacaccatccgcatcatggagctgatggatgcgattcgcgaccgttggggcctgaagttcccgtttgaggtctgatttcagctcccctccagaggggagctgaaattattccgctgaatctgcatctccttcaacaatctgctcatacagccgtgcgaggcgttcgtcacgcacggctttcgttaattcgcactcccatacggtaattacacgccagccggcggcctccagttcagcccgctgcgcgatgtcccgattgtgattgcgcagtagcttcgtctgccagaattccacattcgatttcggcatcgaatgtttggaacagccttcatgcatgtgccagaaacagccgttgatgaacacgatggtgtggtatttcggcagtactacatccgggtggccggggtaacgcttgtcgttcttgcggaatcgcaaacccttgcgaaacagatagctgcgtaccagcacctcgattttggtgtctttgccacgaatatgcgacatcgtgtacgaacgggtgccccgctcatacttctccactggctgtttcttgcgattcacgcactccagactaccgtgacgttgcggcgaggatgaaagcctgaacgaacaatcacccatcttgcccgtccgtgtctcttatcgcgggcaatgatcatctgccggtcgagactgcacgattagaccgaatcaaatggatgacatgatgattcgtagggccacggcggccgatattccccaaatcgacgaactgctgcggcaggtgctcgaagtgcatcatgccggccgaccggatctgttcaaaggcggtgtcaagaaatacacggacgaggaattgaaggcgattctggccaacgatcagacccctgtgttcgtggcggttgcaccatctgccaatgacggcactgacgtcgaacataacgccgactcccccgccaccgaccaagtgcaatggtatagcgccaagcgacgtctgctttgcgagatttgcgagagatgaatgcgataccagcgttcatggctatgctccttaatccaatatcaatggatgaacctgcactgccccgtatgtcaccatcataatatatcgaatatcaatataaaaatatcgaaaatcactttcaccattcacccacacacatcgcgacgtgatcgaccgttcttgccttgctcgcagcatccacgaccaacacgggaaagtcactttaaaaaagcactttatcaatgtggataactcggaagctagaaccacatacccccgttcagcttgccaatcagaaacctcatcccataccgtcagatgcacccgcacgcaacgacgcgtcagacaacagaaagaaggaccaatgaacatctctacgtttacccacaactcccacccggcaattcggcatacgcattttgtctagtgcgagattgagagttatgatgacacgaagaaaactcatcatcaagaaacttcggcaagcggcaaagcagcgagggctcgatttctatttgttacggcaaggcagcagacatgaggtttactgcctggacgggttgaggatacccatcccccgccataatgaagtctcagaacgaaccacgctggatatcatcaacgagagcgagcagaaactcggaaaggggtggtggcaatgagcaactatgacgtgcttgtgcaacccgatggccgatattggtacgttcaggtgccagctatcgaacggtcgacccaggccaaaggacttgacgatatcgagccaatggctaaagatctcatcactgtcatgaacgacgacgacaatccggagctcaaggtgacgtttgtgttgccgaaacaagccaaacaacacgtaacagaaatgttccggcagcgcgaaatagcaaaaaaagccaacgcacaagcggctgccgaatcccgactcgccgcacgggctctacgcaacgagggactcacgtatcgacaaatcggagctttattgggggtctcctaccaacgagcatttcaattggtcaacggcaaaacaaagcacaaaacgacagcgtccgaatcgcctcagccaacaactgaatcacgctccccacgcacgcaccatgccacaccgctatcgactccggtctcggcttagcgaacgggtccacaaagcctagactgtttccgcctcccaagctcaagagcaccgagcaggatcttctcatcccagcagattgaggagatcgtccttggtgagggtggcgatggaggcgggagcttcggtgagggcgctggcgccggtgccggcttcgtcggcaagcaaggaagcatcggtgaactggcgggcgagctcgctcttggtatgctgaagctccaagatgcgttcttcgatggtgtccttggccaccacctgatacacgttgacgtcttcggtctggccgatacgatgtgctcggtcggtggactgatcctgcgcggcagcgttccaccatggatcggcgtggatgaccacgctggcaccggtcaggttcagtccggtgttgccggccttcaatgaaatcaggaaggcgggcgtatcgtccgcattgaactggtcgacgagttcgagacgcttctttttaggcgtggatccggtgatggtgtagtagcgtagtccttgcgcgtcgaaacgttcggcgatcagatcaaggaagctggtgaactgggagaagatcagcgccttcttgccttcattcacgcaggtttccaccagttcggtgatggcggcaagcttggccgactgatccttggcatcggcatacagcagccttggatcacagcagatctggcgcaacttggtcagctcggcgaggatgcgaatcttcgacgtgttgaaatcggcttcttcgctgtgttcgagctgcattctgagccgctgctcgtgggccgcatacagtttgcgctgttcgccggcaagctgcacggtcagcgtggtctccaacttgtccggcaaatcggtcagcacttgggacttcaacctgcgcttgatgaacacgcccaccaacgactgcaattggcgagacacccgggcggcctcaggattgacctgtgcggcggcccgaccttcggccgtgctgccatctgcagcccgggcgttggagatgggcaactcgtagcgctcatggaatcgcttgtatgagcccaatagtcccggcatcaggaagtcgaagatgctccacagttcggagagtcggttctcgatcggcgtgccggtcaaggcgaaacgatggtcggcggccacggccttgaccgctttggctatcttcgtggtgtgattcttgatgtactgggcttcatccagcgccatgacattgaaacgttgctcattggcggtgtaatcatcgacatcccggcgcagcaggtcgtatgaggtgatgagcacggtggggtcatccgcccggaacgcgcggccgatggcggtgcggcgctcggctttggtaccggccaccaccacggcgttgaagctcggggcgaacttggcgaattcggcaccccagttgtacaccaaggacgccgggcacacgatcaatgatggatgcggcccgccatcttcggaatcgaaagtaatatgaccggttacggctgattcactattaacagcattaccggcatccatgccttgagcggtcggcatgccactagattcgttgtggtatcgcgacagcaacagggcgataagctgcacggatttgcccaaacccatctcgtcggccaaaatgccgccaaaacccttgtcgcacaacgtgttcagccattggaagccttcgacctgataagggcgcagaatatgcttgagactatccggcacttcatacgacttagggtcgatgatcttgagatcgtcgatgtattcggtgaacgaagcgtccttgactacatcggagccgtcatccggcagctcaccatccagtaggaatgctcgaccgcccggcaactcgatcagcccggagttgagctgctgctcgctcagatcaaggtcgctggccaatcggtccaacgtgctgagattcgcgccgctgagtttgaccagcgtgccgtccttcaactgatggaatcgttgacgccgacgatacgaagacagcaaggcacccacttcgtccggcggtacttcatcagcgaggggtgatatctccaccaaattgcctttgatggacaatccgactttgacgcttggcggcttgggcgcgatcagccggtcaaaagccggtgtggtgaagacctcccctacttccttcagtgcgggcaatccctcgtcaaaaagacgaacaatctgcgtggtgtcatcgcgatcgatagtggccgcatcagacacgaattgtttggcggtctttcgcgcggccgacgttcggaacacattcaccgtctgatgagtggcggccgcgacgcgcttgcgctggtcaggcatggtaaagaattcacgcactacatcaatcgcaagatgctcagcgtcgaaatcacgcccaatcacgccccgagacaaggggatggaacgctcatccctagcatgcaccgtcgggccatcgggtagcaacgggacaatggcatcgccgtagtgtgccttgacctcgcattgcacaccatgctcatcacgatccagataaaactggaggctgcattccgtaggacttaattcagccagctcgcgaggaatctcactggcctccaacagtccggcaccaaccagctgaggcaatagcgtgcgtgcgaacagggcgatgtcatcgccggcaatgacctgcccctcgccatcgggttcaaacaggtctcccaatagtcctcgcaacggaatcaatcgtttcgggcaacggacgaatcggcatcccgctgcgcttttacgctgagagcccgccatcatggcggataccgcaccggccggattagtggaggcgagcaacagccatacatccttgccaccatcaatcacggtttccaccgccggcactccggcaagcaggtatccggcatccggaccatacgtattgaaatcacgccgcgcaatgcgcataagaaaatctggctcgccaccatcaaccggcaccgatgcagactgcccggagaaccatgtgttcaacacgagctgtacgcctctgccctcacgtacggacagcaaccgggccacttccggtgctgaaagtgtcaggtgacggtcgatggcgatatgcccgtaataccggtcctgctgctcggccgcacgacgcacggccatcgcgtcgtcaaggaagcccagcagtgggcgcgaatcatcgtcgaacatatccggcgtatgggtaaaggcaagcttctgcccataatccgtatagtcgccgttcgccatggtaagcacaaattgcggaatcgatttcagtacatagctggacccattggaagtcgatccgatcttgaactccacgctccacacgccatcgatgaaactcaatatcggaacaagctgcacctgccccaagcccacagtctcactatcgccctgatacccgccgcctcgggtgccggcacgagagccgtatccgctattcgtacgtcgtccacctgcgccatttcgtccttttgcagtatcgaatcggcgcatgagcgcattgcggcgacgcgctttggcttgagcatcttgcctatcgacgtgctccatatagtcgatcagcgtccgagacggcctcacagccccggcacggtacccttcaaaacgctgcggatcatcgcagaatatgaaggcgagcgcaatcatgtgcttgcacatgccatagccacggccgtaagccgggcatgagcacttgccaccgacggcttctcccgtgtcgaggtcgaattgcacgctggtacgatacttactcgatgggctggtgatgccacgtagaatgccgtcaagctcggcatacccggttcgatgattttcgctgtataccggattgataaccatggtggccgctttgcgcgcaatgctacgggcacgagcgagcacggcattcgacgatgacgattccacatcgttgcgtaacgcaaggatagggacggcatgggcttcggcacgcttcgcagacccggcgaaatggccttcgtcctcatcgtcgaaccatacggaacgtccttgcctgaaacgatagggcataaccgcatcggcggcggacaaactgtccgttccgccaaacgttacggctctactgccggcagcgcctgcgccaccaagcattccatctgcctcgccagagataccgcctataccgctgctcttgccggcaaagagacccctgtcctcattagtgccatctgtgtcatctgcgccataccgatcatcgtcgtaatcggcaccttcgtcgcctccccttttccaaggattgcgacggcgcaacgcatggccccaggaaacgccggaatcatcatcctcataaggcaggaggtcatcgtcatccgcattatcgggaacatggccaaatacaccataccctttgctcatgggcgagcctcctttccagcgaatgcatttcagcccaacacttccatcctagacgaagcgcgcggtagccttaatgtatggatgcagacaagccggcgcaacgcaaatcctatgcagggaacaccaccctcgaaatcttcgaggtgctgtggcgtcacagctactttggacatggcctgaccgtgcggcaaatactcgatgaacttgcccgtaaacaccagctggaagatccaagcgagctgccgaccgagaaaaccatacgaaatcagctcaaaaagcttaccgccacggaatttctcggcaggcatatcgggcatctcaccgaaagcgaccttgccggcatcgaatgcaagaatccacaacccggctggtatcttgacgcattcctatccaccgccgaaatgcgactgctgctcgacagcctcactttgtctcgcatcagcctcgacaccatggacgatctcatcggtaaaatccgcgaactcgcaggtgccgctgggcaagcagtaggttaccttgatcacgtggccacctacacgcatatcaacggcgagttcctatccaccatcgaccaactgaatcaggccattgaagaaggccacggcgtaaccttccaataccgtgattacggcccggatggcaccctgataccacataaaagccgtacgggtgcaggtcggatcacctacatcgccgacccttatcagatggtgtacaagaacggacggtattacctcatctgccatctacatggcgaggataatctccgcattttcgtggtcaaccgaatcgccaacgtcagcgccaaaggcaggaacggcacagtgccactggaaaaaccagcgccggctgattttgatgcagtgaacttcatgcgtcaccgcccgtatcccgtagccgatgccccgattcgcatccgcatggccgtacgagacgaatccatgctcaacaatgtgttcgaatggttcgacgaccctcagatcaaacattcgccggacggcacacagttcgaagtcatcgtcgatgctcccgaacgcgccgtgttctggtgggcattgcagtattcctgggatggccgcgtagtgattcttgagcccgattcgctcaagcgcaaactctatgatgccgggcgtcgcatggccacagcctatgctcccgaatgatgcagcatcacatcgcacacctccttgccgagttgttcaccagcgaatttcaccggagaacctatcatcccatcgccaatcacgttcggtaattttttaccgaacaactcgatttcaagccattccacgaactatggcccccgcctagccgtacttgacgctaaggtggaaccatcacatgccgcgatgcacatgcaacgcaaacgcaacgatatgtaaggagcaactatgagcgaagagcgtaccgcatggggatggggtctggccagcgtagacgccgccggcaccaccctagacgtctggtaccccgaactgaatctcggtgaggcaccggccgaggccgatcgtccaaaccacaatttcggcactctggcccacgatgaagccgacgcccgtggcatccgccgcgtgccggtattcgtcgtcagccagttggacgagccgatcagcaacgccgcggacgcttacctgaaactccatctgatgagcatgcgcatggccaagccgaacacgctgaaccttgacggcatcttcgcccaactcgccaatgtggtgtggaccaactacggtcctttcgccgttgaggacttcacactacgcaaggccgatgtcgaacgcgcctccaccgaagccgctctcgctttcgctgctcaggccggactgcctgccgcagctcctgccaccaccgtcaacgtgttcggtgtggataaattcccgcgcatgatcgattacgtagtgcccaccggcgtgcgtatcggcgacgccgaccgtgtgcgcctcggtgcttacctatcttccggcaccaccgtgatgcacgccggattcgtgaacttcaatgccggcacgctcggcgtctccatggtcgaaggccgcgtttcgcaaggtgtggtcgtgggcgacggttccgatatcggcggcggtgcctccatcatgggcaccctctccggcggcggcaagctgcgcaactccatcggcgagcactcgctgctcggcgccaacgccggtatcggcatctccctcggcgataactgcaccgtcgaagccggtctgtacatcaccgccggcaccaagatcagcatctgggacaaggccaaggccgccgctggcgaaccgctggaagtggtcaagggtgctgagctctccggcaaagacaacatcctgttcatccgcaactcggtgaatggacgtatcgaagcccgctaccgcaaggtgggaattgagctcaacgccaagctgcacaagaactgaaattgaaataatggagcgttatcttcgttgctcctcggtcgacgtacttccgtacgccttccctcggtgcgcttcgataccgcacacattatttcaatttcagaactagccctgctcgttcttatgcagccgtcgcagcatagccggtttgcgctgtacatatagaaagcgcctcactggatctccagcgaggcgctttctcaaaccaacaatcaccgctcgtccatcggcacgaaatcgcgctcgaccggaccggtgtagacctggcgcgggcggccgatcttggtgttcgggtcggccagcatctcacggtactgcgcaatccaaccaggaatgcggcccagtgcgaacagcgtggtgaacatggccggatcgaagccgatcgcccgataaatcaagcccgtgtagaaatcgacgttcggatacaggttgcgcgatacgaaatactcgtcgttcaacgcaatatcctcaagctcggtggccacatcgaacaacgcacgctcgtcggacggcagtttctgcgtatcctcgcgctccatgatcttctcaagatacttcttggcaatcgccgcacgcggatcatatgacttatacacacggtgaccaaggccggagatcttctggccattctccttggcatccgtcacgaactcggccacagacttgccggaatcacgaatcgccttcagctggcgcagtacggcctcattcgcgccaccgtgtaacggtccggacagggcattgacgccagcggccaccgccgaatacaggttagcgtgggcggaaccggcgatacgcaccaccgaggtcgagcagttctgctcgtgatcggcatgaataatcagcaaacgacccaaagcatgcacatacaacgggtcagattcgaacggctcgtacggcacagcgaagcacatgcgcaggaagtcgtccacatagccacgcgcgtaatcggggtacagcatcggctcatcgcgacgacggcggaagatgtacgacacaatcgtgcgggccttggccatgatgatcttggcggcctcatcgagctggtcggtgtcggagatatcggtggtgtccggatagaacgtggccagcgcattgatggcggaggcaagcacgctcatcggatgagcggagcgcgggaacgaacccatgaaggtacggaagtcttcgccaaccatcgtcttgtggttgatgtccgcgcagaactgctcatactcagccctgctcggcagctcgccgtggcgcagcagccacgccacttccagaaaatcggagttctcgcacaactgctcgatggggtagccacggtagcgcaggatcgaatgcttgccgtcgatgtaggtgattttcgattcgcactgtgcggtggtgaggaatccggggtcgagcgttacccagccgtcattgcgcagcttggaaacgacgatgccatccggccctgcactagccttcaccacgggcaggttgaacttgttcgaatcgacatcaagttgtgccgttgccattcgcgcgccttcctcttcatgaaccacttaccccaaacattaacgttcacgcgttcgcgaacgctagtgttcggtactttatgtcttctgtgttaccgccggcagacaccggtcgatacacgaaagccgaagtgcgctcatgctatcaaagcaaacgcacttcggcttgttacgtctcgaattcacgggaattcgacactttctataggatatttggctatttcatagcaaacgactgtttggccgcgtcacgtatatgctcgacggtcagcccgtacctttccaagcaggcttcagcactgcccgaatgaccgaacacatcttcgactccgaccttgaccaccggcacgcgcagatccgaggcttgttcacctactacctcagacacggcagccccaagacctcctatcacgttgtgttcctcggcagtaacgattgctccggtctctcgtgcagcggcaatcacggcatctcggtcaatcggcttaatggtgtgcatgtcaagcacgcgtgcgctgatgtcttcattctccagcgtcttagcggcctcaagcgcctttcccaccattaatccgcaggcgatgatggttacgtccgaaccatcgcgcagtgtcgccgccttaccaagttcgaatcggtaaccgggtatatctcgtgtaacggtaggtaccggagagcgacccaaacgcaggtagcatggtccctcatatgtcgccatcgcgaaagtggcatgtcgagcctcttcagcatcggccggcacaatcacggtcatgccgggaatcgtacgcatcagggagatgtcttcgatgcactggtgcgtcgcgccatcttcaccaaccgaaagtccggcatgggtgccgaccactttgacgtttaaatgggggtagcacaccgagttacgaacctgatcataggctcgaccggcagagaacatcgcaaaagaattgacgaacacagtcttgccagtggatgccaagccggcacccacacccaccatattggattcggcgatgccaccattgaagaaacgctcagggaactgctgtgcaaaatagcaagtcatcgtgcaggtagtcaaatcggcgtcaactaccaccacatcaggattgttctttcccaattcacacagtgcgtgcccataggacacacgggtagatactgggttcgtgtttggctggctcatcagtttgctcccttcgatacggcggtcttgtatgcaacagattgcttcagaccttccagatggctgatgcgcgcgtcaatctgagcaaaggcagaggcgaattcctcgtcgttcggtgtgccgccgtgccacttgggattattttccataaagtccacaccgcggcccttgaccgtgttagcaatgattgcggtgggcacggtgcgtacgccagcagctgcatcaatggccgcagcaatctcaccaacgtcatgaccatcaatttcgatggcattccagccaaaggcgcggaacttgtccaccgtcttggaggggccaccgatacggtcggtgaagccatcaagctggatgcgattgttatccacaaaagccgtcaagttacttacgccgtagtgtgcggccatttgtacggcttcccaaatctggccttcttgaatttcaccgtcgccgcagatagcgtatacgcggtagtcgaggccatcgatacgggctgcgagcgccatgccgagtgccgcggataatccttggccaagggaaccagcggacatatctacaccgggcactttcgtcatttcaacatgacccgacaagtaggaatcgatgttgcggaaggtggagagatcctcaactgggaagaaaccacgcatggccagtatcgagtacatggccggagtgcaatgtcccttagacagaacgcaacggtcacgatttgcatcatgcggattagcgggatcaacgcgcattttgtcgaaatacaggaccgtaaggatatccatgacggacagcgagccgcccagatggccggaacgtactgcctgaaccatgccgagggcactgcggcggcccttggccgcaacgagttccagctcgattcgtgtgttgtagttcattgttgctctttcatgagaagaaaataaggtgcggaatcggccgtctagttggaaggaaaccagacggccggttacctgtggcatgtctggcatgccgctaattgatcggaggctagaagccggtacgcacattgcccttgttcttgcgcatatcgaagtacacggccacgatgatgatgacgcccttaatcacgtattgccagaaggagttaacgtgcataaggttcaggccattggaaatcatgccaatgatgagcacaccgatgaacacaccagaggtgcgacctacaccgccatacattgaggtaccaccaatgacggcagcggcgatagcatcggtttcataaccaacaccggcagtgggctgaccggaggacatgcgggaggccagcacgacaccggcgaaggaagcaagcagaccggagacggcccacacaaagatcttgacgcgggtgacattgataccggagtacttggctgcggtcgggttgccgccaagtgcgtagatatgacggccgagacgggtcttgttcagtagcaggtacagcaggaagaacagtacaagcatgtagatgaccggcaacggaattgggccaaggtagccattgcccagcgtggtaaaggcctcagaacgcacggtaacgggcttgccaccggcagccagatacgcggcaccacggcaaatactctgcatggccagggtaacgacgaatggatgaatgccggtgtaggcgatgatcacgccgttggccagaccgacaatcacaccaattagagtgccggcaaccagcgccactggaagtggtagaccgaactgagtcatggataatacggccaccacaccggacaatgccaccaaagcgccgcaggtcaaatcaatgccggccagcatgatggatagcatcacgccgatggcgaggattgcgttggtggataccgaacgcatgagattaacaatgtttgcccaagacaggaaattctcggcgaagatgctcaggaacaccagcagcacaacgaagccgatgagaatgcccatattcgccttgatgaccttagcgattgatccgatgacgggagcgtcctccagcttatcgaggacttttgtttgcgttttcatgtttctttccttgtaagtaccgtatttgggtcactgtttgcgccaggctcatcagccgagcgcgtgcttgaggattgcatcctgttcgaattcgtcgcgctgcaagatggcgctgatctcaccacctcgcatgacggccatgcgatcggacatattcatcacctcattgagctcagaggaaatcatgatcacggcaacgccgctggcggccaaggagttgataatcttgtagatttctgccttggcacccacgtcgatgccacgggtgggctcatcgagaatgagaatcttgggatcggtagccagccatttacccagcacaaccttttgctggttgccgccagaaagattaccgaccttggattccagtgaaggcaccttgatgttcagggtcttgaccgcattttcagcgatttctcgctctttacgcccattgacgcgtagcttggagataaattcggataaggatgcgatcgaggagttgaacttgatatcgctgaacagaaacagaccttcagtttttcggtcctcgggcaccaaggcaaggcctttatccatcatctgcaacgggttcgtcttaccttcaatcttctcgtcgaagactgtcacagtgcctttgccgccgacacggaagcccataatggattcgaacaattccgaacggccagagccgatcagaccatagaatcccagcacttcgccgccgcgtacttcaaagctgaccggtttgtaccaaggagcgcatgagtagtcggatacagacaatgcgacggcaccgggcttgttgtaagtacggtaatagtagttctctacatcgcggccgaccatcatacgcaccagctggtcctcatcggtttcagcggtgacaaccgtgtctatgtatgtgccatctcgcataatcatgacgttatcggtcaaatcgaaaatctcactcatcttgtgggaaatgtaaatgatgcccatgccgcgcgctttaagtttgcgtaccacgcggaacaagtcatctacttctttctccgaaagcgacgaagttggctcgtcaagcacgatgaccttggagttcagggatagcgccttcgctatctcaatcatttgctgttgacccatgcttagcgagttgacaagcgtgttcgggttgatgtcaagaccgaccatttccagatactggcgtgactgttcggccatctcgcgctgtgagaccaaaccagccccgttcttgagctcacggccgatgaacacgttctccgccacggtcaggaatggctctagtgccaattcctgatggacgaaggccacgcccttagcctgcgcgtcgagtacgccactcagctgtacatcctcaccatcgatgcgaatgctaccgctgtcaggcttgaaaatgccgccaagcacgttcatcaacgtggactttccggcgccgttctcacccagcaggcctagtacctcacccgaatgcagagtgagatgcacatccgtcagcgccttgacgccggggaaggttttaacgatgtccgtcatatcgatgaagaccttgcccattgcggtcggggcggatgtggcaccggcatcgggggcggtatcgacgcaaggggcgtctactaccatctgatctaccattgcgtaatcctttgcgaaagaaaaaaatgaaaaacgggacggaagtgatgaagctgctccaaggaagaggaaagtggacgtgtttctgtagcttccgtcccgtgtgatggctaaccgcgaccggagaagacatcgcgatcagccgctgacgatgacactatttacgcgtcactgccagccgtctgtgccgtactcgtccacgttatccttggtaatcaagaacgtgtcgaccacgatgttcttttcgatctccttgccatcaatcacgtcaagcgcggctttcgcagccttgtgcccgatttcgtccggagactgtgcgccggtgcccgtcatggtaccgtccttgatggcttgcttaccatcaggagaaccgtcgacaccatagacgagtacatcgctcatctcgggatgagcggctaaggcttgaactgcgcccaatgccatcggatcgttgatgcccagaatcgccttgacgttggggttggactggagaatatcctcagcgagagtcagcgaagtggcgagttcgcccttgccatccagctcttgcacgatgttaaagtagtcaccggccttttctttgaagccttcaaggcgctggatgcatgcctggccagcaggacaattgatgacggcgatttcagaacccttgtcaatctttttcatcatgtcttcagccaccagttcgccggctttggggttatcagaggccacaacggtcttgactaaatctagatcatcgacaggggtatcaatgttgatgaccgggatgttcgcatcggcagcggcctgcaatgcgggctgaacaccggtggtatcatacgggccaagaatgattgcatcgacaccggaggcaatgagatcacccaccatgtcgttcatcttggactggtcggcctgaggatcgacgctttgtacggacacgctcttgccctcaacctcggcgttcacgccatcaagaatggcttgccagaagggattgttcatcgtggaaggcacataaccaatcttgatcttcgcgttcgagtcgcctgaggtggcgacgccagatccatcagaagagtttccgcatccagccaagcccgctacggcgagggcggcaatggagaaaacagctgcggctttatggagaaccttcatcttcactcaccttttcaatttgtgtctcttatctattaccagacgaaatccgaaagtattgccatcttcagaagttcgccaagaacaccgaattaaccagagttacaggcttcctttacgctcatcactgagtggttggaggacatcaccgttgattgatttgttgttcttgaatttagaatacatattcaagggattcttggcaaaccagcgacacgccgaccaaaaccatgaaattgcaacgtcttaacaaaaattcgatgaatttattatcgtaaatttatatcagaaaatcatatccatgaattcagatacgaaaacaatacaaaaccagccagcggtatgaaaccgcaacaagaagccagaacgagtggattcacagtctgaatccaacgacaatgacctcgacctatatcaggctcgctgcggaacccctgccatatacccgaccaccgcttcataggtggtctctcgcgtattcagcgtagctacaacctttccatgcctcatcacacagatgcgatcggaaatcgcaaacacatcagtcaggttatggcacaccgtaatcaacgatttacctgcctcacgcatgctgagcatctggctgagcacctcgccggtttgaatcaccgacaaagagctcgtcggttcgtccaagatcagcacatctgggtcttctaatagtgcttgggcgaatgtcaacgttttgcgttcgccctctgatagaccgcgaaccattcttgtgggagacagtggggagcccagttgtttgagtactccacgagtgtcttccaccatgcgctttttgtctataaacaggcctcgcatacgttcacggcccataaacacattgtcagccacatccatcgccggcgccatagcaggattctgaaagatggtacatacgccagcggcgttggcatccttgacaccagaaaacgaaatttcctcaccgttgcacaatacacaaccatcatcgggatactccaagccgctcagcacacggaccagcgtagatttaccggcaccgttgtctcctacgaccgcaacaatctcccgctcgtagacgtcaatatccacgtcatcaagcgcggtaacagatccgtaggttttgcaaaggcctctgcccccgaacacaaccttgcgcataccacggtaggaatcgatcattgcgatacctgctgcttgtaccaccatcagtttccctcactgttcatctcgtcttctacgactcatcacaatgcatatacggaaagaatcaatcactacccataataatccgattggcggcggaatacatagcccccaatgagaccgcatcgtcgccacactgaccaagaatgatgcgacgatccgaaagcaccgggaacatcaccttgttcaatgcttgactgagcgccaccagaaaaccgtcgcccgcttgtgtcaactcgccacccacaatgaccacgccgggatcgaaagcagtgataaccggctcaatagccagagcaatctgtgtcgccacatcctcaatcagccgcatacacaccaaatcgccgcgcttagcatcagagaccacgtcacgaaggctcatttcaccgcgcgaaggacgcagcagagagataatatgcgcagcagaagccactgtgttcagacagccgcgacgcccacaggtacatacggcaccattaggatcgacctgaatatggccaaattcgccagccaacccatcatggccacggtaaagcctgccattgatgtacagagcaccccccacttcatatccagcgttgacgtaaactacatcctgtctgcgcagccctggatcgtgcacctgagctaggcatgccatcttagcgtcattctcgatgaccgggtgtacccctgtcccacgctcgaagcgatcagcaatctccttgccactccatccgtgcattatttccggtacgcgcacctcactgttcagatcaatgggtgccggcaatgcaatggtaacctgcttgagatccgtgatttcagagcccaccagttcaaccatctctcgcagtagttccagagcgcaaatcaccgtactgtctggctgatgtcggacgggtaacggcatcatcttttcgcacaatacctcaccggagctatcaccaagcacaatgcgcaagtccaaggtgccgatggatacacctgccgcaataccaccctcctgagcaagcgtcacatacagcgcgtgtcgattattacgactaacggatttagtaacgaccttatttttttcggtcagctcgcgcacaatgctggatatggtggcggcggaaaggttcgtagcgtcggcaagttcaatctgggtcataccaccgaaacgctgcaacaccttcaatacttggttgacattggcttgacgcaacgatgataaagaccccgatcgggccgaaccactcatgtcctccacctttcacacccggattaaccccatgaatacgtacgcattagaacaatccggcatcggccccacttcggaacgatacccactgattgtatcccatcattccacacggacccccttgcctcatcatgatagtcgcattacggttacagaaaagaccaggccacatgggaaaagtggcctggccaaacagagataaaccgatcagaggttggtgcgatcggtgaagatgatcgggccgttctcggtgatggcgatggtgtgctcggagtgggcaccgcgcgagccgtcggaggcacgcagggtccagccgtccttcggatcctggaagatctcgtcggtggtcttgaggaaccatggttcgatggcgatgaccaggccttcgcgcagcttgtagccgtggtgggcgcggccgtcgttcggtacgtgcgggtcgccgtgcatgatgtggcccacgccgtgaccgccgaactcgaggttgatcgggtagccgtattcgcgcgcgatgtcgccaatggtgttggagatgtcgccgagacggttgccgggcttggccacgtcgatggcggcggcgagcgcttcctcagtgcacttgatgatgcgcaggtcttcggggtccgggtctttgccgaccacgaagctgacggcggaatcggccacccagccatccacggagatggcgagatcgagggagacgaggtcgccgtccttcaggctgtaatcgtacggcacaccgtgcagcacggcgtcgttgacggaggtgcagatgtagtgggcgaacgggccggtgccgaagtcaggagcgtagtcaacatagcaggattcggcgcccttgcggtccacgatcttcttgtggacgaactcgtcgatttcgagcagattggtgcccaccttggtggtctcctgcagttccttcagaatgccgccgacgaaacggccggccggcttcatttcctcgatttcacgaggggtcttcaattcgatcatgaggttctttctaccttgttgagacttgttctcaactctagcccagcccggggtcaaccgccagagcatcacccgtggtctgcctagggtccgctagtagcctatcaacggccaaggccgagaaaaagcgcccggcagatacataatctgcacgggcgctttggattgattgtccggagattgattgtctggagcgcgagattacttgcgacgcttgccgaaagtgaacgcgcgaatcaccgaagtaatccccatcaccaccatggcacatccgccgaagataatcatgaatacggcggagctcagcgggctcatcagcaccacgaagccggcgataatcgagatgatggcataggcgatggcccagccggagcgcgggatgcgccatgattcgactagagccatcacgccttccataatccaaccgaaaccgaccatcagggtgatgagtaatgccaaggtctgaccggtcataccgtagtttcgtacgactacgacgcctccgaaggtcagcagaatgccgacgaacacgtccagcacacgccagccgcccggcagacccggctccacgagagcgctgacgatgcgcaccacgccggaaatcacgaaatacacgccgagcaacaatgcggccaaagccagcgtcttgttcggcaccaacaacagcgcagcgcccaaggcgatggcagccacgcccaccacgccgtaaatgatgcgaatcttggtcttggccttttccggcagccattcctcgatcaggtggaatggactgaaattgccgacataccagttggtctgctgccagccgggttgactttgatcgccccatgaaccattcggctgcccgtccgcttggctattcgattggccgtccgcctgataccgccgaccgtccggaccccatgctggctggccgttcgggccatagttcggattgtaggcgtacgggccgtagtacgggttctggttcggtccgccttgtggctggccgttctgcgcctgctgattctgagtgtcttgcgctcccggcgcaccttgcggaggatattggccgccatgattgctgtcatacgcgccatactgcggttggccaggtcggcccgccggattcggctggctcggctggctctggttgggctggcccgtctggccattccactgaccctcgtttggattgctcatcgtaactccttaactcaaggtccatattcaggttccacataccatgttaggcaagttacctaatttgaaccatcactacagttaggcaatccgtctagttcactgacagcgcaatacccataacgcaatatctgcatcaccaacgcttctcccccgccgcgattaggcttagggccatgaccaacgaaaccgaaacgctgacgtcgggcatcgacccggcatcgttctcctccgtcatcaagccgaccaatgacctgttccgctacgtgaatggtccatggatcgacacctaccgcctacccgacgatcgttcgcgctacggctccttcgacaagctcgccgaagacgccgaaaaccaagtgcgcgacatcctcgacgccgacgactgcccggccaccaaatcgcaggctctgtatcattcgttcctgaacaccgacgccatcgaggccgccggccttgacccgatccgcgatgagcttgacctcatcgattccgccatcgacaaggccgctctcacgcgcgtgctcggcaccatcaacccagccggcggccccgacctgttcggcttggccgtttacggcgaccccggcgacccggaccgcaatatcgcccaccttgagcaggccggcctttgtctgccggatgaagcctactatcgcgaggatcactacgctcccgtgcgcgaagcgtacgtggcgatggtcgccacccagctggtgaacgccgggtacgcgcccgccgccgagtccaacggtggcgatgaactgccggccaacaccggcgatgacgagagcaacgctcccgccacggttcccagcgaagccgcgcttgatatggcccgccacttccttggcgtggaaacgaaaatcgccgccaaccattgggacaatgtagccacgcgcgattcggtgaagacctacaaccccaccgattacgccgatttggccgccacgctgaagaacttcgatctcggttcctggatcgacgcctggcagaccgcctatgacgccaccgaggccgccaaggctcagccgatcgatttcaagtctgtgttcgcgcgcgtcattgtgcacgagccgagcttcctcactggtcttgatgcgttctgggccgaggccgatctggccgaccttaagctgtgggcccgtgttcacatgattctgggcttcgcctcctccctgtctcgcgacttcgacaccaccaactttgacttctacggcaaggtgctctccggtgccaagaagcagcgcgatcgttggaagcgcgcggtgagcctggtcaacggcgtctgtggtgaagatgtgggccgcgaatacgtgcgcctgcacttccccgaaagctcgaagcgccgcatggaagagctggtcgccaatctgattgacgcctaccgcgtgtccatcaccaattccgattggctgggcgaggataccaaggccaaggctctggagaagatctccaagttcacgccgaagatcggctacaccaaccactggcgcgattattcggcgctgagtgtctccgcggatgcgctacccgccgagaacgccaaggccgcgaacctgtacgagaccggctaccagctggccaaggtcggcaagtcggtcgacaaggacgaatggctgatgaatccgcagacggtgaacgcctactacgagccgagcatgaacgtcatcgtgttcccggccgcgattctgcagcccccgttcttcgacccgaaggccgaggatgcggcgaactacggcggcatcggcgcagtgatcggccacgagatcggccatggcttcgacgatcagggttcgcagtatgacggcgacggcaagctcaacaactggtggaccgacgaggatcgcaagaacttcgaggcccgcaccggcgcattgatcgcccagtacaacagctttgtgccgctgcagctggcagagaagtacgctgacgagtctgataaggcgccgcacgtgaacggcgcgctgaccatcggcgagaacatcggcgatttgggcggcgtgaacatcgcgctcaaggcgtatgcattcgcgctcggcaaggcggcaggtaagcccgacgccgaagaagacggctcccccgccgccatcaaggcactgctcgataccgcccccgaaatggacggattcaccggcctgcagcgcttcttcctgagctacgcctccatctggcgcaccaagaaccgcgacgagctggccgaacagtacctgcagatcgacccgcattctccggccgaattccgcaccaacggcatcgccagcaacgtggacctcttctacgatgcctttggcgtgaccgaaggcgacgccatgtggctcgcgcccaaggaccgtgtgagcatttggtaatccccgttatgtaagagaaaaccgctgtgcttgcctcgattacaggcgaacacagcggtttttcatgatgtatggttggcactcagaattcggattcgccgggatcggaagattcggcgaaaccgtcgacgtaggtttgttgggctgcggactgtggctgattagcgccagcgtccggttgcgacatgacggcatcggccatggacgcagccgctgactcggttgatggcgacggcgattggccggaatcggaggtgaccccaaattcgacggggccagattccgacgaggtcgcatacgggtccatacccacaccggatgcggcaccgcccgcgccatattgcattggcctaacgtacggcgacgatgctcgttgcccgtttccgccatccataccttcggcggcaccgttggcattgccgttaccgttgccaccattgcctccgttaccattaccggcacgctgtggcttgatcagcgacgtggtgccgaaggtcaggtcatgcccaatgttggtggcttcgagaacggttctgctgcgcggttcgccttgctcattggtccactgctcggtgatgagtgaaccgaccacaatgatgcggtcaccgcggcgaaccgaactggcggcgttcacggccaaagcacggaacgctttgacgcccacccatgcggttccgtaatcctcccattgtctggtagtcgggttgagtcgactgcgcgtgctgcccatacggaatgtcagcacgcggaaactctcagttccgcctagtgtcggatcaccggccacaaagccggtgacggtcactgctgcttgttgatttgccatgatcggtcctttcctcggcctgctggcctgttgtttggatgtggaccgccggagcctgtctccggcttcattgccggcttgcacgccccagcggtacctccactgtgaggcatggcatttgaagcgcacaagggcaactggcaaatgtggatactgtgacgcagttgaaattttaagaatgtggataagtttcggttatccacaacaaagcgccattctgcgactgggcagaatggcgcttgatacgattaacgccgaggctgagtaagtgggactcagctgagggcggcgaagcgctcggcgagcgcgtcggcggcttcggcggcgggcacggcgaccttgttttcgccgttgcggtcgcgcagttcgatggtgccgtcgttgacgtaatcgcggccgaccacggcgaccagcggcacgccgatcagctcggcatccttgaacttgacgcccggagacaccttcttgcggtcatcgtaaataacctcaaggcccttggcctcaagctcggcgaccagcttctcggcaccttcaaacgccacggcgtccttaccggtggccaccacgtgcacggcagccggggcaatcacggacggccaagccaagccggcttcgtcgtggtgtgtttcggcgatgcaggccagcacgcgggaaacaccgatgccatagcagcccatccacaccggcacggccttgccgttctggtcgagcaccttcaggtccagtgccttggagtacttgagacccagctggaacacctggccgatttccacaccacgctcgaagctcaacggaccggaaccgtccgggctcatgtcgccgtggcgaacctcaacggcttccaccacgccgtcggccttgaagtcacggccgtacaccaggttgtagtagtcgacctcgttctcatcggcaccagtgaaccaagcggaacccttgaccacgtgcgcgtcgaccaggtagcgaaccgggttcttcacgccagcagcctcggcctgcgggccaagcaccatcggtccgatgtagcctggcaccagttcggggtgctgcttcaggtcttcttcagtggcctcctcaagctcggcgggagcgaactgggcttccagtcgcttcatatccaccgtacggtcgccgggcacgccgacgacaatcacttcacgccacggctcgtcatgctcttcatcctcagggtgcttgacggtaatcaccacgttcttgaggatgtcggaagcctgccattcacggccatcagtacgcgggtggtcggcgttggcacgctcaatcatgttatcgatggtcttggcatccggggtggcttccttggaagcggcgggagtggcggaagcatcgatttccggcagctccggagtgctcagggcctccacattccatgccttgccggaaggtgccagcgcgaaggtatcttcgccgatcggcatcggagccaggaattcctcggatgcggagccgcccatcgggccggacatggcgaacacaggtacgtacttcaggtcgaggcgctggaagatacgctcgtaggcgccgcgctcgtcatagtaggccttgcgcatgccttcttcatcgatggtgaaggagtaggcgtccttcatgatgaattcacgaccacggatcaggccggcacgcggacggaactcgtcgcggtacttggtctggatctggtacagggtgacgggcaggtctttgtaagaggagtacatgtccttgaccagaagggtgaacatctcctcgtgggtgggggccagcaggtaatcggcctcgtggcgatcc

SEQ ID NO: 3394 - DNA, 3252 bp, Unknown
  R151_18m  MAG No. k141_29982
gccccacgcacgacatcctcatacttctcggtcagggccggcagggagacggcgacgcccggcaggttgatgcccttgtgggaggacacaggaccggccacgacgaccttggtgtacacgttgttgccctcgaccttggtgacctcaagacggaccttgccgtcatcgatcaggatcgggtcgcccgggtggcaatcgcccggcaggcccttgaaggtggtggaggtgatgtgctcgtcgccctcgacgtcatcagtggtgatgacgaattcctggccgagctgcagctgaaccttgtcttcgccatcggcgttcttcttgaaccaaccgcagcgaatcttcgggccctgcaaatcaacaagcgcggcaacgttgcgaccagtggcttcgctggccttgcgcacgttgttgtagaccttgaggtgatcctcgggggtgccgtgggagcggttcagacgagcaacgtccataccggcttcaacgagcttcaggaggttgtcgtaatcctcggtggaaggaccgatggtgtctacgatcttggctttacgcatgaatgcctgcctattcttgttcaatttggttcgaggcacgattgccccatttgccgaaacccagtctactagcgcgagccgactcatgacaagttttcttcacggtgtgttgtgagcgctcacattgttgtgttgactaggtttaagggttgtgttctctaacggtttcaggccttttcagcgctttccatgctcttcatcttgatcacggaagccacggatgcgccgccaattgcgaccacaatcacagccagcgacagccatgtgggcacttccggcacccaatggatgccttcgccgccgttgatgaacggcaaggtattgccgtgcagggcctccatgatgagcttgacgccgatgaagcccagcaccacggacaggccggcaggcaggtagacgagcttgtcgagcagagcacccagcaggaagtacagctgctgcaggccgagcagggcgaacacgttggaggtgaacaccaggaacggatccttggtcaggccgaagatcgcgggaatcgagtcgaaggcaaacatgacgtcggtggtgccgatggtcaggaacacgatgagcatcggggtccagtaacgcacgccgttcttggtggtgcgcagcttctcgccgtcgtagtcgtcggtgatcttgatgatcttgcgcagattacggatgatgccgttttcgtgatattcctcgtcttcatcgccgccgagcaccagtttgacggcggtgtagatcaggaaggcgccgaacaggaagaacacccatgtgaagcgggtgatcagggccgcgccgatcagaatgaaaatgccacggaagatcaaagcgatggtgatgccgatggacagcacatacttctgaatctgcttgggcaccgcgaagttcgacatgataatgacgaacacgaacagattgtcgatggacaacgagtattcggtgagccagccggaatagaactcgatggcgggcttggagccggcgaagaaccagatgcatccgccgaagatcagcgccatgaccacgaagaaggcgatatgctgcacgcattccttggtggagggcacatgcggtcggcgcccgatgacgaacaggtcgacgatgaagaacagcgcgagcaccacgaaggtgatgatttcaaatgcgagtggggtttctgccatgattccctacactaacccatgtatgtgacgggtcatcgccccgcctcggtcatctgccggagctccttcttgagatcacggatctcgtcgcgcagacgggccgcaagctcgaactggagttgttcggcggcggtgtgcatctgttcggacagctggcgaatcaggtcggcgaggtcctgcgcgggcaggccggccttcaggatctcctcgtggcgtttgtctgcctcgttgggatcaagtaccggcacgcccaggtgtgtgttgccggccttgcccgcgttgcggtagccaccttcaagcaaggtctgggtgtccacatcctccttggcgagcatgtcgttgacgtcgctgatcttcttgatcaggggcttgggatcgatgccgtgttcctggttgtaggcaatctgcttggcgcggcggcggtcggtctcgtcgatcgcctgcctcatggcctcggtggtctcgtcggcgtacatgatcaccacgccggacacgtttcgcgcggcacggccgatggtctggatgagcgaacgataggagcgcaggaatccttccttgtcggcgtcgaggatcgccaccagcgatacttccggcaaatcgaggccctcacgcagcaggttgatgccgacaatcacatcgatcttgccttcgcgcaacatgcgcagcagttcgacgcggcgcaacgtatccacatcggaatgcaggtattcgaccttgatgccgcgttccagcagatagtcggtcaaatcctcggccatcttcttggtcagggtggtcaccagcgcacgctcgttcctggccacacgggccttgatctcggcgagcagatcgtcgatctgccccttgaccgggcgcacgtcgatcttcgggtccagcaggccggtcggacggatgatctgttcgaccaccccgtcggacaagcccaactcgtagtcgccgggtgtggcggacagatacacggtctggccgacgcgctgcaggaactccggccatttgagcggtcggttatccatcgcggagggcagacggaagccgtgttcgaccagcgtgcgcttgcgggaggcatcgccctcgtacatcgcgccgatctgcggcacggtgacgtgtgattcgtcaatgaccagcaggaagtcatcggggaagaagtcgagcagcgtgtgcggtggggtgccggcggcgcggccgtcgaagtggcgcgaatagttttcgacgcccgagcacacgcccacctgggtgagcatttccagatcgtaggtggtgcgcatgttgaggcgctgcgcttccagctccttgccttgcttacgcagttctgccaggcgttcgtcgagttcctcgcgaatggttttgagcgcgcgttccatgcgttcggggccggccacgtaatgggaggccgggaagatgtggatttcgttttcctcgtcgatctcgtcgccggtcagcgggtgcagcgtggagatgcggtcgatctcgtcgccgaagaattcgatgcgcacggccagttcctcgtagacggggatgatttcgaccgtatcgccgcgcacgcggaa

SEQ ID NO: 3395 - DNA, 13476 bp, Unknown
  R151_18m  MAG No. k141_30019
cggcacgaggaagccaagcatcgaaccatacgtcagcatcatcggaaccacggcgcattacgtatggatagccaaatgccgcggatgtccgaacgccatctggatcaaaacaccggacgacagcatcaaaaccgcgatccgcggatggaacagatacgccaacggcgaatggcgcaaacactaggaggaaacaaaatgagaaaaacaacacgcatcacattcgccatcaccgtcatatgcatggcgctcgccggttgtggcaacgccacagcggacacaccggacgtgatgccagccaccagcgcgcaatgcaccgagacgcacaccgacggtatcggcaaggttggcagaacggtgagatcgcaggaatgcgaaatcaccctcaaggacacgcgaaaactcgactgcgtgcgtctcggcggtggcctgtcctgcgattgggatcatgtcagcggagcggacaaggagccggagagatgagctatcaaatcatcatgggtgaaacgtctcaaacgttcgaagacatcggtgacgcggcggaacgcgccaggagtctttcgctggaatttggcggaagcagcgtgaaggtgtacgacgcggagaccggactggtcgcattcactgcccaaacaaccaggaaggagaaatgatatggccacgaacgtgactgaaaaagacaagacgctgaacgaaatcatcgaatggctcagaaagagcaaagccttgaatcagaaaatccgggacagggtcgacatcaatcctgatgctttcagtcttttcgacggaaaagttatcgcctgtgatgaagcgatttcattttgccgctccaagctcctacaccaaagcgagggtgccgaaataagtaaccgggaagagttgactgagcttgttgcccggaagttgtggcttgaatggaattgtgagcttgagggcattgacaagaccgctgatgattgggcgaagctggacagtggcacagtcttcgacaaggccgaggccgacggatggcggaatgtggcctggcaaatcctcgaaggactccgccgatacaaggtccggaaatacaagaaatggcgcgaagaacgcggcctaggaaaaacaacaaatgagatggcgatcgaccgatgaaagggacttggatgagtatctcagaggatgaagccgaaaaggtgtacccgaccgagtactggaatgacggttcgggctgcaagaaggttttcgctgccaatactgacgatttgcaggaagcctatattcgaggccgcgaagcgccaccgtctgacgttgaggtgaaggccgtggcaaaacgcttgctatggcgaagctgcaagaagtgggatggcatcgaaagcgactgtgtggcgaaggatgaggacgatgcgtgggattacgccggggaaatccgcggctatcaggaagacttcatcgatcgggcgaaggaagtactcgaagtggcgcggaaggcggtgacggaatcatgaaatggatgctcaagaccatcagacagatactcatgatcccagcaatcctctccatctacacggcgctcgccatcctggaacaccacgagaagaaagcaggcaggaaatgaaagtggagaaaaccctcatggacatgatcgtcaaatggcatcaggccggatacagcctcgacgaaatcacgccactggttctacaagtacccaaagaggaaatcaaagcgatcatccaacacacccgcgaataacaagaaacccgaccttccggccgggctcctgacaccaccagaagactaccacgccggagggaatcgaacaaatgaacgaacaaaacaacgaatcccaaccaacaccaaaccagacacaaccagcacaaaccaaccaaaacaagccagcgctcgccggcatgtgccaagtgtgcggctgggagtgtaatctgcgcaatacgctgtgtgacaagtgcgaggccgtaatgagaggatggctccgcgactatccgtcacggatccaagccctacgtgagttcctggacagcaccgcacattacggtggccatcagcccggccggaccaatttggcttcggctccgacgccggtcaggttgtctgtgatcgaccatctgcaggagatcgatgatctggctgtcgctctttggcggcggttgtatgctccgccggccatgccatgggccgatagcaggattcatccgtctgtgttgaaatgtctgagtatctgcgcggattgcaatcgtctttcacgattgccggacattggtctgatttggcgtgactgggagcgggtggtgcgcaagacgatgagcatcatcgacgtgccaccatccaggcacggcatcggcaggtgcctgaatcctctgtgcggcgtggagctgagtgcggaagtcggcgcggtaagcgttgactgtccggtgtgcggcaacacttaccgcgtggttgacgtgcgattggggttcctgcgggagtgcatcgaatcaggcagggcgttcacggcgggggagtgcgcggagctgctgcgcgaatgcgggttccagtgcaatgcgaacacgattcgctcgtggcgtaagcgtggcaggcttcagccggccggtgagaacgagaaggggcggccattgtacaggctttcggacgtgcatcggcaggtgctgcggcgcgattcgatttgacaaaatcgaaagtgcaacgcagaattgtcagtggattagagggttcaaaccgaggtgacttggtttgaacccttttcatatccaccttggattctcctaactccttgggctacgtaacaccgtcctgtccgaacggcacatcggacacgctccgcccactcacgtcagagtgggcatacaccaacagcggcagacaggccaatcccgccgtttacgtgctgatggggggttgatgtacaaggtatgctccacctccggttgcccacacttggtctcctccggctcactgtgcgacgaatgcaggaaagccaaagacaagcgccggacacgaggccgcaatccatacacgtcgaaagctcatcgcctcgcacgcgcccgcgtgctggcaagggacccgcggtgcgtctgtcccggcgacgggccggacggatgcggaagacaccatggcctatgcggtgcccccagcaccatagccgaccattggccgatcgaacgcatcgagctcgtcgaagcaggcctggaccccaacgacccgcaacgcatgcgcggcctgtgcaagcgctgccacgacagcaagaccgcgaggacgaaaccttcgggcttcaacaacagacaaaacctcagctgacgcacacaggcttcggcgccaaagcaaaacattccatcgaagccaagccgacgacgccagccgctcacgtcgaatgacacgaaagacgaaagcgaccaagtcttttcgattcgattcgcgactcatcgcagcagcaagcgagtcaaacaaaaaaccgttgcaaaacaaacggaagcaaaccgtcaaaacacccacggggataccccctaaaagtttgggtagtagaaccgccggagagctgtctccgaggtgcggagagttcaaaagtttcagagggggcgggcgaaaggccctgcgtcccacagcgaaggaacggcgcaaggccgtccgacgatggaggagccatgccaagaggaggaaaacgcgtcaggtctggcccgatgccagatccgtcgagcggtgccagcgaacgcaggggatacaccctgcgcagcctgccgaacaccgaatacaagggccgtccgccgaagttcccgcttccgccgtatgtgctccgctatttcgacaaggactcgcaggaatgggtcgaggacagggccggttcggaatcgtggaacgagcgtgagtccgagctgtggaggcagttgtggcgtctgccgcaggcgcgcgcgtggaaacagccacagctgaagtatctgcattaccagatcgcctcgtatgtccgcgaatgcgtggtgtgcgagagtccgtcggccaaggcggctgacgtggccgtgaagatcaggctcgaggatcggatcggcctgtccgaggccggattgcaggcgctcggctggaagatctccgaggacaacgtcgacatggccgcccacgaggtgccggccacggacgcggaggcgtccgagagcggcatggacaccaagatcgtgcagttcccgcgccgtttgagggcgtgacatggccgacgattggatcatcgacttcccgacgctcgcagacctgcaggatgcgtgggttcggcgtcacgtgcgccagccggacggtattctccgcggcaagcccttctgctggtcagattggcagttctggtacgccgcacatcgctggagggtgcgcgagggcgcggaattcatcccgcccgaagaggtcacggtggacaatccactagttctcaaccaagccttccagtatcgtctgaccggctgcatcggcccgcagaagacaggcaaggggccgaccgaagcatcatgcgccatcctcgaagcctgcggtccggtcgtgttcgccgggtgggcgaagcccggcgacgtgtaccgctgctccgacaacggctgcccttgcggatgggtctaccattacaatccgggcgagccgaagggcatgcgccatccatcgccgctgatacagctgaccgcgaactccgaggaccaggtgcgcaacgcctaccgtccattggtcgccatgatcaggcttggtccgctgaaacagctgctcaaggtgcgcgaggggttcattcgtatccttcgccccggaatcaaccttgacgacgatgatctcgatctcgaccgcatcgatgtggtgaccgcctcggcaaccagccgcttgggtaatccgatttcggatgcggaacaggacgaggccggcctgtacaccaaatcgaatggcatgctcgacgtggccgacacccaacgccgcggcgccgcaggtatgggcggcaggacgcacttctggaccaacgcctacgacccgggggaaaacagttacgcccaacagcagttcgaattgggcagtaaggacgtgtggatcttctaccgcaaccccgacctgaaccccgaccttcgacacaaggacggcacaccatacagcttcaacaaccggcgcgaacgccgcaagatcctcgaatgggtctacgccggcagcccgtgggtgcctttggactccgtcgaggcggaggccgaagcgctcatggagaaggatccggctcaggcggaacgcttcttcggcaaccgcatggtgcagggcggcggcgcatggctcgaggacggactttgggagtcttgctatgcaggagcatgagctttggcttgagaacccgccgaagggcaccgaggtgtgtctcggcttcgacggctccgagaacgacgattggacgtgcatcaaggccgaaacacgagagggtttcatcttcacgcccaggtacggtgctgatcgtcgtccgacgatatggaatccgaagtcgtggggcggtcgaatcccgcgcagcgaggtcaacgccgccatcgacgagctcaacgaccgatacaagatcgtgcgcgcctattgcgacccaggtttccgcgacgaggtgtcgtgggaatcgcagatcgaggcgtgggacacgaggtacggtccgaagaaattcattccctgggcgatgagcggttcgagccgcatcaccgccgtatgggaggcgttgaaacgcttcgaatccgacctgcagcatcacgcgatcacgcaggacggatgcccgatcaccatcacgcacatgcgcaacgcgcgcaaattcgccaaatccggcgaacgctacggcttgggcaagccgaagcagacaagaaaaatcgatgcggccgtgacgtgcgtgctcgcccatgaggcggcatgtgacgcacgtgccgccggttggggcagaaaacgcaaggcgtacctgctgacgggttcgacaacaagggggttctgatgattcgtaccgccgatgacgtgaatcacatggcgaatctgctcgccctgaagatcgagaatcgtaggccggacatcaggaagcacacggattatgtgcgcggcaagcgcggaaatctgaaattcgcaagcgatgagttcaagcgctacatggccgaccgtttcagcggtttcgcggacaattggtgtctgccggtggcgcaggcgcccgtcgagcgcatccacttcaagggcttcatcccatatgacgattacgaattggattcgcatgtgatgcgtgtgtgggagcggaatgactgcgaccgcaagctgcaggagagcgcgctgatgatgaccacgaccggacgcgctttcggactggtcacgtcgatgccggatggcagggcgcgcatcagtttcgaacacccggacagcgcggccgtgcactacgatccgctcactggtgaggtcgacgccggactgctggtgcgatacgacgaggagcatgagttcggcacactgctgctgcctgacatggtgttcgacgtggtgcgtgtgcgtgcaggcggggacgatgagcggaaccgtctgccgcccggcgtggagggctggcggttcgtgccggattcggcgcgcgtgaacccgctcggacgtgtgccgttggtcgaattccgcaatcagatgctcctggacgatctgccgatcagcgatgtggagcaggtcgagtcgatgcaggacgccgtcaacgtctgctgggcatacacgctcaacgcattggacttcgcgtccatgccggcgagagtgatcctcggcggtgattcgctgtccgagccggtcttcgacaagacgaccggcgagcaggtcggcgaacgccccgtgaacctcgacaagcaggtcatggagcgcataatgcagatcaccggcgacaacgtgtcgatcggcgaatggaccgcgagcaacctgcaggccttcctgccgatcatccagaaggccgtcgagcacatcgccgccgaaacccgcactcctgggcactatttgttgacgaatgcggaggtgcctgccaccggctacgaggtcgccgaagccggcctcgtgtcgaagacgctggagcgtatcagcttcatgcgccagccggtgcgtgaactgtgtgtgatggccatgatgctcgaggacgatgaggaatccgcacggatcctcgaggattcgaaggtcgtgttcgccacgccgcaataccgcagcgaggcgctgatggccgacgcgatgctcaaatacaagaagctcggctatccattgcagtggatagccgagcagatgggccagagcccggaagacatcaaacgcatcatgcgcatggtggatgacgagagccatgaccctgagatggccgagatagcacgcagcctaaaggtcggaggtgcatctgatgacggtgacgctggagagcctgtcggatagccggaacactttggccagactatgcctgctggccgtgagggcggcggacaaggcatggaagggcgtggatccgctgcgggtacgtgagagctggaatcggacgaacgtcgatttcatcacgctcttcgccgccctgcagacgcgtgcggcgagcgatgcgatggactcgtccacgttgatgctcgccgaacaggacgattacgtgcgtcccgacggcatcgcgaacccgatggcctttggcaccggattcgcgccaagcggcatcgacctcgaatcatatttcagtatccccgtcacgcgcaccctgcaggccatcaagtcgggcgtgggcgaatcggacgccatgcagatcggacgcgcgacgctccgccagatgagcactcaggccttggaagacacgtccgtcagtgcgatgggcgtcagcatcacccaaagagctggcatcggctacgtgcgcgtcgaatcgcccgactgctgcccacgatgcgccatactcgccggcaaatacttccggcatagccagaacttcctgcggcatccgaaatgccatgggacgaccataccatgcaaaggcagggacaaggccgagaagcaaggctggatcactgatccgatggaccgcttcaaccgcatgagcgaggcggagcaggacgagctcttcggccacgccgacgcgcaggccatcagagacggcgccgacatctaccaggtcgtcaacgcacaccgaggcatgcggccggtcggacgcggcaacatcagtatgaccacgtccgaaggcaccagccgatacgggtggagccgcatgatccgaaaatacgaatatggccagaagcaacggcgcaggctcacgccggaaggcatctacagcttcaacctcccgcgcgagcagaccatcgagctgctgaaacgcgagggatacatcctgccggacaaatggcgagagcgggtgccggagcttcgccgcagccaatggcttcataacaacgactaccgccaagggcggcatgaggagctgaccgcggcgcagaagcgtctgctcaatgcgcggctccgctatgaggcagctttggacggtcgcaatccctaccagtctggcaagccggtcacgccggacgtattagccaaagctgagaactcgtatcgccgctggcttgccagcaacggcgaaaaatacaccgaatgaaaggaaacatcatgtcagatggacagcagcaggatccgaacaccaatgctccgggcgcacaggagccgccaatcgactggcacgacaagttcctcggccagaagaaggtcaacaccgacctcgaagcgaagctcaaggccgcctatgagaaggccgaccgagtggacgaccttgagaagcaggtggccgactgggagaagcgcggcacggaattcgactccgcgcaggctaccatcgccggactgcagaagcaggtgctccaggcgaacgtcacagccgcggcgaccggcaagctcatcaaccccggagacgcattgaagctcatcgacttctccgacctgaccgcggacgatcagggaggatacgaccagcaggcgatcggcgacaagatcgatgccttggtcgcggcacatccgtatctcgcgcaaggcgggaacaatgctggcctggcgggaatcatcccaccgtcgggcgtccgcgatggcgatcatcaggcgggacagcttaccagggacgatctgaagaacatgaccccgaagcagatcgatgaggcgcgccgcaagggccgtctggatgatctgctcgcaggccgcagtaagtaaggaggccagcaatggcaatcaccaatttcatccccgaggtatggtccgccgccatcctcgaagccctgcgcgcgaagctcgtcttcccgagcctgtgcaaccgcgattacgagggcgacatccgtgaggccggtgacaccgtgcacatcaccggatacaacgacgtgacggtacacgagtacgtgcgcggccaagcgattaccgtcgatgatgccacggataaggaagccgccgtgctcaagatcgaccagtccgactatttcgctttcaaggtcaacgacctcgacaaggctcaggccaaggccgatctgaccggaaagttcaccaattccgccgcctacaacatgatgaagaacgtggaaacctatatcgccaatctcatggacgcggccgtcggcactccggcgaagaccgtggccgtcggcacccccgccgacgcgtatctcgccgtcgtggaagccggacgcaagctcgatgtgcagaacgtgcccgacgagggacgctggctcgtcgtcagccccgacttctacgcgctcctgctgcaggactcccgcttcatcgaaggcacagaagcgggccataatactctgctcaacggcgtggtcggacaggtgcgcggcttcaccgtagtgaagtccaacaatgtgccgcgcaagtccgccagtccggacacccagtccattctcgccggcacgaacgcggccgtgaccttcgcgcagcaggtcagcaacgtcgaggctatgcgcatgcagaccgacttcgccgacatggtgcgcggcctcgacctgtacggcgccaaggtcatccgtccagagtgcctgaccaagatcacactgaacctctccacctccaccggtcgttccatgcaggatgcgacggcctccgtcgtgagcgatactaccgaaaacagcgatggtgaagaggctgctgcaggcaagaagagtggcaagtagtcgagtccgatgattggaggctgaaatgaccgcactggccaccctggacgacctgaagcgtaacggcatcgaagtgaccgacgagcagacggcatccagtctgctcgactcggtctccgaagccgtccgctcggccgtcgggtgtccgatcacgctcggcgaatggacagtggacctgccaggcgaacaatccaggaaactcgacctgccatgccgagcggtgcgcgacgtgtccaaggtactcgtggacgggcagtccatcgatgattggaaactcttcggctcctctctctatcgggaggagccatggagcaccttcggcggcataccgtcgaccgtgacggtcaccttccgcggcggctgggatccgataccggccgacatcgtcagactggtctgctcgtatgtcgccgccggattacatcagctcgcggatggtggccccggcgcccactccggcatcgcctacgagaggcttgatgacgcgcaggtcggatatacgcatgatggcacccagatcgacgcgaccgaattgccggaagcgaccagacgcagcctgcgcaaccgcttcggtgcgaacgtcagttcgattggagtgttccgatgagaatcagcgcatcctttctcgcaaaggccagagccaacgcggaatgcctgatgaccgaccgatgcaccgtcacgcgcccgggcgaatccgtgacggatccggacaccggactgccgacaacaggcaccgaacatgtgtacgaaggcagctgcaaggtgcagacgtccggcgatgccgccagcgaacagaccgagggaagcgccgcccagaacatgggcgccgtcagcctcgtctggtcgctgtacatgcatttcccgttcgataccgatggcctgcgcgccggagacgtcgcggagatcaccgaatccgctaacccgctgctcaaaggcagacggctccgtctcgtctccccgcaatcggagaagacgcacgccacagcctgccgctggaacgcgaaggaggactcatgagtggactgttcgacgcatccgagctgatggccttcggagacgcgttgctcgccaagggcgtggctcgccgtgctttgatctccgcttcggtgaagaagggcgcgcagaacgtcaagaactcgattcgagatgatctgaagggctccggcaacaaggcattccgcagcattccgatcacctacaccgtttcggagggtgctgggcgtatcaccgccgagatcggccccaccaagggcggagcgggttcgctcgccaacatcgcgttcttcggaacggcgagaggcggtggaacgcaccggttctacgagcatggcgaggaagaattgccgaagctcgcggaatacgtggcgcgtgccgccgtggaggtggtctgaatgaagtcgatcatgacgttgaccgacacgattctcgaccatatcccgaagccggcgactggctgggccgtgtaccggcagaccacgccgaccccgacggagaagccgccgtgggtgatcgaaacggtcaccacggacgggcacatcgtcggtgagacgcaacacgttcattgcggcatcggcacactgctggtgcgcatcgtgagcaccaccaccgattccgtcaacgtgctggccgatgacctcatgattccaggacttgctggcaaacggttcgtcgcgcagggcttcgacaccggctgtctgacgctgttttccgattccggcgcctatgcggccggacttaccgcagaggatacggcgctgctttaccagtgtcgtcttctgactttcaaattcaactggtcacgcatgtgaccatcaaatattaaggaggagtcatggctttgactctgggaaccgaagttccttccacaccggcggacggcctggtcaacacgatctgggtgccgtccatcaaaaacatccagaatccgaccgcgtccgagatcaacgcgggcaccgacctgtccaactacgtcaccctaggcgggtggagctgcactccgtcgcaggattccatctccgaccaacgcgagaacagctcgcaggattacgagcatcccggacgcaagaagatcagtggcccaagcatcgaggtcatcgacaacaccaacacttcacattccacgcagaacgcggccatggagacgcttaccgagggcgcggaaggctacttcgtgcgccgctatggcaagcagacggatacgacttttgcctccggagatacggtgaacgtgtacgcggcccgcatcggcatgagcgcaaagatggcgatcaccgcgaacagcgtcctgcgcagcaagatcaatttctccgtccaagcccccggctgggcggagaacgtgaaggtcgcctgattgattcctcccgcaccggactttcgtccctttcgccggtgcgggaacctcttttctcttttccggcaaaggaacatgaatattaaagcgaaggaacaacaatgcttaaagtcaccaggcgcacgcgcgaggtcgacatcatcctcaaccaacagatcgctgaggacatcgccagattgggtgatgcgctggccgaggagaccacgcgcgaacaaatcacggaggctggaacgaaccgaaaggctaaggccaccgcgcggcgcatcgaagagttacgcgaacaggcggatgcggagacattgaagctcacgttgcgggcattgccggtaagcaagtgggcgcaggcattggccgcgcaccgcaatgacaacggcacgaacgacatgttcggcaccgccgccgcggcattgccgctcatgcttgattccgcgaccatcggcggcaaaccggtggccgacgaggacaagaccgaacaggcgtggcgcaatctgttcgacgaactcaccgatggccagttcacgccgatctggcaggccatcgcggaactgaacggcaccgcagcggacccaaaagcggcattcgacctcgcctcgcaggttctccacagctagtcgaggatttgaagatctgccgccagctcggcatcagctataagcgtttcatgggctggcggccgagcaggggcgatgaggtcgaatgggatgagacggaacgcaattggatgcgctcgttggcggaatacgaacggtcattatgccccatgtgcggtttgcctcgcacgatctgccaagacccgaagggcgaactgacactgcatgccgaaaccagcgtctgctgggccactgcgcacatgcagcaagccatgaaacggtggactgacgcgaatggcagggacaatccggccgcgaacgccttggtggcgcatttgacctgacattttggaggatgctttggcggagaacaagaacatcgtcatccggttgatggccgacacagcctcctatgaggcggcga

SEQ ID NO: 3396 - DNA, 12728 bp, Unknown
  R151_18m  MAG No. k141_30751
agcccggcgaatatgagatgaacggcgtgctgcaccgcccggacggctcccacagccacgacggcggccgcacctggcacacccactgatagccccatgaacatcaacgaaaccgaatcgcgacgtctggccatgctgcaggtgtgcgacagcgtcttccccgtgggcgcgttcgcgctgtccaacggcatggagaccttcgtacagcgcgacttcttgcgccgtggcgccgatttcgaggagtatatgaagaactacctcgaagtcgcaccgtacaaggaaatcgggcagatggtgctggccggcaagtacgccaccgattcgcgagtctcccgcaaagggctggccgagcgactcatcgaacttgacgagctggcctcggccctgcaatccgcacgtgaaatccgtgaaggcagcgagcgcatgtgtacccgcctggtcaagctggccgagcagatggatgccggccaggcgcagacctcggatgggcatcgtgggttcgccaagccaagtcctgccggcaatgccaccgcatccgctgcggattcgcgcgaaaacagcatcatcgccgtgcacgagcatcacaccgaacgccaccagctgcacgatgccgccgacggcctgtacggctcgccgtcgctcgacctgtatgccgggctgattcgcgagcgccgctgccgtggcctgcattcgatcgcgatgggcctgtacgcggctgaccatgcgaacgacgtgcgcgacgcggccatcatgtatggatattcgctgttgagcgcgcttaccatgtgcgccgcaaaggcgattccgctcagccagtacgctggccaagtcgccctgcatgattcgttcccgcgcctcgtgcgcgcggtgaatatcgcgatgacgttgaagcccgaggatctcggcatctccggagcttacctcgacatcgccgccatgcagcatgaaatcttgtactcgaggctctacatgagctaattatcctggctcccctcaaggaggggagccaggataacctcacccgcaaaccacatacctaactaattcccacataaaggagaaaccccatgtcatacgtacgcatcggcgtcgccggaccggtcggttccggcaaaaccgcgcttatcgaacgcctgacccgcaagatggctgacgaatacagcatctgcgtggtcaccaacgatatctacaccaaggaagacgccgagttccttatcgagcactcacgcctcgcgccggaccgtatcgtcggtgtggagaccggtggctgcccccacaccgccatccgcgaggactgctcgatgaacctcgaggcctgtgaggaaatggcccgcacccacccggacgtgcagatcatgttcgtggagtccggcggcgacaatctgtccgccacgttcagcccggacctggccgacgccacaatctacgtcatcgccaccgatgagggcgacaagatcccacgcaagggcggccccggcgtcacccgctccgacctgctggtgatcaacaaggccgacctggccccgttggttcacgccgatctagacgtgatggcccgcgactccaagaagatgcgcggcgaccgcccgttcatcttcaccgacctgatgggcggtgccggagtggacgacgtcatcgcatggatcaagaagagcgtgctgttcgaggacatgtgatgttttggcccgcccgtatccaaaaacggacgggccgaaacataccgttgcaccaagtgcggcataattgcccatgtcatcgtcaggcaccaatcataagaaggcagcgattcgtccatgggcagtagcacttttcgtctatccactgcattccgccacggacgtaccaaaatcgacgatatttatttcgaggcgccgttcaaactgatgaccccgttcaccaacggacgtcattcggatttcgtcgtgatgctcgcctcccctggcttcctgaggggcgatgaagcccatatcgatatcgacttcggcccaggcaccgattcgaccatcaaaacgcaaagctacgagaaggtgttcgacaccgcggacggctcggccgaacgcaccatcgaactcagggcgcgtggcaatgccaaagccgtgttcctgccgttcccagtgattccgttcaagaacagctcattcatgaacctgaccaccgcgcatatttccgccgagtcagcattcgtgtatgcggatgtggcgacatgtggccgcgttgggatggatgagcgttgggccatgaaacgttttacgaatcgtatgcgcgtatatgtggccgaacccgaagccgtgaccaaggccgccgcagccgaattggcgcaacagcacgcacatcgccgaggccggccttccaaggcggaagccgccgctgcccgaccgcgcgaacatctggcctttgctgaccgcatgctgttggaacctgatgcttttgactacaccgaactcggcatgtggcgcgaattcacccactgcggcgttctctacgctcacctgcccgaactcgaccctagcgacgctgtacaagatgccgcaactaaagaagcatcctccgccgccatccgcgagcgcatcgagactgcccgcatcgccgccgaagacgcgctcatcactcgcatccatgaacacgcagacgccatcggcttcaccggcgagctcggcgtgagccgcgtaatcaatggcatctgcttgcgtgtactgaccacccgaggcgacgacgccttcgacctcattcgagatgtggccgatttcgtgaccgatttcgtggccgaaggctaaaaccaagtggctctcccctttgaggagagccaccagttctctcagaacaggaagtaccgctgggtaagcggcaactcgtacgccgggtcagagtggaccggttcgccgtccaccgtcacttggaaggtttcgggattgacctgaatgtcggcgagcacgtcgttgaacttcagatccttcttgcctaccgtgcggcagccatgcactggtaacacctggcgctgcagctccagcttgcccttgatatcgtcatccacggcggcctgcgaaacaaacgtggcgcaggacttgccaagcgcacggccgagcgcgccgaacatatcgcggtagtagacaggttccggggtcgggatagaagcattcgcgtcacccatacgagagtaggcgatggagccacccttgatgaccatttccggcttcgcgccgaacatggacggctgccaaagcacgagatccgccatcttaccgacttcgatggagcccacgtattcggaaatgccgtgggtgatggccgggttgatggtgaacttggagacgtagcgcttgacacggaagttgtcgttgcggttgttgtcgtgttcgtcttcggggagcggaccgcgctgcttcttcattttgtcggcggtctggatggtgcgggtgatgacctcgcccacgcggcccatggcctgcgagtcggagctcatcatggagatgatgcccatgtcgtgtagcacgtcttcggcaccgatggtctcggggcggatgcgcgagtcggcgaaagagatgtcttcgggcacattgcggtcgaggtggtggcagaccatcatcatgtcgagatgctcgtcgatggtgttgcgcgtgaacggcatggtcgggttcgtggaactcggcagcacgtttgggaagccagcggcacgaatgatgtccggagcgtggccgcctccagcgccttcggtgtggtaggtgtggatggtgcggcccttgaacgcggcgatggtgtcttccacacaaccgccttcgttcagagtatcggtgtggatagccacctgcgtgtcggtttcgtcggccacgccgagtgcagtgtcgatgacggccggggtggcaccccagtcctcgtggatcttcaggcctgcggcaccggcgcgaatctgctcacgcaatggttcggggctggagtcgttgcccttgccaaggtaggcgatgttgatgggcagcgcttcggcggcctcgatcatgcgggtcaggtggaaggctcccgggttgcaggtggtggcgttggtgccgtcggccggaccggtgccgccgccgaccatcgtggtcacgccaccggcgagggcagtgcgaatctgctgcggggagatgaagtggatgtgggtgtcgagtccgcctgcggtgacgatgaggccttcgccggcgagagcttcagtgccggagcccgcttcgagaccgggggtgataccgctcatggtctgcgggctgccggccttgccgatggcgctgattttgccgtctttgatgccgatgtccgccttgtagatgccggtgtagtccacgatgagggcgttggtgatgatggtatccggcgattcaacgtcgagctgcacggagctttggcccatgccgtcgcggaatgatttgcctccaccgaacttcagttcatcaccgtagtgcgtgtagtccttttccacctcgatgatgaggttcgtgtcaccgagtcgcacgcggtctcccgtggtcggcccgaacattcccgcataatccttgcgcgtaataatcttcatgtcaaaagtccttgctgtttttcagctccccttgtcaggggagctggctcgcgaagcgagactgagaggtagtccgctccccgctggcgggagctgtcagcgaagctgactgagggtggcccttagctcagattcccgagaatccaagctcatgcgccttcttaaacgcggcctcccgcacctcagggtcatccaacttcccctcaaccagtgcgctgaagccgtgaatctcacgcgtgccaccaatatcaatcaaccgcactcgatgcgtttcacccggctcgaacctcacagccgtaccagccgcgatatccaaccgcttgccatacgccgccttacggtcgaacttcaggtacttattaacttcaaagaagtggaagtgcgaaccaatctgaatcggtcgatccgcagtgttcaccacgtccagctcgatgtcttcggaaccttcattgagttccaaatcatcgtcagccagcagatattcccccggcaccaacttctcggtggattcgatggggttatgaatagagacgagcttggtgccgtccgggaacgtggcctcgacctccaccacttccagcatctcggccacgccatccatcacatcttcaggcttgagcagcgtgcgaccgtatgccatgagctccgccacagtgcttccctcacgcgcccgctcaacgcattcggcggaaatcaacgcaatcgcctccacatagttgagcttcacgcctctggctttgcggtctttggcaagctgccccgccaagtacagcatcaacttgtcagtctctcgtggtgtaagtctcataacatcctctgttgttgactggagtttttcaggcacaccaatgtgagccctaacatcgcccaataataagagcgttataagaacgggacgtttctcataacgctctatggccataaacgggggtcgaattaatcacactctcatggattccttggcggcttctacttggtcggggccgccttcgccggtggcgatgaaacggccggaggccaggacgtagtagcggtcggcgcgctcgacggcgaattggaccttctgctcaaccaagaccacaccgatacccttgtcttcggccatcatgcgaatggccttctggatttcggcgacgatattgggctggatgccttcggtcggctcatcgagaatcatgagcttggggcgggtgatcagcgcgcgggcaatcgaaagctgctgacgctggccaccggacagcagaccggcacgtcggccagcaaattccttcaagaccgggaacatttccacggcttcgtcgtaacgggccttggcctctgaaccgtagcggtcggcgaccacgtgcaggttttcgtccacggtcatggtgccaaaggactgctggccctgcggcacgaacgccatgcccttgcggatgcgttggttcggtgcagccttggtaatgtccttgccctcgaaactaatcgaaccggacgaaacgggcagcaagcccagaatcgccttcaacagcgtggtcttaccggcaccgttgttgccgacgatgctcacccattcgccggcggccacgtcgaaactgatgtcgttgacgacggtcactttgccgtaaccggtgttcaaatcctttacttcaagcattgccatgattattcactttctacggcgtcgtgcatattgatgttgaggcgcgttgtatcaccctcaatatgcactgaaaaagcgcattccgggatgcgatggttgttgtcagtgcggtccatattgcgcttcttcctcttacctacccccctcagtcaccttcggtgacagctcgtccgcaattaaggacgggccttgcctgcaacctgctggttcgactatcgtctcgccttcggctacaaacagcccactgggctgtttgcttaacgcctcggcctcagggaggggagacagggagttagttttctccgccgcccaggtagatgcggactacttcttcgttgttttggatgtcttcgaccgaaccctcggcaaggatttcgccctggttgagcaccgtgaccgaatcggcgaactgacgcatgaaatccatgtcgtgttccacgatgatgaccgtgcggttcttgctgcatcgcttgagcagctcaccggtctgcacacgctcggccggagtcatgccggccaccggctcgtcgagcagcagcaggtgcgcgtcctgcacgagcagcataccgatttccagccactgtttcttgccgtgcggcaggatgcctgcgggcttgtttgcatccacagtcagattgcacacgtccatcatgtattcgatgttctgcgaaacgccgcccatcggctggaacagctcacgacccttcttgcggaagccctcggccagctgcagattctccaacacggacagctcttcaaccaccgatgcggtctggaaggtacgcccgacgcccagcttgacgatgtcgttcggcttgcggcccaacagctgctcgccacggaattccgcggaaccagtggccggcaccagtccggtaatcgcgtcgatgatggtcgttttaccagcaccgttcgggccgatcaggaatcgcaaatcgccgtgctgcacagtcaaatcaagattcttgacggccacgaatccatcgaactcaacgtgcagtccacgaacttccagataatcgctccactggccgccgcgatcatccagcaccgcaagctgatcgtgcagcttcgtacgctcttcaacgatttcggccttcatctgggccgcttcgtcgcgcatacgcttggcttcgtcgcgcatctcaatcatttcggcgcgcaactgctccaaatcggcctgcgatgcaggtgcgggagccgatggattcgagctcatgttcttctcctcactcatgcgttcaccgcctttgcagtagcagtaccggtaccggcaacggcaccagcaccagcaccagcaccagccgaagctccaaccgaactctttccgagcccgatcttctccttaatccaaggccatacgcccttgaactgtcccaagcccttcggcacaaaggcaatcaccagaatgaagatcaggccttcgatgtacgtccacgcggacggatacgcctcagacagctgcgtttccgcaaagcgcaccagcagcgtgccgaccaccgggccgagcaaagtggcacgtccgccgatcaccacgccggcgagcatcaggatggacggcgtcacgccgatatcggacggcgaaatgatgccgaccactggcacgaacattgcgccaccaatgccggcgaacattgcagccaccgagaaggcgaacaccttgatggaggcggggttatagcccaagaacttcatgcggttctcttggtcgcgcacgccgataatcaggtcgcccataaacgatttgcgaatccagtagacgataagcaccatggccagcgtcaggaacgcgcagatgtagaagatcatctgcttgttggcgttatcagtcaagtcgtaaccaaagaatcccttgaaatcgttgagaccgttggtgccaccggtggttttcgactggccgataagcagcacggcgaacgcggcaaccagcgcctgcgaaagaattgcgaagtaggcgccacgcacgccacggccgaacacagccagaccgaggattgcggcgataatgcccggtaccgcagccacgccaatcacggcgatgaccggattgcggaaaagttcccagaatccaggaaccttggtgatgccgtactgggacatgaagtccggcacttggcccacgccaatgtcctcaagcttcatgtggatagccatcacgtacgcgccgagaccaaagaacaggccttggcccagcgtcagcataccgccttggccccaagccaggccgatgccgaccgcgaccatcgcgtagcacaggtatttggacagcaggccgaggttgtacacgctcagcacagtcggagaaaggaagatcagcgccacggcaatggccacaccgatcaaagccttatatttcgtggcgtattcgctcaaagtcatcttcattgtcgtttccttacccttctgaagcactcacgcgaggttcctggagcggatggagaccaagccctgcggcctgaactgcaggaacaccaccacaatcaggaacacggcaacctgaccaatcgaggcagaggtcggcagttcgatggacgactggcacaagcccagcacgaacgaggcgataaccgcgcccttgagctggccaacgccgccggccacaacaaccaggaaggcctgcacgatgaaggtcgtaccgaagttgaagctaatcgagttcagcaggctcagcgccacgccagcgataccggcgatgccggagcccaggaagaacgtcacatggtcgaccatcttggtggagataccggaaacctcagcgaggtcgcggttctcggaagtggcgcgaatctggcgacccagcggcgtgagcttcaggatcgcgtacagcgcagccacgcagataatcgacagaataaagatgaacagtcggcctgcagagaagctgtagccaaagatggtcaccggattggtcagcgcttcaggagccgaagcgtagaccggagtggcaccgaaaatatcgcgtgcgagctgctgcaataccagcgatacaccgaaggtaaccagcagcgtatcaagcggacgattgcgcatacgctccagcagcaacacgtccagcagtaaaccaagcaaaccggctactacgaaaccgaccaccagcgccacggccagggacactgttttattgccgatgaccatgctcatgacgtatgcggtgtatgcgccggccatcatgaattcgccgtgggcgttgttgataacgcccatctggccgaaggtcaacgacaacccgagggctgcgagcagcagaatcgatccgttggacagacctgccacaatttgtggaaataacatacccatgttgttgtgtcctcttctctcagttgctctcgacgctggcgctcaggctcttggcccagctgtaggtcttcaggtacgggtccggcttgatgggaccgtccgacttccagacggtgtggatgagcttgtctgagccgatcttgccgatgtatgaggtcttgtagatgtggtggttttcgccgtccaccttgaccttgccttccggtgcattgaaggtgacaccgtctgctgcagccttgaccttgtccacatcgaacgacttggccttctcgaccatgcccttccacaggtacacagatgtgtacgccgattccatcgggtcggaggtggggcgattggctccgtagcgcgccttgaagttcttcacgaacgtcttgttttgcgcattgttcagcgtctggtagtagttccaagcagtgagctggtccttgacgttgtcaacgccgatagcggaaacctcttcctcggcgatagacatggaaatcaccggcgtggtggcggctttcagaccggaagccttgtattccttgaagaatgcgacgttggaatcaccgttcagcgtgttcaccaccgcatccgcgccggagaacttgagcttgttgacgatggtggtgaagtcggtggagcccattggggtatattcctcgccgaccacttccatgccattgccctcggcgtatgccttgaccacgcgatttgcggtctgcgggaacacataatcggagccaaccaagaacagcttcttgtagccttgctccttaaggtaatcaagcgcaggcacaatctgctggttcggtgcagcacccgagtagaagatgttcgggctggcttccatgccctcgtattgcagcgggtagaacagcagcgcgttatccgcctcgaacacaggcagcatggccttacgcgaagaggacgtccagccgccgaacaccgcggccacgcattccttttcgatgagggtcttggctttttcggcgaacacagccggctcggacttgccgtcctgctgcactaccttgagctgcttgcccagcacgccgccctttgcgttaatctcatcaacggccatgtgcagcgaatcactcaccgtctgttcggaaatggccatcgtgccagacagcgaattcacgaaaccgattttgatggtgttgcctgaggtgtccacacatgatgaggtgtcgcttgccgcagtcgcgttgttctcttgggcctctttctcggccacggtgcgaccccagccacaaccgctggtggcaagcactgcggcaacaatgcacaccgcagcacccatcttcagtctttgcaatcgagtcatatggctcttcctccccacatacgactacattccgcgaacgttgcccgcccgcggaatgtctacgctgattgccgtaccgtgccctgatgcctgatatcgtgctgaaccacttgccggatatcgacggctggcttccggccgactgcactatacgatggcagtgcctgcgtgaatttccgttgcctgaatatttcatatgcgtctcatacataacgctcacgttacaaaatcaacggtgttacgcggcccgccgtcgaacgctgtttacattggtgtgcgatacgcgcgcgactgccgcccaagtgacttccccgcgaactacgggtaggctggggagtatggaacttcacgttttgaatcatccgctggtcgagcacaagctcaccgtgctgcgcgacaagaacactccttcctccactttccgcgagctcgtctcggagcttgtgatgctcgaggcctatgaggccacccgcaacctgtccgtagttgccgcaccaatcgaaacaccggtcgctccgatgaccggtaagaagctggccaaaccgcgtccgatcattgtgccggtgctgcgtgcaggtctgggtatgctcgatggcatgacccgtcttatgccgaccgccgaagtcggcttccttggtatgaagcgcgacgaggaacaccccactcagcaggtcacctatgcgaaccgtctaccggaggacctgtccggtcgtcagtgcttcctgatcgacccgatgctcgccaccggtggcacgctggttgctgccacgcattatctggccgagcgcggtgccaaggacgtgaccgcgatcaacatcatcgcggcgcctgaaggcatcaagttcgtggaagagcacatcgatccgtccatcgacttcaaggtcgtagtgtgcgcggtcgacgagaagctcaacgacaagtgctacatcgtgccggggttgggcgatgccggcgaccgtctctatggcgtaattgactgattttcctggctcccctcagagaggggagccaatgtgatgggctttttatgcaaatcgacattattgcgccgggacgcgtgaaggaacgatatcttcgcgacgccatcgacgagtattccaagcgactttcgcgctactgcaggctcaacatcattgaagtggcagatgagaaaacgcctgaccacgcctccgaaggcgttgaccgacagatcaaggccaaagaaggcgaacgcatcgccaagcatctgaaggacggcgcgtttgttattgcccttgccatcaatggcaagcagctgtccagcgaagaattggccgccaaaatcaacgaccttggattgcgtggcaccagccatattcagctggtcatcggcggctcaatcggccttgacgacgcgattctgcgtcgtgctgattttctgctgagtttctcgaagatgacgttcccgcatcagctcatgcgcgtgattctgctggagcagatttatcgcgcttataagatcaacgctggcgagccatatcacaagtaaaacgccatacctcatggggcggtaattgccccatggggcggtaaaaccctcatggggcggtatgccaaaatggcttaattccgcggtttcacatattcttcaaaccgccccatgggcaagttaccgcccgatgagcctgtaaccgccccatgggcacatcaataacgccctcaacctcacactgcgtcggggacgaacgcttcgaagatgtggcggtcgaagtagggcgcgcactgggcgagttcatcgctgctgcgcacggtccatgaaaccggcatcgcacccatcgaacgagcgagcctgacttgcggcgaagtgccaccggtccagtcataggccacgaaatcaggacgagacagccagtcgaacgccagtaagccggcggcccattcagccgcaccattcttgctcagcttcgccggccagctca

SEQ ID NO: 3397 - DNA, 30370 bp, Unknown
  R151_18m  MAG No. k141_31133
ccgccggaggcggtgaccacaagcttggcgacttcggcgtgggttccggagcgcagggattgccagatggcggaatgctcggaatcgaccgggttgatctggttctcgcgcacttgcgcgctgaacagcagatgaccgcccgcgactacggactccttgttagccaatgccagctgggaaccggccttgagcgccgcgatcgatggttcgaggccgatcgagccggtgatgccgttcaatacgacattcgcaccggatccggccatggcgatgaccgaatccggaccgccggtcacgcggacaccttgtgcgccggcctgtgcgagagccgcttgcagtgctggaaccttggtctcatcaaacaccgcgacttcgggcacatggaactgtgcggcctgttgcgccagcagctcgatatgtgctccgcccgccgccagaccggtgacggtaaatcgttcagggtgacgcgagatgacgtcaagtccttgggtgccgatggatccggtggatccgagaatgatgacggtggagttggaggctatgctcacttttccttcttcgtatcgtcattgttcagtgtggggaacgacaggtcggggatatccgaatcgaagttaccgccaagcgggaacagcagcgggaacgaatcgttggaatcgtgcttatcctgtgacggctgagctgcttccgtgtcgtgggaggcggcaacgtattcagatgattccacagccggacgggagaccgtgctgtctgcaggctgactatcggatacgcgaaccggaatggagttcgtgttacgatccggcttgctggtgggagcaaaggagaccggcatggcagcggacgcagcctcgtcggcagtgctattcacaggttgcgctgccggggcggagggcgccggggatgaaaccgaacccggtacctcattcaatttcagcgcattcggtgtatcaaggctgggcatcttgggagcgaaggacggcgcatccaccgccggaagttcctgagaaaccgcagccatgtgggcgagagcggccagagaggaaccgtcctgcaccatatccacgggctgttccgcgaacaccgacggggtcgatgacggagctgcggattcgtatgacgactgtgccggagcaaacgagggggcgctgccagcggtcacaccggaaaccggtgcggacggggcactggcgggaggctcagccgcaacagctgcggtaggagccacggaaggcgtctcggagacgggcttcgccgcagactcgttggacgtatgcaccgggtatgctgcgggagcaaaggaaaccggctgttccgcattggtgttattggtgcttgtggaagcatcgaacgatgcaggagccggcgcataggcgatcggtgccgccgcggccggcgccgcgggagcaaccggagccggagcagtgaacaagctctgctcggcctgatgcagggcatcgaatgattcgtcatgagcagcggcagacggcgcaaaacgttcgtcagttgccgggcgctgcgttccggaagcgaacaatggcgagacgccgttcgcttgaacggtcacgttcgtggcggtctgggcaggagccgtgggctcgccggacacgaaatcggccacacgtgcataggattccaagcgactcagcaactgcacgcaggcgttcaggaagtaatcgacctgtcgctcgtcatagcctttcttgcccttgcgctgggtgaagatcacattgttgaccgtattcgcattgagatcggccaaagaccgtacatcgtcttcggtcacgccgtcaacgcccaatgcggccgccgccttgtccacaatctggtcgaccagacgatccacctgcttcttatcgtacgaaggctgcttgggcgctccggacttgaagcgttcgcgctcgtcacgctccgcatggttctggacttcgtgatacagcttctcggtcttcgccttccacgtcacacgcccgtgctgtgcgatctcccatgtggtctgcttatcgaccacggcacgttccagacgtccaagcgcggcgtcaacctgtgcgatcacatagccgttcttgcgcaaatcaaaggacgcgttctgaatgtcatgctgggtgagattcatgccctcgctgtcatacagagcatgggcgcgctccaagaaagcgtccacctgagcggggtcatacccccacttgcgcttgcccgcacgtgcgatgcccgacttgccgtccccttcacgaagttcctgcgccatcggctattcgacctcctgctggatataaacactctgccacaactttacgtgactattgagacgcatctgaccaagaagaccgaaattcacgattttgtagcagtactgccggtttccttctgcgcgcatctcactgagatttcagaaccccttgccgaagactgtcagggaatatcgtcacagcccatgtctgtggaatgaggggattgcacgaagtgatgaaaaatgaaagtgggcaatgagggactcgaacccccgacatccaccgtgtaaaggtggcgctctaaccaactgagctaattgcccgcaaatgacaacaatagcgtatggccggcactgcgcgacacgtggtgtcgcatacgcgtgccgtagcgctcaatcgcgatgacattcagtcacgcccagcagcactacgcagcacgcgacgccagtcaacacgcttaaagtcaagcgtattgattgaggcttatcagcggcccctgccgaatgcgcgcaggcggatgccgttccagtccgagctgacggtcagcggggtggcggcgttcataccggcggtctgtgcggcggactgcacggtggaggagctggcggcacccgggcggccgggcttgggagtcagtatccacagcgggccgtcattgcccagtaccgcgtaggcgtcaacgatcgtatcggacaattcgtcctcatcatcgccgtcgcgccaccatacgatgacgccgtccacagcggagtcgtagtcctcgtccacgagatcctcgcccgtgagctcttcaatctgggcacgaatggaatcgtccacatcgtcgtcccagagccactcctggacgatatcgccgggctcgaaaccaaattcttcagcgttctgtgatgccgtttgattcacaggggacacattagcaagtcttcgcgaacaaatgcgttaacgcggccgaaaatcgccgcattgtgggcagacccatgcgagtcgtctcaccagaaacaacgactggccgcgcgtgtcatgcctcgcaatgaggcaaatcgtcggcctgccccttgccgatggccaccaacgcctgatacgcctcgtccagcgtggcgaccttgacgtcgcgcagaccatccggcacgcggccggccaaatccgaacaattcgatgcgggagccaggaaccatgtggcgccatcgcgcttggcgccaagcatcttcagcgctatgccgccgattctgccgactttgccgtccttgtctatggtgccggtgccggcgatggtcttgccgccgctctcgttggcgggggtgagtttgtcgatgagaccgagcgtgtacatcatgcctgcggacggtccgccgatgctgtccacgtgcatcgtcaccttggcgtgttgcaatgtactggcgtcaatgcccagttcgtccgcatgggctttggcatgcgccagaccgacggcactggccgaatcctgggaaccggccatgtcctgttcgactttcttctgatactggtccgcactctggcccaccggtaccgtggcctcacgcggcatgacctccacctgcggattggcccaaccccagacggcctgcgcgttgatgatcgggtacccgggcacgccggacgcgttcaccgtggtcagcagcagcttgccggaatccttatacgtcgtcacgccggtaccggtgatgtcgataaccgcaccatcctcgaccttgcccagcacgtcttgggtgggtccgggcatctcgatgacgtacgggctgggcagcagcagaatcaccacaccaagcaacacggcgaatgcaccgacgaaatggcgtttcggacgagcggccgcataggcccgagcacggctgattccacgagataggcgcgaatcatgcttcacttcgaacgatggcatgcgcccatcccccgcttccgaatccgcagtcgggctcttctgctcctggacgaagtctggttcctgattcctgtggcgtgcaaacataccctacagtgtaagcggagggccgaaatcagccgaaaacgaacataaaccgaaaatattgctcggccacgagcgaacaggcccgggcagaccctacacttggggtaacacaccgcggcaaagaaggatacgcatggacgacaacgcgattcacgagtggctgatcaaatgcttcggccccattcagggcgagatggcctggcagcagatcagccagttgcctgaggagatccgtgaacagctgatgagtcaggaccccagccgactgcccaatccatccgaagtccagcagatgatggccgcgttcagcgccggcggactcaacacgatgggcgatatgcagcgcactgtcgaggaagggccgatcaacgtcaagctcgccaagtcgattgccttgcagcaggccaacgcctccggttccgcgtccagcgtgtccgccgtggatggcgaggcggctcgccgcgcgatgagtgaggcgaacctgtggctggataccgcctgcgagttcaatcccgcgcccggcgatccggatgtgctgacccgcgccggctgggtggaaggcaccatcgaccagtgggcgaagttcgcagctcctgtggccgagtcgatgaacgacgctttggcttcggtgatttcggagcgtcttggcggcgcgttcggcgatggcgagatcgccggcatgttcgccggaccggtgccgattccgattcccgacggcatgaaagatccagcccagctgatgaagctgctgggcaacacgtcctttgccatgcagttggggcatgcggccggcaatctgagccatgaagtgcatggcagtttcgatcagggcatcgcattgctgaagaatccggctggtggactgattgcccagaacgccaccgaatacgcgaagatgctgaacggtgagactcctgcgcccgaggccgatacggccggcacttcaaccgactcggtcaatccgttctccacatccaccgacgcttccgccaatcccattggcttcacttcggccggcaacagcgatactccggcaactgacggtaccgcccaagtctccggctccgatgcctccgccgacgccgccgcgttcgaggctgcgctctccggattcgagaccaccgagaaaattcccgaatccgaagtgctttccttcctggccctgcaggaaatggctcacgcccgcctgtatgcctcggtaccgtggctgatgccgcgtttcgaggcgctcatcggcaagtacgcacgcggcatctccatcgatctggatgcgatggaggaacagctgcgtgacgccacgtcgatggatccggagtcgatttccggcgcggtgaatctcaccaaggtcggcatccccgacactcccgaacagcgcgaggcgctggcttcgctggaatcgctgctggcgatggtcgagggctgggtggattgcgtggtgtggcgcgccggtatggcccatctgcctcatatcgaacagttgcgtgagatgatgcgccgcgagcgcgcgatgggtggccccgccgagcgtacgttcgaaagtctgctcggtttgcagctgcgccccaagcgcatgcgcgaggccgccggattgtgggagatgatcaccgccgccgaaggccctgaaggccgtgacgccaagtggtcgcatcccgatctgctgccttcgctgcctagcgacaagcccgcagatggcgcgtctccgtcatccgacgccccttcaggctcctcttccgatgccaatggttccgcctcccaccctgccgcagatggcaagaccggcgatatcgattgggatgccgaactgtccaagcttctcggcgaagacggagaagatggcggcaacggcaactcggaggatacgcaggcatagtcaaccgtccttcagccaattcccgttcctgaacgttcaggaacattcacattcattaccgacgcccgtcacaaaaatcgtgatgggcgtctgtgttgcgctccataaccatccttggtccgcgcatacgacaaatgcagcgaatcctcagctcgggtgatgcccacatacataagccggcgttcctcttccagcgcatcccccgtttccggcgaaccgtacggcaagagtccttccgaacagccgatcagaaacacgtgcttgaattccagacccttggatgcgtgaatcgtggaaatcgtaacgccgggatcgtcgtttgcggcaagtccggtggcgtccaaacccatcgcctccaatagcgcacgtttggacgcggcatcgtcggcgagcgcggatgattgccatcccgaatccttacggacgcggtatttcagtcttgcagcgcgcaaagcggcaccgaataccggctgttgggcgttgatgcgggtgagaatcgcgcaatcggacggcttggctccgttggcgaccaaccgggcgatgcgtgccgccacgccctgcgcctcttccatatcgctctcataagcggttcgggtaacgcgcggaccggattcgcgggcggaaaccagtttcaggtaatcctcacggttcggcgcggccgcaagcacccggttggcgagattcacgacttccggcgtcgaacgatagtcggtgttgagattgacatcggcggcgagcggcccgaattcatcggcgaaacgcagcagatcccagctggaagcaccggcaaacgagtagatggtctgggccggatcgcccacgacgcatacgttgcggttcatcgcgctcttgccgtcaggtcctcccccgcccagccacagggtcagcagcctgtgttgcaggggcgagacgtcctgatactcgtcgacggtgagccagccgatggtggaacgaatttgggcggcggcttcgggaaaatcatccatgatatggcatacgagcagcagaatatcgtcaaaatcgatttcgccacgcgaggtcttttcctgctcgtaggcgctgtagacgtcggcgaaccgagcggtgtcgagtccggcgggcggttgcctatgggcgatggcacaggcccgggcataatcttccaccgccaccaacgagattttggcccaattgatttcggcgagcacatcgcgaacggtcagcggatcggcatcggtacgtgcggtggcgcggatgatcgcgcgggagacgacgtcacgctgatcttcgatcacatgcgggaatggagcctcgcatatgtccgcccagacgctgttgagctgatgcaatgccgctgagtggaaggtcgcggccgtgactccggcagttcccgcacccgaaccggaacgtccggcaccttcccctacgccgagctggcccaaccgtgcgcgcatttccgccgccgcttttaccgaaaaggtgacggcaagcacccgctccggcttccatgccccggtggcgcaggcataggcgatccgccgtgtgaccgtgcgggttttaccggcacctgcgccggcgataatgcgcaccggcccttgcaacgtagtcgcggcggtacgctgccgctcatcgagcccctcaagaatcccctgcgcctgttccatgcgtccattgtggcacgattcgcgctcacggcacgactcacgcctatggctgaatcgggctcacgacaaaacatcgccagaatcatgcgttttgcgtgtcattctgcggtgcgaatcgccacggatgtattagtgtggaagggtgatgaaacgtagcgattatatgttggcggcactcgcctcagccgtcctgccgaatctgggggtggccggcgtacgcgagaacgtgcaggccagcgcaaccgacgaggccaaaggcatcgatcagaccgtgatccaagatgcctcgggcaagttgtacgacgtatacgccactgacagcaaggaagggcgtacacgtctgatccgccgtgtgaaagcggcgcagacactggcagccgcgcgcgagcttggtggcctcggcttcgatatggaccgtgtggtcgcattcgtcccgggagacgtttcccaacccggccagacggccaccgcacaggccgtggggcagcaggcccaggcggagtccacaccactgaccccgcgcaagcccggtcccacaggcgagacgaccgtgatgatcgccgtccaccgtgatggtcaggcgcggcctctcgacctgttgacattggatgactgcgcggccgtcggcacctccatcggagccattcatcgtctgccttcgacttttctggccaatgccaaatatccggtagtcaccaccggtcagattcgttcgcagctgaccgcctggattcgccgcttacgctccgccggccatgttccccaagaaatcaccgacagctgggcgcgcatcatggacaccgagggattgtggtcgttctccacctgcacggttcacggcggtttttccgacggcgacttcctgttctccggttccaccatcaccacggtgaccaactggcaggatatgcaggtcaacgatccggcacgagaccttgcctggattttcggcaagctcgacgaatcccatcgcaacgccgtgctctccgcatacggccgcatgatgggctctcgacttgacgatctcatcatgctcagggccaacctgtggctgcagatggaacaggtgggcgaattcattcaggcgttgaaccatgcggacaacaatcgcatcatgcagttcaaggcacaggtcgaacgactcgcacaccagttgggcgtgatcaagcacactccggcaccggccccagccgcaggggcggccgccgccgcgtcgacggagcccggttccccctccacaatcaccgtcggcacattgttgcaggacgaccgtcatcaggcacccgccacgcaggtacccgcacaaccgcagcagtccgaaaccggtaccgcggcggccgaggtctcggacgacacgcccgatcccgatcgcaccggttccgctgacatcgtggccgctggcgacgtggatcttaccccggaagtcgaacccgatgctgaccggaccgccaatcacccgcaagcgagtgtctccggcaccgcaaccggtacgggatcgaccaaaccgcagccctcacatggcgcttcccattcttcggtgacgatcacgctgaaggagctcctcagtatgaacgggcatagcggcacgacgtcaaccgacgcttcccctgcatctcaatccgccgccccgaccgacgatgcggtgaatgacgatactccggacagtttcgttcagcacggagcctcgagtgcccaaaccacggtgattccgctgttggagcgggaagaacgcgctctgcgcgatgcccgtgccgggttggacgggtatgacagcgagggcaatccgctggccgaatcatccacatcatccaaataatgtcgtgtgcggtgttccgcgccacgccgagcgcgtaacaccgcacatgacgacgcagacacgcggcacaatagagtacagaacctcggccggtgacggccacttaccatgatgttcgtcacaaagacggcagaacaaggagccttatatggatatcgaactgggcattcagaacgtggcacgaccggtgaacttcagcaccgacgaatcagccgataatgtgagccaggccatcgcgcaggccgtggccgacaacgcgacgatcgatatgaccgatgacaagggccgtcgcatcatcgtgcccgccaaggcactcggttacgcgatcatcggctccgaaaccaagcacgccgtcggtttcggcacgctgtgaccgtgaatcgcgcataagcggccttgggcatcatctcaaggccgctttgtattgccgcgaatcaccgatataacgggagcacgccgcgatgaacgatctcttcgacagtggcctcgtcggtgaggttctcccccagtttgttcggtttgcctttgccatgccagtcagatccgccggtgaccagtagctggtgccggcggcagatggtgagcagccgttctcgttgctccggtgaattgcctcggtgccatacctccagcccgtccaatccctcgctgatcaacgcttcgatctggtcatcggacagcagtctgcggttacggctcacatcaccggcatgggcgatcagaatcacaccacctgcccctttgacggcggccaccacttcatgagaggtcggcgagggcgtgggaatatagtatttggatgaggcgctgaccgcattcgcaaacgcttccgaacgagtccgatatacgccggcactcaccaaagcatcagcgatgtgaggccgcccaatggtggttttgtcaccctccttgacttgggcgagcacggattgccaggtaatcggataatcacgagacaacaattcgaccatgcgctgcgtgcgttgcaaccgtgcggctcgagtatcggcgaacaagtccgtgatgtgctgattcgtgggatcatactggtagccgagcatgtgtacggagacgttctcatccgtggcggtgatttcggtgccgcggagcaacggcaaaccgaccctatgggatgcggcttcggcctccggccagccggcggtggtgtcatgatcggaaatggccacgcccttgagtcccaatgccttggattgttcggccaatgtggccggcgtttccgtgccatccgagaagacggtatggcaatggatgtcccacccgacggcgggcggctccaaaggcatcacatatccagtcataccttccatcgtaacctcatctcagcattcccacgcaaggcgcagacaggtcgtcaccttctgccaacggccaagaccagacatccggcactcagctgacaaccgcagaggctaatctggagcgcagcgctatcgaaaggggcatgatgactcgtaacaccgcaaccgacacatcatccagcaccacgaacaccacgccgcttggcttggcggaggcgcgaccgttgattggatggcgccacagtgccacttggacatatctcatcatgctgatcgcctcggcagtggcattgggggcctcgctcattctgtccgccgagactttgcagttggctaggcatccggagtccgcgctcggctgcgatctgaactcggtggtgtcctgttcggcggtggcccagtcctggcaggcggaaatcgtgaagttcggcgggctgagctatccgaacgcgttcttcggcatcgccgccgaatcggtgttcattaccatcgcggtgatcggtttggcgcgtgtgaaggtgccgcgttggttcgcgacctgcacgtggctgggcggactggccgctttggcctactcgtactggctgagcacgcagtcactgttcgtgattcacgcgctgtgcccgtggtgcctgaccctgatgttctccaccaccatccagttcatggcgttgagccatgcgaccgtggcagtgcagggattgccgtcacgtaaggctgtggcggctgatgatggcgacagcgaggccgatgtcgcggcggtgccggccggactcaataagtattaccgcctcaacatcgacctcatggtcgacatactgtggatcgtggcgatcgtggtactcatcatcgtcaccgaaggcgcggccctgttcgctgcctgattcctttacaacaaatcgatatcggcgaccagcgtggctgctccggtcagtttcacgtcgctgtcggtgacgtccacgcgcagggtaccgccacgtacggtgatgtcccagtggctgatgccggtcttggcccgcagcacaacgcctgtggcgcataggccggtgccgcaggacagggtttcgccgcagccgcgttcgttgacgcgcatcgtggcttcacccacaccggtgttctgatcgatgtcgtcgacccgcacgaattccacgttctggtcggattcgatgaccggagccaccactggtttggtgaccagatccagcgcctcgaccaccggcagggacgcgaaggcgtcctcgatcaccgcgaccacgtgcgggttgcccatatccacgaacgtgccgcgcgccgagccctcagcgccggggatggtgacctcgtaggcgtcggtttcgccgatcttccactcccccatttcgacctggaacacgttggctccgtacggcctcatattgccgcgtggcgtcagaatcttgacgccggcacgggtgccgaggcggaacggctcggtggagtcggccacgccctcgcgctgagcgaacaaggtgatggcgcgcgtaccgttgccgcacatctccgccaacgatccatccgcattgcgatagtccatgaaccatttcgcgcccccggccagtacgtccgaaagctgatcatcgcttaaatcagacacgaaatcaggccgtgtcaggcgaatcaggccgtcaccgccaatgccgaagtgacggtcgcacaggaatcggacctcatcggcggtgggctcgaatttgccggacttgtcgaggtacaccacgaaatcattgccggttgcgtgtgtcttggttactcgttgcggaagactcatggctttcagagtactctagggagcgaaacaacaccgcaaaacaatcggctttgtgatcggtcgcggcaacatacggttgcaggcatggctatagggaggattcaggcatgagctcttcggctccaatcggcgtattcgattcgggtcttggcggtatttccgtggctcgccaaatcgccaaggatatgccggccgagcatgtgttgtattttggcgattcggccaacgccccgtacggcgtcaagacgcctgagcaggtgagggccctgagtttcgatattgtcgaacggttcgtgcgtcaaggcatcaaggccgtggtcatcgcatgcaacaccgccacttccgccgcggtgaacgatctgcgcgaacactacgatattccgatcatcggcatggagccggccctgaaagtggcgtgcgaccggggtgacgtgccttccgacccgcatcatattccccagagggtgattgtggcggccactcccctgactttgcgtgagcggaagttcgccaagctgatggatcgattcgattccaacaacacgattttcaaggagccttgccccgacttggtggagattgtggaatccgggcggctcggcgaccatgacctggtgatgcgcacgctgcatggctacttcgaccagtacgacatggagcacatcgactcggtggtgctgggctgcacgcatttcgtgttttaccgcgactacttccgcgaactgctgcccgaacgggccgccgtcatcgacggcaatgagggcaccgtgcgccatctgggcgttgtgctggagtccctgggcaaactggcacccgaagacgcgaccggcggcgtggaactcgccaattccgatctgtccgaacgtgttacacggctttcacgcgacctgctgaatgcgtgatcggatgcatgatgatgaataggaggctgatatggcactgaagaccgcgatgattgatgtgggcggcgggttccgcgcgattttcggctgcggcgttatggaccgcatgctggaggacggcatcgacgtggacatgtgctatggcgtttccgccggcgcggccaacatgacctcgttcatcgcccgccagcacggccgcaaccacaccttctacaccagatacgcgttccgcaaggagtatgcgagcgcggaaagcttcctcagaaaccacaacttcgccaatctcgactacatctacggcacgctgagcaatcacgatggtgagaatccggtggatttcgcggcgttcgaggccaatccgaccggattcaccgtggtggcctgcaatgccgaagacggctcgaccaagtatttcgacaagtcgcgcgtccgcttcgatgatttcgacatcatcaaggcctcgtccgccgtgccggtggcctgcgagccgtatgtggtggatggcgtgccgtatttcgatggcggcatcgccgatccgatcccggtacagaaggcgctggatgacggctatgatcgcgtgatcctgattctgtcccgcttgcgtgacgaagtacgcaagcagcagaaggatctggctccggcccgcatcctcgaacgctcccaccctgccgcagccgagaggctgcgcatacgctacaagacctacaacgacgaactcgaactcgccaagcattacgaagcggaaggcaaagtgctgatcctcgcacccgaagacctgtatggtctcaacaccctgaagaagaacttcgagggcctggaaatgatgtatcgcaagggatacgcggcggccgaagccattccggcattccttcaggcatagcgcaagcccaaaaaacaacgattctgccatagcccattacacaatggcgcaatgacgtcagaccccgtccggcgatggcacaatcgttgtttttccgtgccataagcccatcaaacacggtgaagcccctcactgggaggggcttcactgatacatacgccattatgcggtctagcggccacaagcaccgctacttgccggcggcggtcgcggcgtcgttcgtctcggtcgcggtgagcatggccttggtgacctgttcgtacaggtcctggtaaccgccgggcgtggaggcgggcagcaccacggtcttggtgttcttcgattcggacaacgaacgcatcacgtcaagatactggttgaacagcaccacgttgttcacatcgttgatgtccatgcccacggcctgcaggctcttgatctgatcgacgatgccattggcgatttcacggcggtagttggcctggccctcgccctgcagtcgggtcttctcggcttcggcggcggcctgcgtctcgatctggatgcgctgggcttcggcacgctgacgggtggcttccttctcgcgctgggcggcgttgatggagtccatcgcgttcttcacctgcgggctcggatcgatggcggtgatcagcgtcttgaccacggtgaagccgaaacggctcatctcggcgccgacggttttctgcacatcgaacgccacgtcgtcctttcgggcgaaggcgtcgtccaaggtcagagcggggatggcggagcgcagcgcatcctccatgtagctcctgagctgaccagccggatcgcgcagctcgtagtaggcggtggccacgtcgttcgggttcacgcggaactgggtggaggccacgacggtcacgaacacgttgtccaacgtcttggtttccagctgcacgttgagctggttgacgcgcatgttggtcttcatggcgatgcggtcgacgaacgggatacggatgtgaatgccggcgaactgaaccttcaggaacttgccgaagcgttcgatgatgtacgcctgctgctgcggaacgatgaacaatgcggcgcccagcagcacgataagaacgactaatagaatcagcaccaacagcatggttccgcccaacatacttgcgatggtcatataaaactcctctcacaagggtcaagcacggcatatcgttgtgccgcgccccaacaccatccatgctaccatcgcacgcccgggaactgatagctctcacaggcaagtccaagaaagcgaacgtcagatttcatgttccgttcactccggcagccacatcttgtgcactaatgtttgaatcagccaagtcgcacgtcagaaacaacaaagtcgggcatttcagccaaggaaacacccgacttgaatcaagcactgccgccatataaacacatcagaagtgttcgttgagcttcttctcgcagtaatcctgaagccatccaagcaacgtgcagaagagcaagtagatcaagcccacttcaatgtataggaccagcggctcgtagtaaatcgccacaatgcgctgggccgtcatgaacatttccaccacggtgatgttcgccgcgagagacgtgtccttgaccaatgcgatgaaggagttgaacaatgcaggaaaggcggagcggaatgcttgcggcagaataatgcggcgcataatcgtcacatacggcatgttcgccgccaagccagcttcaagctgtcccttaggcacggcaagaatcgcaccacgcaatgtttcggcggcataggcgcccacattcagcgagaacgcgattaccgcggaaggcaatgccggaatcgtaatgccaacggacggcaatccaaagaagataacgaacaactgcaccagcaacggcgtaccacgaaacacccaaatgtagaaccacgcgatttgggaggccacaggtactttagccacacgcaccagcgccaccacaatcgccagtatcaaaccgagagcgaaggaaatcagcgtcagcggaatggtcacagtgataccgggaatcagtagcttagcaaaggaatctacgactattccccatactcgtgcgtccattggtcatcctttgttgtgtggtatatgttgcgtctgctcgtaatcttcacgaggccagctcatatttcccggctcccctaattacaggagagccgggaaacatgtcactcctgagagaagtcctcgccaaagtacttttcggagatcttggtcaatgtgccatccttctgcagcttgacaatggctttgttgacttccttgaccaagtcatcgctgcccttgcggaacggcaggtaggcggccggagtcttctcggacttggcggcaatcttgatgtccgcatccggcttctgcttcaggtagtcgagcgcagcaaggccatcgttcaatgacacatctgcacgaccggacgtgatggcatcgacctgctgaccgaaatcgttaacctgaacgatagtagcgcccttctcctgagcggtcttgttccagttggaggtaccggtttcagcggcgcgaagccccttgacgtcatcgaacgaagtgacgttcttcgggttctccttggaggtaatgacgacaccgtaggagtaggtgtatggttcggagaaatcatacttggccttgcgctcgtcggtggcggaaatctgatcggcaaccgtatcgtacttcttggcatccacaccggcaagcagggagtcgaagctgccctcggcaaactcggccttgataccgacctccttggcaatggccttggccacctcgacatcgtaaccggtcagctcattggttttggagtcatggtaactgaacggagcataggtgccctcagtggcgaacacgattttgccggcctgcttgacctgctccaatgcactggagttggaagcggaagccgaaccgcatgcggcaaccgaaaccagcacggcgacaccggacagcaaagccgcagccttgcgaatcacttgattattgaacatgacaaacccctctcttgatattgtcacaattaattacaacagccgtgaaacgcctctaccgagtcaccggaatcatcagcacattgttggttgaagacaggaactcgacggtacgctcctcctgcggatgttcgaagatccgcttcggatcaccctgctcgaccacatggcctccttcgatgaacaccacatgattcgatgcctcataggcgaaccgcatctcatgggtgaccatcagcatggtcatgccttcgctaccgagttgcttgatgacccccagcaccccgttgaccatttccggatccaatgccgaagtgggctcgtcaagcaccaacagctcaggattcatagccacggcgcgggcgatgcccacacgctgctgttgcccgccggacagtgtgctcggataccgatcatgaaaatcggcaagtcccacacgatcgagttgctcaatagcgatcttgcgggcttcatcaggcttgattcccttggaatacaccaacggttcggtcacattctgcaatgccgtcttgttcaaaaacaggttgtagttctgaaacacgaacccgattttcgaacgcaccttgtgaatgtcggcagatttggtagtggtcaaatccacaagaccatcaccgaaatcgacggtaccggaatccgcgtgctcaaggaaatccagaatgcgcaacagtgtggatttaccggagcctgaggggccgatgacagtaaccacattttgtcgaggaatgtcaagatcaagcccatccagcacggtggtgtcggcaaagctcttgctcactcccctaatccgaatcatcccgatactcccttttcgctgctgttatgcacgtcaacgctcgttcgcgaagcacaatcccttaccgtagacgcgcttgctcacctgtgtttcggcgtggttatatccagtgcctatggagtgctattcacaccaatgaataacacatcggacgccgacgtattgttcgctcacagatgcagcagatcgtcaaactcgtacaactcttgtctttacttgatattcagctcgttgagcttgttcttgatatccacagccgacggttcgacctggaaagtgccatcaggatagagcaccacgggaatgtgctgctggccgctgatggccaccgcacgatcggccgccccatcctcggtttcgatgtcatgccacgtatattcggtgccaagctcctcaagcgtgttcttcgcctgcttgcaatcaccgcaccatgttgcgccatagacgtcaatagccatgtcctgttccttctttcgtaatacaacaacccaaattcacaacgccccaagaataacagcgcaggtttttctcagaacgaacaattatccgcatacgtaagcgatacacgtcagtatgcgttggcaatggcttggtcaaggtccgcaatcaaatcatcgacgttttccaatccgatggaaagtctgatgagattatcgctgactccggcggcgatacgcgcatccaaaggaacctcgcgatgcgtgatgcgcgcaggatcgacaatcagcgaacgcgcgtctccgatgttcggcacataggagaatacctcggttccgtcgatgattcgtctcacgttgttctcatcgccgtcgacgaggaacgacagtatcgtgccgattcctttggggaagtatttggcgaccagatcatactgacccgtgttgcccaaaccggaataattgaccttgagcacatgcggcgcatgcgtgagatgctcggcaatacgcgtggccgattcgacttcctgccgttctcgcacagccagtgtttccaatcccaccatcgacaggtatgtattgaacgggctgggcaccgcgccgaaagtgcgcagatatttgatgcgtacacggcgaatgaacgcctcgcggccgaatctgctggcgaagctgcgcgctattcctttgcgttcatcgctgacgaccagttcgggagtggtgaactgtgggaatctgccgttggcccaatcgaagtttccgccgtcgataaccactccgccgatggcgttgccgtgcccggtgatgcctttcgtggtggaatgcaccacgatatcggctccgaactcgatgggccggaagaggtacggggtgggcacggtattgtcgacgataagcggaataccgttgcgatgcgcgagttccgccaatggttcaatatcggtgatttcagtggatggatttgcaacggattcggtgtagatggcgcgggtgtccggcccgattttcgaagcgacctcatcgaggtcgttgatgtcgcgcacgaaatcggcatggactccgaactgcgggaagaaggtctccatggcatcgacggaagcgccgtacaggttggtcggagagatgatgcgaccaccaccttcggcggcacacaacagcgcatacgacaccgcggccatgccggaggcgacggccaccgcgctcacgccaccttcgagttccgccaaacgacgctcgaacacatccacagtgggattcgccacacgcgagtacgagaagccctcggcttcgccggcacccagtgcgtcaccatgtgcggcgctgaccatgtcaaacgccgcactggcgtaaatcggcgggttcgccgcctcaccgtgagccgcccggtcatagccgccgtgaatagccgcggtaacgaaatccctcgccatggattatcccctcaatgtcatgccgccgtcccttaggaaacaccgacggacgcccatactgatacggcaccagtgtaggaagcgaagcaccgtaacacgtgcttgcgggtacaggcatttcttatcgttcggtatcagccggaatgataggtggggtgcgttcatcgtaactcgttgagcgctttctgcgcgatggccgtgagaaagcgtatgccgtagccgatggcggccggattcggccggaacgtcggcccatgcgcggcaccggtctcaccggcaccgatgtgcacgaacaggccgggcttgcgatcaaggtaatatgagaaatcctctcctcccagttgaggatgatcatcatccgcgtgaagcccctgctcggcgatgacttctcgtccgatgcgggtccatccggcatcgttgaacacggaaggcgatccgaagaaccacgagacatcggcagtggcaccgtaggcggcggccgtgttgttgatgatggcgatggcgcgcttcttggcgagaacccggtcctgcggctcggtagtgcgcaccgtgccttcgaagaaggcatcctgcggaatcacattccacgaattgccggcttctatatgggtgacggacaacacccgcggatggcgagggtcgagattgcgcccaatgaccgcctgcaacccctgcaccacgttcgtcagcacggtgatcgggtcgatgccatcctccggttcggctgcatgcgcgcccttgccgtgaatggcaacctggaatttgtcgaccgcgccggtgatgccaccctcacgtatgagtatggacccaaccggtccggctgcatcgtgcgtgccgaaaaacgcctcgacatcgtccagcacacccgtgttcagcacctgcacggaacccgtggggcgctccgcggtggcacgaccttcctctgccggctggaagatgatcttgacggtaccaggtaatgaggcacgccgttcattgagcagaatcgccgcgcccaacgccacggtgaggttgaagtcatgaccgcagccgtgcatcactccggcattatccgaagcgtagtcaagtccggtattctcggtgatgggcagcccatcgatgtcaccgcgcagggcgatgacgggcttggcgcttgcgccgcgcacgatggccaccacgccggtcctgagtcccgattcgaggatttcaacgccatgcgattccagaatctcacggatgcgcgccgtggtgccgaactcttcataggagagttcaggatgacgatggaaccagcggtaccattcctgcacatcagcgttcagagcatcgggaagtgttacgaacgccgtcggggatgcgcccgatcgggttgttgctgcggtcaccggaacctcctttgcgtgacggcgatgacggacggatgcgaggacgtctcaatcccttcggcttcgctcattgtttcactcctcccaaatacgcctcctgcacccgctcgttgccgagcaggtcgccggctttgccatgcagccggatacgtccgttctgcagcacataaccatagtcggcgatcgagagagccagctcggcctgctgttcgaccatgagcacggaaacgcccaattcgtcacgcagtcgcgctatctgttcgagtacgtcttcgacgagtttgggagacaagcccatcgtcggctcgtccatgcagatgattttcgggcgactcatcagggctcgcgcgaacgccagcatctgctgctcgccgccggacatagtgccggcctgctgcatacgacgttccttcaaacgcgggaaacgatcgtacatggcttccagatcgccggccacaccctccctgtcgtgtcgcgtataggcaccagacaacagattctcctccaccgtcatctgtggaaacacgcgcctcgcctcgggcacggcggcgataccggcttggacccgtctgcgcgtggacagtccggtcacatcctcgccttggaaccacagcgaaccggtcttcggatgattgatgtccaaaatcgtcttcatcgtggtcgacttgccggaagcgttgcctcccagcagagagacgatggcccctttgggtacgcagatcgacacgttctgcaacgcgtggacctgcccgtaatacacattcactccatcgagcgcaagcagggcatccccgccatcatccaacgtcccggtttcatctcgtccggtaccggcaccggtgccctcgacttcgacgacggcgccaatggagttctgcatcgcaagcacatgcgactgcccggcgacccgggtatggttcatttcacgccgcttgccgagatacgcctcgaccacctgcgggtcattgcgcacatcatccggggcgccttgcgcgatgacgcggccgccatccatcgcaagcacacggtcggacaatgcagtgaccagatcgatcttgtgctcgaccaataggatggtatgtccctgcgctttcagatattgcagttgacgaagcacttcggcggtctccgactggttcatgccggcggtcggctcatcgagcagcaggatcttcggttcgctgatgtgggcacgggcgatttcggtacgacgacgattcgcgtacgacaacgtgtaggtgcaatcccgtcgacgcgcgctcagtcgttcacggaaacggtcgatttcccgatccacgcggatgttcacctcatcggcttcgcgccgagtccgcggtccaggaaccagcgccacgccggtctcggcgagcaacgacagccaacgcgcgatcggatacctttgcaggcttttgaacgggcgtgccgcgacgagtcgccggtgatatccgagattgatgttctcttcgacggtaagaccgccgaacacacgaccgttctggaaggtgcgcagcagtccccgttcagacatgtccgcagggctcagaccggcaaccggctcgtcggcaagatcgatgagcccggaatcaggctgcagaaaaccggagatcaggttgattgtggttgattttcccgaaccgttcgggccgatgatggaaatgacctcaccttgatgcaggtcgaaagagaccttgttgacggcatgcagcccctcgaaggacttgtcgagctcgcgcacgcgcagcatcaccggcgcgtcaaggacggcctggcggtgtctttcggaatattcagccagatcatccgcgttatcgaggcgttcgttgtcgatatcgatgccggtcacggcgtctacggtggaaaatacggtctcggaatcggtcatggcgactcagcctttccgggcgaacaggccctggggacggaacaagatgacaagcaccagcagcacgccatacagcaggatgcgcgcgtcggaggcgaaacgcagcaactcgggcgctccgatcagcactatggagccaagcaccgcgccgagcggagagttcataccaccaagcacgatgatggtcaggatgagaatcgacatgttcgagttgaagatcgtcggatcaatgtacgtgtactggtgcgcgagcaacgaaccggcgagacctgcgaaaaacgcggcaagcgcatacgcgagcgccttataggcgccagtgcggatggacagcgcctccgaagcctcgcgatccgatcccacggcctcgaacacgcgccccagatgagcggttcggatacgcatgacgatgaccaacgtgacaagcagcacgatcacgtcaagcagatacatcatctgctgcgtgtacagcgtgacgccgaacaccttcgggaacggaatgccctgaatgccaagagaccccttggtcaacggctcggcgaggcgaatgatcgccaccatcaccgcacctacgccgatggtggcgatggcgacataatggccggaaaacctccatacggggaaggtgagcaccgaggcggcaagcgccgcgatcacacctgcggcgggcaacgccaccaggaagggccaatgcgcctgcgtggccagaatcgcggaggcataggcacccacggcgaacggtcctgccatgcccagaatcgtttggcctgcggagccggaaatcaacgtcagtcccacggcggcgatggcatagatggcgacctgagtgcccacgccggacaggtagtcattgaagaagaacggggtggatacgagtgccacggcaccgatgagattaccccaccaaggcagcgcgatcgccctgccgcctcccaggaacgtgccggtaagcggctcggatttgacatcggtcttcggcccaagcagaccctgcggcttcacgatgaggatgatgatcaacgcgccgaaggtgatgaggtcatgtgcaccgtctccgaacagagagatgccgaacgcttccaccacaccgagcacaagaccgccgaccacagctcccgggatggagcctagaccgccgatcgtggccgccacgaacgccgtcataccaatggtgccgccgttcatcggattgatgttgccgttgaacaagcccacgaagatgccggaaacgccggcgagtacggcaccgatcacaaaggagaggttacggatggccttcaccgggatgcccatctgcatggcggcttcgggatcctgggaagtggcgcgaatggcctgtcccgctttgccgaacttgaggaatgcccataagccaagcatcgagaggacggcaagcgtcaccatcacgatgtccgaagtgccgaaacgcacgccggcgacttgcaggttataggtctgcagcagtttcgggaatggtcgggtctgtggcccgaagacgacctgcagaccattgtcgagcacctggccgacgccaatggtggcgagcagcgccgcaatcggtttacggccttcaagcggagcgatgatcgccatgttcatgaccagccccagcagtgcggtaaccacgagcaccgccacgaatgtgggcacgattccccatccccatgatgaaccgagccaccaggcgatcatcatgcccacggccacgatggaaccttgggcgaagttggccacgttggtgacgccgaagatcagcgacatgccgactgcgaccagcgcataggcgctgccgtgtatcagtccggcgaaaagaacatcaaacattgtgtgcgttacctcgttcgtggtgtatgggaaagcccggggaatcaaccttcgtattgttcgaacttgccatctttgacgatgagcagaatcggatcgatgttatcggcgcgacgactctgccgattgaatttgaacgtgccgccattgccctggtagagcgggaaatccgtcacggtctgcagcgccttctgtatgccttcacgggtcggttcggtcttgttggcggcataggccagatcgatgatcgcctcgtaggcggtcacttcgaaattgcccgggttgttgccgtacttggccttgaagtccttgacgaactgctgggccttggcgtccttggtgccagtggcggagaaggatccggtgatgatcgaaccctcggcgtttttgccggcgagatcgaggaactccttggtttcctgaccaccgaagtacaggccgtcgtaccccagcttgtcgcgcagggtattgatcaccagagcaccgtccggcccgtagccgatgtcgaccaccgcgtcaggcttggcatcgcgcgccggaatcagaatcggcgacaagtcggtggagtcgggcagatagctggactcgtacacaatctgggtaccgtttttttcggcctcctgcttgaagtaccgataggcctgtttgccccagtcgttctcgatgtagaccaccgcgatcctcttggcttttttggccactatatccgcgttggtcttctgatacttgtcctgaccgatttggggagtccatacgtggtccccggtatcggtaaaggtgggtgccgaattattgaaaccgtaatgcacgaggccggcctgctggaagataggcgacgcggccgaggatgcgggcgaggcatagtcacccaccacggcgatgatcgacttgtccgacacgatcttgggagccaccgcggcgtcttgcttggcatcggactgcgtgtcatagtatcgaagaccaagcttcttacccttgacgccgccatccttgttcaccttggcaaccgccagatcgaagccttgctggaacagtttgccgtattgcgcatattgcccggtcttcggatagatgactccgatgttcacggtgtcgtcgctggaaccgctggcggcatccccgccaaggccgcatgcggagacgccaatcagtgttcccgcagtgaccacggatgcgatcgccgtacggatgattgtcttgatggtcatgatgttcccttctctattcgaataattatgaagcgtgaatggggaccggctcagcccacgcggatgtcgctcaacgcctgcagcgcctcgtcgcccgctggggtcggaaccgtgcagcttggtgccagcaaaaacggtttgcccgtacgaagcgcgatggtcttggccaattcgcggcgcacctgttcgacgtcaccgtccggcgcgaacaggtcgtacggggcaccggcgaccggcacagccgtcaggtcggcatccacctgcgggtttcccggttgatactgatcccactgcagcaggtccacacccttcacgtcgaaccaattcgggtgggattcagcacgacaggtgtgcagcagcaccacggcgtccgggttggcgcgatgcaccgcgtcaatcacgatgcgatcgtatggtgcggagaattcaagatagcgttgcgcgtcgaaataaccctcgctcaccgtgccggtgagcgcgtagaacacgccgtcgagtcccgctccgccttcggattcgggacgaaccaacgcacgcgcataggaggcgagtgtgcgggcgatgttggcgagcgcctgcttggcgacatcaggctgatcgaagatcagatcttcgacgcggagcgtcgcggtggcgtaatcgtcacccgggtacagcggcagatcggcgatctgcagcaggacggacaatggcgaaaagacggtctgcagcacggcacgatcctcaaggccatgccggataagggcggcggcggccagagcctcggcgaaatactcattgtcacgaacgtcgagttccttgactccacgcacatcatccggttcggtgattgcggcgctgatcttcttcggcagcacgaatccggcataatcgttgcgatcgtaccgagagccccaagcctcggcatagtatatggcgcgcggattgatcttcacccattcccaatcccagcgattgacgaaatcgatggtggccttggcgaattcctcggcaccgtattcatgaccgacaagatgctgccaggcgctaaccagatacggcgtccgggactgatgattgacgatggcgtggaagtcggcgcgacgattgaccatattggggtcccttctcctgattcgcaacgttatccgtcatcgaagcgcatcggcgatgccgatgtcaagcggaatgccgcccacgtattacaggcatttcttatagcgtcttatccatccgcgaaatcattgcatccttgaagcgcctatcaagaacacctatatgccatttcggaagggacgacgacggttcgggaatccatgcggtattacgggaactgacatacatccgtatccatcatcagaagaggtgaaccgatgggagcaaacctgtatttcatcggcggaggcaatatgccgagcgccatcatagaagcggtgcgacgtaaggccgccgcatatccggtcgaccacatctgggttgaggaaatctcacgggaacgcgccgaatatctggcatccacgtacaacaccgagacggcgtcaccgacggacgccccggatgccgacatcgtggtaatcgcggtgcgcccgcaagacgatgtcgccggcgtagccgcttcagtggcgcgacgtttcgacccggcggagaccacggtgatctccatcgtagccggctataccatcgccaagcttgagcaagggctcggccatgggtggcgtgtggcccgcatcatcccgaacacactcaccaccgtggattacggttacagcggcgtggcgctgaatggggccgcggcacgcgaggacgtggatgcgttcctcaacactttcggcaaagtgctgtatgtcgaggaacgacttatcgacgtaatcaccggtttttacccgccgaacatcgtctaccatttcatcgacgcctacgtggatgccggtgtgctggccggtctgccccgggacgcggccagagccatcgcgctcgacaccatcatcggcggcaccgaattcctcaaacagaaagacgtgctgcctcaagtgctgctcaatatcaacaactcccccggcggagtgggaatcaccgaggcatataccctgaacaaaaccggattcgcggcatccatacaatccgcggtgctggcggcggtcgagcgcaccacggcgctcggcggcgatgcaaagtaaaggcgggagccgatcatgacgcaacaattcacctgggaccatacggtcgaattcgtgaatgacctcaagtccgccgaacggacgttcgccgacgcagggctgacttcccaatacggcggcaagcatgtggggcatggcacggagaactccctggcctacttcgccgataactatttggagttcctggcattgtacgaccgcgaggaagccttgtcggagacgccggaccatgggctgatattccatgaagccggggagctgctgcccgggtatgtgggattctatcgtccggcattgcacgtgcatggcatcgaacaggcggccgaacgactcacggccaaaggccttgatcttggccatatcgttccgggcaatcgcacgacggccgccggtgaggagatacgctggcggttgctatggatcaagggcgatgatcggggcctgcgctatccgttcgtcatcgattggggtgcgagcgaatccgagcaactggcccgctacgagagcggcggactgctgcaccggcatgccatcggcgaagtggacacccgtcgcgcgattttcgcggtgcccgaccccgcggcggtggccgcgcactggtccgacgtgtttggtttgggtctcacggaaggcggggacgccgaccggcccgatgagcactacttcgatctcgatgtgggagggcatcgtgtctggcgcttcgtccagggtcaatgcaacgccatcaccgaattgcagtacgacgcccccgccggcaaatccttcgatgtgaccatcggccaggcgcgattcagaagcctgtaagtacggtccacacacaaccgcaacaacgcatgaggcgtgtgccaccaatccaacggtggcacacgcctcatgccgtaagagagccctgccaatcagtcagtcagcagattcaactcccgcagcttgttcctgatgtccttggcggagggctccacctggaaggagccatcatcgtacagcaccaccggaatatgctgctggccgctgatggccacggcacgatcggcggcaccgtcctcctcttcgatgttatgccagatatacgccgcacccagctcatccaacgtgttcttcgcctgacggcaatcaccacaccatgtggcgccgtacacatcaatggccatgccatgtcctttccgcatgccgcgcttcgtccgcggcttcccatcgcatccatcgtaacggcacatacggccatatcgcatcaggcgaacaccttcggagtcaacgcgccgaatacatcggagtcggtgtgacgttccctgtaccgggcataggcgatatcgaaagcctgtccgaggtcttcgatcagatcgttcgcatcctcgatgccgacggcgagacgcaccagctcatcggtgatgccgaccttcagacgctcctcccggggcagttcgaaatgtgtcatgcggcaaggcagttccgcaagcgattccacggcaccaagggacacagccaatcggaagatgtgcaggttgttgagcacatccgcagggtccacgccaggcactacttcaaagctcagcacgccgccggcgcccttcagtcccttggcggcgagtcgctggtcaccggcccccggcaggcccgggtaatgaacggacttgaccagcggatgcgcgagcaggtaccgcgcgatggcattcgcattctcctgctgccggtccatgcgcagggccaatgtctggatgccgcggcgcaccgaatcgcattcagtgggcgccagtacccctccaagacggttctgggcgaagtacacgcgattggccaaatcctcaccggagacgaccacgagaccggcattgacgtcggagtgaccggcc

SEQ ID NO: 3398 - DNA, 18277 bp, Unknown
  R151_18m  MAG No. k141_32078
acgccgagttgacttcctgaaaattgcccctattgtagatagagctgtctaaaagacaagccgacgcggggtggagcagctcggtagctcgctgggctcataacccagaggtccatggttcaaatccatgccccgctaccaataagccattaggctcaaggaatttggccggtgcaattccaaggaattgcccggctttttccatatctggaatcgtccacgacgttgcgccattcattttctgcgagatcaagccacgcgacacgcccagagcgcgagacaaatcggtctggttcttatcgcgcatcgcaagcgctacacgcatgttagtgctaattaccttttccaacggaatcacttgggtttccggctctaaagtttgtgtactcatacttaacactctaccatgttgttaagcagaatttagcaattctgcacctactttctgtttagtgtgactaaaacatgggttatagtgtttagcgtggctaacaaatgtattggaacaacggctaagcgagtggacatggttcttcgcaacgcacattttagccggtctgcgcttgccgaggagctgggcgtgacgagatcagcagtaacacagaagttcaccggcaaggcacagttcactcttcgtgacctcagccgcattgctgatttcttcgatgtgagcgtcgatttccttcttggtcgttccgattatgcgaaaccgttggaggtggcgcaatgacgattcttgcgggtgccgtgttgctgtttgttttttgtgcaggcgtgtttctccttggtatgggcggatacgtctctgtcatcagttttcttgaggacgattggctgggtgtcgcctttggcgtgcttgtgggctttgcggggttgttgattgcatctctcccagtggtggtccttgtctccgggggtgtgtcatgagctggtcagcctattcccccgcgtattgcgtggtatccgttggtgtcgagccagttgattgcatgatcgagcgggcccccgtccttgggctgcatcgtcgcgggaattgttctgcgctgtggagcgcagtccggggtgttttggaacaattcgccacagcggtacttcatcgcttttcgcattttgcgggtgggcttggtatattgccgtattcggctaggcaacgcgctggtgccgtccagctggaatctgtcgatgtgacgcacggtgacgtcgttatgcgtcgcgtagatgaccaccacgtcctcggcgtcgccggtcacgtattcgttgaagaactctccgggcataaggacgtttcgaggcatgtttgggtcgttgacgttcccggcggaataagactcgcatctaaaccatatcgattggatgagcacaccggttcctccgacgttctggaatcgtattgcggtgcgtggcgatctctccgctattcttccgacgttgagcatcccgtccatgagacggtcgcggttccgcttccatgtgcagacggccacgctgaaggatatcagcgccgctatggatgccaaaccattggctatattcagcgcttcttcaatcatgattcttccttccttcgttcgttcgtcatgtggcttggttctttcttttcaagcctacggcgggggaaggaacccctttcaaccattcaaacgatggaggtttgccatggatagtcgtattcgtgtcttccgtgagcctgatgggcggttccgtgttcgcctgttgggtttctatgggcctcacgctcatttggatgcgattatcagcgtcgatgatttgcgtcagtggcgcgacaagatcgatgaagcactgaaggaggcaaccaatgtcggtgtttgatcccgagtccagcaggaaccgtttcagtgcggagttcaagctgaccggtgatggtggcagtccctacgagttcggtattcggttcagtgtcgatggggattacttcgcgttgggcggtttgagtatgggtgacatggtgcgtatcaaccgtgagttcgccagggttatcagggaggcgaagcatgcacgggctttataagggtgttctcgtgttctgtgcggtgttcgtgggtttgattctggccgtcgtgggcttgtgggcttgcgtgggcgtgatctgtctgtgtgcgggcatggtgttggcggatgtgccggagcgtatcggtgggaggtttggccatgagtaggggtgcgccgaagtcgatgggttaccggtttcagtcggtgcgtacccgtgatggcgtgatgctggtggtcacgccgtacacggagcgtggtgattgcatggcgaagttgtatgcgttcactcgggaggaggtgcgggcgctgatctcgtgtctggatattctgccggacgggccggagtagcggtgattattcggtattcggcgatgtattcgcgtgtattcgttcgtattttttcgcgtgcccgacgctgattcgggtcattgagaatgtaatggctgtgatggcgcgtatggctacgcctagccctacctatgcccgctgtggtggcgggaagccggccgcattgcaactgcggtacttgtgagacgaagaggttgccaccgaccctatccagccgctggtaaaggcggaatcgggcagcatcaccacgcgattgtgtggggctggatttggggaccattcccggcgggcttcggcccgctcttgcaatcgacggccgaccgaccgaaagcgagacccacttgaggattctcggccgagattacgtgttgcgcgtctcggccgagaatcttcgggtcttgacctctccagcctcactcccaaaagggacatgaaaacgataaggggattacggattatgagcagagcgacgttcgagaacatcacgttgaaggacgcgggaatcagactgcttccgaagctgaacgagttcatccgggcgaggaagaccacggagagcttcgaggtgacgatagagcaggtggcacgctgggccggactggtccgacgcaacggacgaatcgatgacaaccagacgtacaggatgatgattctggccgaatgcccggtgtccaaggtcaggaagtacgggatgcgttgctgggatgcgcgcgaggccttgcaggctttggcgaaatggacgggctcgtgggcttggatggtggaatgatggccgcccgcacgaagccgagcctcgccgaggcattgagcatgtggacaagtccgcatgacgcggcgttgctgcttgacacgttccgcctcgcaatccttgcgcttgccgatgagcagcacaccggcttgccggattcgagccgtgtgcttcggatactgcatctgcgtacgggcacggctctggccgcgttgggtgcggattatccggcgatgggcgtgcgccgtgtcggcaaggactggactttggacgcgcgccagttcgatttgtgggcgcagggccagcgaagcgtgttccggcgcagggccggcgaagcggtgccggccggtggcgtgcagtcgaggctgaatctgttctagggggtcggatgaatccgagagcgaagcttactaccgcgcaggcggccaaatacctgcaccggtcgcaacgccagatggagcgcatgcggtcggatggcaccggcccggagtggttcaaggccggtgatgccatcaacagcccgtgtttgtacgaggtggccgatttggatcgttgggtggcgtccaggaaggacggtcgtgatgcgtaggcaggtgatagacccgctggtgcgccgtgaggtcatcgagacgtggggcaatgattgttggctggagctgccgggctgtacccatgtcggtgccgaggacgaccatatcgtgccgtattcgcatggcggtatggacacggtgcctaacatccggcgtgcctgcaagcattgcaacgcatcaaggcaggaccgtgtgctgtacggttacggtgccagactgcacatggtgatcgtgcctcccggcagttgtgaccgcgaggccatggattacatcgacgcgcacaaggcgccgggtgatcccgtggtgagcttcaccggtcttgcccgtgcgatgggtctgaccgaccccagcctgggcgagcgtcgtgccgtcgcgatggcgtggagcggtgcctaccgccagttcgcgacgagcccggaacccgtggacgtgtggctgacgcgcacgatgcccaacagtcgccgccaccctcgcatgctcgatgaatgggttgcgctcgactatgacatccatgtgcttgaccctggcttcgaggtggagtgggagcgcgcggccggcgaggaggcacggcgtcgtgtgcgccagtggtatgcgctgcatctgtcgcaggctctgatcgacagcaggcagtcacggaggcgcgcgaggctcgtgcagctcgggttgagagcggacgcggcgaagatcgcggcgaggccggcatggtagccgcgttttttaaacggacgtggccgaccaagaccccgcgcccacttttttcttctctcgtatcagaaaaaaattttttggaaaacggcggaattgcaacgaaaagaggtgaatgaatggcattgcaggaagcattcgaaggattcgatgagataggcaattttcagggattcatggaaaagaaaacccgtcagaatctcacggagttcttcagggacaagcaggtgaccccgatagcggacacgctcgctgctctgctcatcgccatctcccacaacatcgactcgtatctgctgaagggcaagaacgcgagcacgctcttcgacagcttcgccagcaatcttgatcgcttgcaggtcatctacccggaacgggtcaagcttgacgacgagctggccatgctgttgcaggaggccaaggcgtgattcccatgaggggaggcaccgcgcggaaccccgagcggggcacggacggcggcaaggtgggccggtttgcggccatgctcggaaccccgctacttccttggcagcagtatgtggcggacgtggccggcgaaatcgacccggaaaccggaacatacttttatgacacggtgatactctcgacgccgcgccagtgcggaaagtcaacgctcgtggacgccacagacacccgcaacgcccaatgggggccgggccgttacatctactacctcgcgcagaccggcaaggacgccggcgaccacttccgcaaatacctggaaaaactgcacgcgccggaatgcccactgggggcgatcgccttgaaaccctaccgcggcatgggcaacctcagccagacgttcgtcaacggttccgtcatcatgccgaaatcggttacccgagtcgccggccacggcgtacagggcgacaagatcaccctcgatgaggcgttcagtctcagcgaggaaaccggcaacgccatactcgacggcttccttcccacgaccgtgacccgtttgcaggccaccggtgtacagccccaactgtggatcaccagcaccgagggcaccgcagaaagcacgttcttcaacaaacgcctggacgaatgcagggccggcagccagtcacgccgtacctgctggttcgatttcggactgccgcccgacgccgaccccgagaatctggacctgataatgcgctatcatccggccgccggcctgctctggaaccgcgacaagctccaggacttccgcgaacagtggagcaacaacccatccggctgggcccgagcgttcggcaaccggcgtgacgtgggcctggccgaacgcatcatagacgccgacacctgggcgaccacggccgttgccccactcgagccctcgcaacttgacggccggcctgtcgtgttcgcagtcgccgttgacgttgacggcacccacacgagcatatccgccggcatctgcaacgacgacggcaccataaccgcgcaactgctcgaaatcctggacggcaccggctacgcccccgaggagataagccgcctgtgcggcaaataccacgcgccggtggtgatcgacagcaagggcaccgcatccgacctgtcggaccggctgcaccggctcaccgacaataccggcgacgaagcactggacttcgtggacatggacgcaaccgactacctgaccatcgggcaaagcttcgtgagcggcctcaccaacagaatcgtgttccacgccacggatgccgacctggacgaaagcacggcgaactcggcccgcaaatggtcgggcgacgcttggcgtatctcacgacgcggctcgaccggcctcacgtcaccgctggaatcctgcatgctggccgcatggggagccgcccaccggccggaggaagacggccccttgcaaatctactgaccccgtttggcggtacttggcggtacttggcggtacttggcggtacttggcggtacttggcggtacttggcggcacggtggtggacggttcggtggttccgcttccataatcggcggcatgaacgaacgattgagtctctgggggcgagtgaagctcgccggccatgtcctgacccgcagcgatgcgggtgacatgcccgagggcatcaggccgcccagccgcgagatcgagcgagacccgttgagcctgtccaccgtgtttcgcggtgtccaggtgttgcagaccgcgataaccggtctgccgatccatgagatgcgcggcggtctgaagctggacaccgtgagctcgctgatcctccagccggacgtgaaccgttcccgccgtgacttcctcgccgacatggtggccagcatggttctggacggcaacgccttcgtacggcttgtgcgctacgccggggaggtcgtgacctgcgaggtactgccgccctcattggtcaccgtttcggacgacggccgtgatccggcggcgccgaagctccgctattcgtatctgggccacgactacacggccgaccagatcgtgcattgcaagttcctcaacgttccgggccgactgcgcggcctcggccccatcggcgcggcccgcgaggaagtcgaaagcgcccagatggcccgcgactacaagacgaagttctacaccgattccagcaacctcaaaggctacctgcgcacgaaggcgaaggtgaccgagaccatcgcggcgcaagcgaagcaggattggcgggccagcggcacggccggcgacatcaaggtcatcggaaacgacctggaatacgtgccgttggacatgaagcccgccgacctacagtttctggagactcagaagttcgacaccacgcagatagcccgactgctcggcataccggccagcatcatgctggccgcagttgacggctcgaacctcacctacagcaacatcgagcaaagctggatcgagttcgccgactacacgctggccgcctatgcgggcgagatcgaggaactgttcaaccgtctgctcccgcgcggacgcaccgcctcgttcgactgggattcaagccgccgcgccgacatgagcgaccgtttcaacgcctacaagaccgccctcgaatcagggtggatggaagtcaacgaggtgcgcgcacgcgaggcattgcccccgctcgtcaacgcgccgcaaccggaagaggtgaaccagtgaaccgtcatgaaatcggattgaaaggcgtatgcctgcgccaggcagaggaaggcgacgggcgcacattggagggcatcgccgtgccgttcaaccagatcatcgacacctgggagggagccgagaccttcgacccggattgccgtttcgatgaagcggacaccgcgaagctctgctaccagcacggcgagctcatcggccgcatcaccagtgccgaaagccgcgaggacgggctgcacatcaccgccagaatcagcgacacgcagcagggccgcgacgtcgtgaccctgctgcgcgacggggcgctcgactcgttgtcggtcggattcatcccggtggagaacgaggtggacaaggccggcgtcacccaccgcaggcgcgtgcgtctgctggaaacgagcgtggtcagctggccggcgtacgaggccgcgaaaatcaccggccagcgcagcgccgaaccccacgaaaacatgtccgaaaccggaaaccaaccatctaccgaaagcgaggaaacccgaatggacaaggaactggaggaaactctcgacggcatcaaggacgagcagcgaagcctcaaggccgcattggcccacgttggcgccacggagaaaccgaagccgattggctccgaataccgcaccgccggcgactatctccaggcgctctaccgcggggaggaaaccgccgtgcagctcatgcacgaatgccgcgacctcatcgtcaccggcgacaccggaaacaccgccacctggatcgccgacgacctgcggctcatccagatgcgccgcaaggtcactaacctgctgacgcacgacacgctgccggccaagggcatgaccatggaatacaacgtggtggcatccgacaccacggtcaccggcaagcaggccaaggaaggtgacaccctacagttcggcaaggtcacgttcggcaccaagagcgtcggaatcgacacctacggcggctataccacgctgagccgccagaccatcgaacgcagcaccacgccgatgctcaacaccgcgctctccgccctgcgcaacgcctacgccaaggccaccgaaaccgccgtgcgcaactacctgtacgccaccatcgccgcccagcgcgacgcctcgacggatgcgaacaagatcgacgcgccggcggcgttggacgccatgaccatcgaccagtgggcgaccctcatcatggatgccgcggaactcgccgacgaccgcaacgtgagcctcacccgcctcggcgtttccaaggacgtgatggccgcactcatcaaactcaaggacaccggcagccgcttcttcgacctgagcggcgacggcaccgacacgctgggagacttcgaccttaccggcatcgcgggcaagttcctgcgcgtgcccgtgcagatgcttcccaaggcgccggccggcaccgcgtgcttcatcgaccccgaggccgtgaccgtatgggagtcgggcggccccacccagttgagcgacggcgacccgaccaaactcaccgagaactattcggtgtacggctatctcgccgtggccgcatcccatccgctgggcctcatccccgtgaagttctcgaccacatccgtcaagtgagcatcatggccgaacccgagtggaagacctatgaggcggccgtgcgcgacgaaatcggagtgccggccggcgacgacgaacgcatacagcgcgccatcacatccgcccaggcatacgtgaccggcgcgataggcagccacaccgtgccggaaaccgtactcgccgactgcgtgaccgcatgcgccgcggacctgtacaacatgagggacgcgcgactcggcgtgatgaacgtgacggacggcaccctggaaccgttcagaatctcaagcgacccactgcgcagcgtctggcagaagctcaacgctgccgacgtgcccaccggcggaatggtgatcgcatgaacaacctgatcgtccggcagcgcgcacggctcgcgtcgaaattccgggaaatactcggggacatggccgtcatagtcaccgacgattcgcagcaggccagacctcagtccggcaaggtggcggtgctcatcgaatggcccgacatcgactatccgatatggggtaacgacccggaaatcacatggcgcgtggatctcatcgccggcaccatggccacccaggcgagaaacctcgaacccatcagcgacgcgctcgacctcatcgccgaatccgatttgtgcgtcatccaggcgcggccggtcaccttcaccatcaccaacgtgggcgacctcgccgcataccagctgaccatcaacccatcagacctttagaaaggaaacaaccatggcagacaaaatccgcaccctaggccccggaagcctcgtgatcggctccgacaccgacacctacaagctcgacgtggactgcacgaacgcggaactcgtgcccgacaattccagcgaggaccccgacagcttcctcgacgggcacgtggaaggaggcgagctgaccacctcatggaaactgtcgggcagcatcggcgaggactattccatgagcggggcccaggtgtattgcctgaaccatgccggtgaaacgaaacacgccaaattcatcccgaacaccaagggagcgctccagctggacatgagcgtggtcatcgcacccatcgcgttcggcggcgatgtgaagacccgcaacaagaaggatttcgagttcgccgccaccgatgtgaaggcctcggaatacaggcccaccaccgaaagcgcctgatggccgacaaagccctgtacgtggtcggccagaaacgtttcgttgccacgatgcgcaaggccggcgcggacatgaaggaactcaaacagatcaacagccaggccgctgaactggccgccccggccgcacgaagccgcgccccgcacggcaagagcggacggctggccggcagcatccgagcaggggccacgcaaaaggccggcgtggtccgagccggccgcaagtcggtgccgtatgcgggcgtcatcaactacggatggcccaaaaggcacatcaaaccacgctcgttcgtcaacgacgccgtggccgccaccgaaccgcaatggaccaaactctacgagcaattcatcaaaaagacattgaaccaagtgcaaggagcatgacatgagcaaacaacccaccgcgaaagtcacctatacggacggacgcacggaagaggcgccactgaccccccgcgtcatcaccagcgtggaggaacacgcgcagaaggcgggatgggctcccggagaaggcagcaagctgcggatgtcctactacatggcgtatctcgcgcagcgatatgccggaaacacacaaatcccctatgagcagtggctcgactccgtgggcgagatcgaggtgaaaaccccggaaaaccctaccgaatagacgcctggccagacggttcactgggccgtctctcactgatcctgtccgccagattcggcggcagcccgtgggaatggcggcagaaggccagcgaactcgactggggaacgggcatcgaactgcttatggaggaaatggaacgcatggaggaggtgaaccatggctagaagcgcgatcatgtcggtgcgcatcaccggcaactcggacgacgccgtgaaggcgctctccaaggtgacgggcaaggcggccgcgttcggcagcttcatgggcggcgtcgccctcaagggcgtttccgcgctctgggacacgctcaagggcttcacctcggacgtgatggccatgagcgattcgaccgacaagttcaggaacacgatgaacttcgccggcctcgacacctcagccatagacaaggcatctaaggcggcacgccaatacgccgacgaaaccgtctacgacctctccaccatccagaacaccaccgcgcagctcgcctcgaacggcatcggcgactacaccggcctgacccaggcggccggcaacctcaacgccgtggcgggcggcaacgcggaaacgttcaaaagcgtggccatgacgctcacccagacggccggcgcgggcaagctgaccacggagaactggaaccagctggccgacgcgatccccggcgcgtccggcaaactccaggaggccatgctgcgcaacggagcctatacgggaaacttccgtgacgcgatggccgacggccagatcaccgccgacgagttcaaccaggcgctgatgcaattgggcatgagcgacgtggccaaggaagccgccaaatccacgcagaccatggaaggcgcgatgggcaacctcgaagccgccgtgacgggcggcctcacggatgcgttcgatctcatcaagcccaccatcacgtcggcgatgggcacggcggccgaaaaggtcaccgcattctccgacagagccgtcaaagcgatcaagggcatcatctcgttcgtccgggacggggatttcaccagcgagttcgcgcaggcgttcaacgtcagcgaggactcccccgtggtcgatttcctcttcacgctcagagacacggccgtcggcgtgttcgacgcggtgaaatcacgcgccggcgacgtcaaggccggattcgacagtctggctcagggcgtggggacggtactggggccggtggtccagttcgccgccgattcgctcggcctgaccaataatctgaatgcgggggccacggcctcacagacgttcggcgacattctcgatttcaccgcgaatgcgttgcaggcggccggcacatggttgcagcagaactcccagtggctgggcgccctcgtcgtgggcgtcggtggcgcggtggccgcctaccaggcttggcagaccgccatagccgtatggcagaccgcaaccaagaccgcgaccggagtgcaaacagcgttcaatctggtaatgaatgcgaacccgatcatgctcgtcatcaccgccatagccgcgctggtggccgcgctggtctacttcttcacccagaccgagaccggccggcgcatatggtcgaacttcaccagctggctcggcacctgcgtcaacaacatcatcggcttcttccaggcactcccaggccgcataggcgcgttcttcagcaacgcggccaaaggcgcgacaaacacgtggaacaacgtggtcagctggttcgcgggactgcccggccgcatcctgggagccatcggcaacgtcggcagcctgctgtggaatgccggcgcgtccatcatcaacggcctgctcaacggcctgaaaagcgcatggaacaacgttaccggcttcgtcggcggcatcgccgactggatagcgcagcacaagggccccgccagctacgacaaggtactgctcgtgaaaaacggtcgcctcatcatgcagggactggccaagggcatgaacaccggcttcgacaccgacgtgcgcaagacagtcaaacgaatcaacaccggcatgggccgtcttgcattcgagacaccggcagcagccacgacgcagccggtcggcaacacatacaacatcaccgtgcagaccggcgtgggcgacaaatacgagatcggcaaggaaatactcgaatgcatcagaacggttaaggacgtgcgctcatgagcggccgtctcgcattgctgtacttggatcgcggcaacggctgggagtgtctgaccccgcacgagaacgaccaggcggcgcttgaatcattgtccatcgactggggcgtggactcgatacgcgaccagccggacgcgccggtgctcaggttcacgatacgcgaccgaaccggcgacctggccggtgatgtgctgtatctggccggtgccaaggtgtggttgcagaagacggacgcggtgtcgtggcaaaggttcgacgtctccggccagtggcaacaggtggcggagtcggtgtcgtgggccgagcttgccgacttgaagccgccggcgattccaccggcgccggacagtggcctggaatccgtattctatggccggatcactgtgggcggcgaggtcacgcagcgcaagacgaagaatgattggctggtgtcgttgtatgcgttgggcatgagcgtactcacgcgccgccaggccgcgcaggggccggaacagtccggggccctggccggctatcactggccggcgtccccggcggaacgcttggacgtgctgcaagggcgtctggccgcgttgggtgtgccgttcgacgatatgtctttggcgtggcttcgccggcatctgccgcctgcgctggccccgtatggggatgattcgcaccccgatctgatcacgctcgtgcgcaatctcgcgtcgtcgtcgccggattggccgctggtctacgaggcgtacgaacagggacggaatacgccgggcgtgatgacggtggggttgctaggctcgcccgcgtatgtggccatgctgcctgatggcacgctggcgacctcgtggcaggggcatgtgaccggcagcgtgcgcgcggagctggtcatggtggacgacaccacgttggcgttgcccgatccgatcactcaggtcacgctcaagggccgtaaggtcacatgggatgcggagaagtctgcgttcggtttcgaggattcggagctgacgttctcggctcgcggcctcgtgccggataatctcaccgagtcgcagaagagcgtttccgtggagtcggacgcggtgatccgcgacgacagcggcggccattggacggccggcgtctacgcggcgtcggattccgaccgtttgcagcgcgcggccgtgatcctggccaacagcacccggttgcgcccccggtcgttgaaggtcgaatcacgcaaggtggacgacgtggagcacgccatgcaattccacccgtgggccggcctgcccttgactttcgtgcacaaccgttacacaccgttggtggcgcgtgacgggacgccggccacggctggcgcttggctgcctgtaggcggcacgctcacctaccggcaccgtaatggggaggccgtgtggagcaacgagcttgagttgcatccattgccgcgcgacccgaccatgcgaccgttgcgctggattgatttgcggccgttgacctgcaagtgggagcggctgccggaaatgacgtggtccgaatggggccagatcgatttgataaccacagaacaggagctaggagcatgaaagagacaccgaaacaccatatccgatacccggatggcaccgaccttgtgcgtaacgcctcggcgcagttcaaggacatggcccagagcatcgacaacaacatcgatgacctgcccgatacgatcctcgtgaaggtgaaggacgcgaccgcgcgaacggagaaggcggcggccgacgcggagaagtacagcggcggcgcggtggcgatgcaggatggtgccgtggccggcctgctgggggatgcttccagtgccacgcgcgcagcattgtcccacgctcgctatgcgcccggcagtcacgcggtgttcatcggcgacagcatcacccagggctatctgaccagcagcgggtcgaaacggtggagcacgatcctgtgccgcatgttcgactggatcgagcacaactacgccgtgggcggcaccgggtggatcaacggcgcgcaagccaaccggttcgacggccagtgctcccgcgccgccgcggactcgtcgtacgatcacatgctagtgtcgcatgtgttccttttcggcggcgtcaacgacggcgccggtgatacggccacggccacggagcgggcgcgccagtgcgtcgcgacattgcgcgccgcgtaccccaacgcgaggatcgtcaccggcacgggcatgcagggccccctgaaggtcggggccacgcagggcggcgtgcccgtcgtgtcgcgtctcgtctattacaggtctgtggcgcgcgccctgcagggcacgggcgtggtgtgcgtgccggactgctggcggtggctgatgacgcgccccgatttgtgcaacgacgacctgctgcatcccaacgacgcgggccacgccgtcatcgcgggcattatggcccagatcgtccagggcacgtactcgaccccgaccgtcgccgacaaccagcccgtctaccaggtctcgtacgcggccaacgtcaccgtgcgccgcatcggcctcgacgtgggggccgaccgcgtcaccgtgtacggcagtgtcgaggcgcaggtggtcgacgacagcagctacctcaactcgttcagcatgcgcctgccgctgttccagatgcccgactggtgccggatcgtctacaatgacgtcatcccggccaagcccgccgtcagcgtcaacgggctatggaccctcttcgacgcctacctgtacgtcgacgacgacagaatggtcaacgtcagcgtcaacgcaagatacttcaaacccggcgacgacagacccgaaccacccctcggctacaagttcaaagccggcgacaagatcaagacttggatcaactggaccatgcccatctggggatattccaattaaggagcaacatgcagcaaaccgaaatagcagccctcgccatcgtgggcgtactcattgccatcgactacctcacgggtctcatgaaggccgccatgcagcacgacatcagctcagagaaaatgcgactcggactctggcacaagtcgggcctgatcctggtcatgctcctcgcagaagtcgtcgaacgcggccagcagtacctcgacctcgggtacgcggtgccgctcatcgtgcccgccgccgtctacatcagcgtcaccgaaatcagcagcatcatggaaaacctcggcgagatcaatcccgaaatcgccaacagcccgctgttgcagctgttccgtagccagaaggacccgaacgatgaagacggcaagtcatgatcctcgccaccgcaattctgtggatcgtcggcataacggtcgtcatgctgttcgtgcatggcagcgaccatcgccgctgaccaccgccaccgactggctgctcgccatcggcgcgctcctcttcctcactatcgtggccgccgcgttcggcacggccatcgcgctgtccgttctcacgctcatctgaaaggaaaacaaccatgacaatgacaatcgaccaattcatccagacgtacaacggcagggccgttgacgtcgatggggcctatggcggccagtgctgggacctatggagccggtacgcgcaggacgtggccggagtgccacagtcagccaccaacaccagcaacggctgggcgggaagcgtctacacgaccacctacgaccgtcagcccgcactacgcgccaaattcgaccgtctcccggccagcgcaacgccgcgcaagggcgacgtggccttctggggcaacgcccccgccaccccgtccacgcacgtggccatcgtcctcgcagaccagggcggcagcctcttgtgcctgacgcagaaccccggcgccacgcaccagggaagcatcaccaagaacggactgctgggctatctgcgacccacggccgccacggccgcgacaccatccggcatcgccggcacatggcgcatcaacgtgcaggcgctcaacgtgcgtgaccagcccaccacacgcggcaacgtcgtggcccagtacaaggccggccagaccgtcaacctcgacggctggaccggccgcgcggacggctacgactggggccgctacatcggagccaccagcggacaacaccgctacatcgcactgggcccggccggtaccaccgactatctgaagcgctgaaccacagaccccgaattatacggccagcctgacggcatccaacgcgctgcgtagcctgctgtcgggcatggccacatagatttgcgtggtctccaccgacgagtggccgagcagacgcgcgaccaggaacaggtcgtgcgtctgctcgtaggtcttcgtggcataccggtggcgcaggctgtggcagccccacccgtccggcagcaaccgtgatatatgacggttcacgtagctctgttcaacgtggccgttccaccggccgggcagcagccaaccgccgcaacgttcgatatattcggccagatcgtccggcaggggcacgatgcgctgcttgtcacccttgcccgtgatgaccagcgacttgcccaacaggtcgtccatcacatcccgactgttcacgcgggcaatctcggcacgccgcaacccgcattcggccgccagccgcagcatgacacgctccaacggggtcgccttgtgcagtgcggcgatgatgtaccggtcggggcacgggcgcggtttcggtttcggacggcgcaccaccggcagcagctcgctaggatcatccgccctgcgaccgctctcgtgcagccagcggaagaacgacacataggtcttgcggtagccgcggcgcgtttctgtcttccacgcctgggccgatgtccagttgatgaggtcttcggcggtcaccgtcatcggtgacaggccgatgcatcgcgccgtgtgcgacagcttgttgcgccggcacctcaccgtctcctcgctgagaccggcggcgcggagcgcgtcaagccaatggttcatgtcatcccgccactgagcagggggcagctcttgtttttgactcatggcacatcatcgcaccacggaatcacgccgctagcataaagtcggataatcgggctgcatggatttgaaccgtggacctctggggttctgcaaggttcccagaggtccacggttcaaatccatgccccgctaccacattcagaaggtcggaatcctattgggttccgaccttctgcgttatgccgtctcaccgcctgcggcgcttgactatggcaagcatcgtacagccaacggaaaggaacgcaaccgcc

SEQ ID NO: 3399 - DNA, 23685 bp, Unknown
  R151_18m  MAG No. k141_32166
tccacgtcgtggccgccggtgaccaggaacccatcgcattggccgaccagctgttcgattgtagtctcgtcgtcggtcagcggcagcatcaccgggataccgccggcttcgatgatgccgtcgaaataaccgggcagcatccacaggctattcagtgtgtcgtcccacaacgggaccacgccgataagcggacggggtagacggacggtggtcatcgatacctccagacacgggcttactgatcaagcaactcaacggattacagtctcgaacctgaacaattgtagcagtgtgacgcgggcggtagggggctgcggacgtgcccggcgactcgaccctggtcgacgcgctcggcaaacgcaccgaccccgacctgaccgtgcccgccgacggcgacggaaccgtcacggtcggtcatctcgtttgttccaggcgtcgcccgtcgtagagacgccggaacgatggcggggaggagcgtcagcggtcgtcgcggccatgacggtcagtggtcgtcttccgtctctttcgaggcccgctgtgacacggctccaatgcatgcgccgtcgaacaccatggttccgacgagcggcaggccggttatgtcgccgaacgtcaacgccctgtctccggcctgctccatgatggcctccccgtgtgctccgcgaaggatttatgtgctcggctgccccattccgtcgttcgttccgtcactgcctcgtccgcgccatcctctggtcagcggctgccgttcgtgcatgtcgacgtcgcgtgaagaatcccaataccggcgccatgaccagcagcggcactgtggtcagagacgcccacgggacggacaccgcgtcgccgatccacccgcagacgggcgtgagcacggcggtgaacgccatgagcacgagcgataccacggagaaggccgtggaacgtacggcatcgctgatggcgtcatgcagctgcgcggaagcgatggcgacgacgaacatctgtgcgcaggagaacaggaagaacgccgcgatttgggccggtcgggaaggaaggaacgcaaggcctgcggccgaagccacaatcaccacgacggcgatggcctcgtctgtggcgcgtggacgcaagacgccgatacgggatgcgatgatctgcgccgcgttcgtgagcagtaatcccgcgaacagccaccagacacccgattgcccgacgcccagcagcaactgccagaacagcagcacggaaagggttcccagattgaacagcacgagatgccagacctcgggacggcggaacagctcggagaccgaggcgaggatgccgcaccggccttcaagggaggattccgccggaccgtccggcgtcgtctcttcctcgtgatccttccggccgtcgtggcgtccggccagcaaaaggaccagcggcggtagcgccgccgtatagcagacgaatgcgccgagccagatgagattcggggcgacgaggaacagcagagcgccggccaggcctcctgcgatcgtggaggccccggtgatgaggtagagctgcgacatgagcgtgcgcatggtcagcgacgggtcacgctccctggagcattcgatgtatagcgctgaagtggcgccgctctcgacggcggcgccgacgccggtggccaggttcgccgcgcagacgaccgggaagctggccggccaaaccagcagcatgaggaatccggacaggcggaaagccgcgccgaccatcagggttttctcgcgagaccagcggtcgaaaagaaccgaggtcggcagctcggccagcgtcgtgcttacatcgaagacgacgttgactagcgcgatcataagaatcgtgagccccgcgtcgcggtaggcgaccatgtagtacacggagaagcagccgcatcccatggcgatgaaggcgttgtacaacctggcaagtgtggacatgcatacacttccttacatgaatagttgattgattatttcatgagttgttggaatgtcttctccgaagacatatccgaacatgcgcagtctgctttcaacgcatttggggcatccttgggtccgacgaatgtcgtatcgcattgctgccatatagatgcctacctgaatcacggaaatcatagtcatgctttcatgagattgggggcaacgccgcaaagattttgagcgctgcccccaggatttcacttccgtcggcgagttcactgcatggcgggcgtcggacgggtggccgcgatcggcgggtagggcttggcctgcataataggcgtggcgatgatactgtttggcatgttactgcttcttttccccgttgtctaattgaaagtgcagcgcccgttagattggagattgtccggatagccaaacggaggggtgttgcgccttgggccaggtgtattcgcgcctgtcggaagaggaacggcaggtcgtccggattgggatgggcaacggggcgggcgtgcgccgcatggccacgtatttcgccgacgaactgctagaatcagccgagaacaaggatgttgcacttacaaatagataacgggtgtatacggccggaaaggccacctgctacgggcgtgtcatcagtttgacgatcgacccggatcgcccgttcgtgttcgaccagggtttcgtgcccatgctgtccgacggcgacgatgattggcgattcgccttcggcgtgcgcgtgattgatgtttccatgcatccggctggaggcgtgcgatgaacgtgtttggtcatgatgtgcaggcccgttactgggagtccgttgagaatcgttgcgagaacgtcgagtccatgatgcttggcgtgctggcagtcgccgccgtgggcacggtgttcgcggtgaccgtgttcgcatcgccgccactgcttctagtcggtttcatggtgctggccgctgatgtcgtggtgatcgccagggccgatcgcaggcgagaggctgcccgattcctgtgttgcatgcacgaggatcttatctccctggaggtggcctcgtgaaagggttcaccgaacaaacggcaagtctgttggaatccctggaagccgtagaccacatcgatcgtgacgcggggcgcatctactactcggaggagttcaagcgccacgtcatcagcagttggcatgggggagacagccccacggccctgttccgtaaagcaggtctcggccccgaggtaatcggcagcaaacggatcgaacgttgcgtagcccggtggcgggaccgtcaccgcatcaccgatcttcaagccgatgaagtcgcggagagcctggttcccatgagcttgttcctcgcgcaaaccgaacggttgaacgcgttcgaatcacgcatccgtcaactcgaagacgaacaggggagacaagcatgaccagtcaacgcatagccaagggactttattcgttgttcctttccgctctgtgcgatggcagccaggatttctatctgagcgtcatgacgggcacgcccgttaccaaggcaagaagcgaccgcgaacgcatccaacataattgcaaccccgccggaatgcgggaatcgagcggggaggagcgatgagtgtcaatactgctcgccgtcccggtcgcatggatctgggggagctgatgcgcatggctggaatgatcgacatgccatcgccggtgctgtcggaaagcatcgccttgggcatcgagatcggccgcctgctggaacgggacatggcttcaactcatgtcaagcacgctttgtcaaacatatccgagggaaagggatcgaatcatgatgtctggtgatcgtaccggtgcgtcgaatcccggcaaactggcgttctgtttcggtgatttcctgatgagcgaggtgaggttcggcgtaggcgacatctcctacggtcgccgcatgtcattggacacgccacgcgaaacgttctccttggacacaacgcaatgccgcgacctcgacaactacctccacacggcgttccccgccctgggtcgggctcccatggatgtgcgtcgcgcatggagggcgcgttgctcggatcccgcgatgaagctcgtgctggtcgccttggtatgccatgtcgatccgatcgaaccgggcgggcgtgtggacgtgagccttagcgaactgtccgagtggagcgaactgtcggccgaatacgtggtcgaggcgttggcgggcctgagagccctgaacctgattcgtcccgccgtccacgggcatgacatggacggggaattgatgtccattgaaatcaatccggaggtgcttcgatgagctggcagtgtgtgttttgtcaagtttccgccagcaaaatcgtcatgttgttttccgtgggatgtgcggcgggtttcccgcaggatgggcatcgttgcggttcgcccgctgcttgtgttttgttttggttggtctatttggtcatgagggcgtttcggctgtggtagctttcgccctggaagcggatgatccgtccgtggcggacggtgcggtcgatgaccgcggcggccatgttcgggtcgccgaacacgcgtccccatccgccggactcgatgtcggtggtgtagatgatgctccttgtctcgtaggaatcggatatggcctggaacaggagccggctgccttcctcgtcgatgggtgggtagccgagctcgtcgaggatgatgagccgagctttgccgatctgcgcgagttccccgtcgagccggttgtcccgtttggcgcggcgcaatcgcatgaccaggcttgagacggtgaaggatcgaacggggattttatcttggcatgcggctcgtccgatggcgatggcgaggtgggttttgccggtgccgacgggtccgtagagcacggggtcctcgtgccggtcgatgaaatccgggcttgttggctggtgtctgccccagtcggcgggcatggtcaggccggtccagtcgtagttctcgagggttttgtcggcggggaatcccgcggccttgagcaatcgcagtcgtttggctttgtccctggagtcgagttcggcgatggcgcgccccgcttcgtccttgacggcgactctggcggcgcggatggccacgtccacccgcccgccgtgcatgttcgccccgatctggtagcggttgccgtcgatgtcagcgtacccgtacttgtcggccttgcgggtctcccaccggaccgcgtcgaaccggcgcgagggcaacgggcgcaacgacttcacgtcgtcggcgaacatcatgtcgatcggatccggcgtgcggtagcggatcgacctgcccagcccgtcgcgtttcgcgggcatcaggcgtgtgagccgttcgcgggtctcggcctccatgggcgggaccatgaggtcgcggcgaaggaacccgaccgtgttctccacgccgcccttcccgctgccggaatacgggttgcggaaacgcacgtccagccggcaatggccgacgaacgcctcgaacacgcgggacagggccgcctcgcccctggcgtcccggcggccggcgccggaagcgttgtcgaccgccagcgtgcgcggcaccccgccgatgtgcccgaagatcgtcgcgagacctgatatcttgctgttcggacatgggtatcgtcactgctctttccttccccggggccggcggcaaccggccccatggttgcgtttatggtttgcgacccgggaatccaacagacagagcgaacccacgtctcccgcgatatcggagaactgactatcctgcggaaaaccagctgcacatcaatcggaaaacaccatgacgtttctacctaaagaacattgaacataaacaggcagtgcacgaactgggcgctgagggaggccatctgcccgccccccccaacagtcgcctcatactgctcgccctcgccgaccgctgcggtcccgacgggcgcagcgcatggcccaccgtggagaccctgagcctcgaggcgcattgctccgaatcgagtgtgcgtcgcgcgttgaaggcgttggaacagtgtggcacgatccgccgcggcgaccagaggctggctcaatgggatgagaaccgactgagtgcccaaggcgtaccggtcggtcgtgtgggagtgctgcatgggagttcgactcgaacacgtggcgccaaacccgggcgacaggccagggccgaacgcgaagccaggggactgcgcgtcgaccagaatcccagaaaacaggggtgtcacaatgacatctctcgaaaaccgcaggaatccaacgaatccgagacctgtcagaatgacacccctacgcgtgtgaatcccgcttccgaggattccagacctgtcattggtgacaggtctgaggtgtcaccagtgacaggtctatataagaaacaaataaacaaacaaataccctttagcccctacggggctttcccaccgaaatcatcagccacgacgaacacccctagcgccgacggcggaccgatctcggagccatgcgaggaaaccggcaaacccgtcaaccatgcggaggacagcgcggacgatgcgcttgacgctcttgccgatgcccgcaccggtctggggctcgaagccccaaggccacgccggcggaccgcaaagccgtggcgaatctgctcgaccgcctggccgccaacggcagcgaatccccgatggccctcgtgctggaggcgatcgcctacctgtctgagcgtgatttctggttgcgtcaggtcatggccggccgggatctggccaaacgtttcgaccggatccgcaacgacatgctcgtcgaccaggcatgccccgcacgccgacgagtaagcgataccagcgaacctgcggaacctgatatcccggcgcagccgtggatccccaagcccgtcgaagccaaggccgcaccggtgcccgtgtgtcggcaccacggctcctgcgagcacgtcaaggccgccctcgccggctgagaggccaagttcagtcacgagagggacgggttcgccccgagcgagtggatgatcgcgtgcgaaagggtcaccgaactgctcaacgagggcgtggagcccggactggccgctgacgcggtcgaactggaaaccaaacacgaaccatcggatctggaggtgaccgcatgagagccaagacgctcgacgaatgcagcgaagccggtttcggtgacttcatcctcgccaacccgtgccttgaccggcatcccgacctgatgtgggtcatcagacgggtctactggcgcaacgcaaagctcggacacgctaccgccgtgaaggcggccgccgaatgcgcacgccagtattcgcagttggatccggccttgacatcgatcaccgtgggagaggagctgaaccatgtacagacgtgaagcctattgcgccgtgatcgaacggcagaatccgaacatggccgacatgctgtggcatcccgccgagatccatcaggcgggcgactcgaaaacacagtgggccaaggactggcagcgccgcaaacagcaacgccagacggggatggcggagaccgcatgagtaatgcagacagcctttcaaaaccgctctgagagactgagtcgtggggaacgggatcgccggtcccgctcccatggctgcgaatacttcattaactcaatacttcaggaattcattgaaacggtaattggaggatgacaatgatcatcacgatcgctaatgcgaagggcggcatgggcaagaccacgtcggcaatgtatctggctcaggcggccaaactcagggatccagacctcgaagtgatggtattggacgcggatccccaatccagcgccacccagtgggcgctcgatgctgaggaccagggcgtgagcattggataccgggtcgattccgcgaacagcgctactttgagccggttgggcaagtgcaggccgtcaggtctgatccgagtggacaccccgccgtcgggcgcggcgttggacgaggcatgccggatcgcggatttcgtgatcattccaacgagtcccaccccgttggatctccagcagacattcaaatgggaccgctccatcaaggacaaacccccattgcgtgctcgtgctcgacgctgatctgaggacccctgcatgcagggccacgatcgacgcgttggatgcggaaggcgtcgcgcggttcgacgcggtggtttgtcaccggcaggacatcgtgtgcagtttcatggccgctccttcgaaactctgggagtacgccgacgtgtgggccgaactcgtggagcgctgtcatgagcattctcatcgggctggttgcccgtctcgtggtcctgttcatctgctggatcgctgtcggctggttgctcggcttcgtgctcgcgaggctttggccgggcatggacgagcgggcctacacgtggttgagccgcttgatggcgatcctgttcgtcgtgctgctcgtgatcgtcgaaatgaactatctggagggattgaaatgaagaacatgaagggtttcgcgcccaccgccgcaacgcgcgaggtcaggggcatcggcgacgtgttccgcgaggaaccggctatgtctgagaccgaggatccgtggatgatgacgtccatgcgcctgcattcctcggtgcgcaaccgcatcaaggtgtacgcgttctcgaacgggctgcgcatgcaggatgtgatcgacgaggcgctgcgagtctacctggattcgaaaggggcgtgaccatggccatggattcgaagaccgtgggcgtatgcccccgctgcgggcatccggtccactggatgtgggcgggcaacagcgccaaaaccagaaaggaatgcggctgctgcggctaccggggtttcgtgatcctgcgcaagctcgacgcggacggagcacgcgacacggtgcgcgccatgcacgagtgggccgtgcgcgactggaagcaggaagcggccgcccctgcgtctcatgttcggagaacggcaatgagcctgattggtccatgctgcctctatgcgatgaccgagcttgccgacctgaccggagcgaaaacctctccgccgccattgtcttccggattctgtgcaaccgacgattggtttggctcggactggacgacagcggtcattcggtactgaaatcaacgtccagcacggcgaaactcaaccaattgagacgtgacggattcctctcatgacggaagcactatggcaacacagtgaatcaacaccatggcactgaagtaatgcaatactgaagcaaagaaaggaggcgttcatggatgttcgcagcgacatagaaaccgccaccgtcatcatggtcgccgatcacgaagcgccggcgctcatcgacgcggcccagcagctcgccgacgaggcgctatagggacaccatggtaggctgcaatggtcctgctcgcccggtatcccaagggcagcgagggacgtggcatgtcatcgccggcacctgcatgaacccacgcactctcggggacgacgatatgcgcgaacgggcgttcgccgcgttgcgcgaccccgagtatccggccaaacgccgcgcatcgttcgccgtatgcatggccaagaaccccgccgccgatgacaagacgctcgactacctcaacgccacgagccgcgactacgcggtgaaacgcgccatcgcctacagtcccaacgctcatgacgccacgctcgctgccactgtccgctcctgcaaggacgaaaccgtgaaacaggccgcattgaagaaccccgattgcggagaagagacaatccgtagcgtcgtggagacaagcgtcgacccgtacacgaaacgcgatgccatcggcaacgagcgttgcccgggtgatttggccgacaaagccgcgcaaagcgacgacagcttcatgatcgaagcggccgcagccaacccgaacctcggaccgacgggcgtggacgcgatccgcgcgaaggccgaacaaaacgattacctgcgccgcaaggccgcagccaacccgcagatggacataccgactctcgtcacatggctcgacaagaacgatccagaaaccgacctcggcatcgcccacaatcccaacacaacgcctgcgatgctcgcccgactcgtcgcacaccacaagggacgcgcacgccaaggcaactacaccagcaccatctgcgcgcacatcgccgacaaccaattcgcaggacttgagaccaggcgcatggccgctcgcttcgccggactgaactggccggacgccaagtcgaacacgttgcacggcctatccaatccgcgccagtactgggcggatcgcgggcgcagccagtattccttcagcggcgaggacgatctggcgtagggcatatgagccgtccttcaagaagcttcgggaaatctaggatgccgcgaacggagcgtctagccgatgggatccaaatgtccctcgcagctttcgcgcaggaggacggtgacaggcagttccaaggactggcttccttcagaggggttgttaatcctttgcataagcaattgaaccgcagctcgtcctaggtttcgcatcggctgtctcaccgtcgtcaaccgcggcgcgctcatgttggtttcgtcgatgccatcgaaaccggtgacgatgatctgcccggggatgtcgatgttggcttcgtccagggcctccaatgcgcccaatgccatctgatcgttggcgcagaccaacgcctcgggcagtgtgctgcgcgcgatcagatccttggtgatggagtatgcaatggactgggagaattggccacggtagatgggggccgcctcgtatgtcatgccatgggactgcagtgcttcgcagaatccctcgtatcgcttgtggttgtcgggggagtcgttcggtcccgcgagataggccagtcgtttcactccgtgggattcgatgaggtgggacaccaacgcgctcattcccttgcggttgctgactcgcacaaggtcgaggtccacggggatcgaggtgggggcgtcggctatcatcaccagcggcatgcgtttggagaggaagtcgaccacatggtctggcaggcttcgcgccatgacgagcagcccgtcgacctttccagccatgtcgtttgcaatctgggtgacgtccgcgtccgctcggcctaggcttacgttgaccatcagggacactccctgtcgccatgactccagctcgcagcctcgaagcacttcgtccagatacagcgaattcgcctgcggcctctcgtcgggtggatccaattgaagggttgcggcatcctggttctcggggttgaagtcctcgatggtgtcgagttcgtccacgttcggcaggaagagcccgaggcttccggtcttttgcgccgcgagtccctgggcgcttccactgggcacgtatccgagtttgtggatcgcctcgttgatgatgtcgcgggttttgggccgcactttgtctggcgtgcgcaatgctcgggacactgtcgcgattgagacgccggcttcggcagcgacgtcgtacacagtggcttttcggggcattcgagtgctcgtttcttactgaaataatccgttgaatggtcttacatttctttcattctatgtcagagagcacgacttgtaaaactgtaaaaagtaagcgctaacatcatcggcgtgttgaaaaataacggcagataagccttgaaaacaaagggttttaggcgttcttagatgtatcttttggattttggttgacagctactatgtaagcgcatacatttgttgttgctgcttcgcaacgtgaacggtttcaatgaggtaaaaaaccattcgcaggcagtcagcagtcagcgcagacgaaaggaaagcaaaatgcgcagtaaaacaatcaaacgaatcgcggcggccacactcgccgtggccaccataatcggcgtggccgcatgcggcggaagcaacggctccaacggcaccgaagccgcaagcgccagcaaccagatcctgtacggcggcgacgcgggcagccccactttcgtacgcaacttcaacccgttctcctcctcacgccgccaaggcatcaacttcatgttcgagccgctgcaggtcgtcaacgccatcgacggcaaggcgactccgttcctggccaccggaggcaagatcatcgatccgcagaccatcgaatacacgatccgagaaggggtcaaatggtccgacggcgaagacttcacggccgacgacgtggtgttcacgttcaacctggtcaaggagaaccccgccttggacacgctgggcgtctggcagcacatcgacaccatcgaatccaccgattcgaccgtgacgttccacctcaaggaagcagacatccctgcggagaccatcatcaaccagcagctcatcgtccctgagcacatctggaaggacgtcgacgatccggtcaagtggaccaacgaggacccggtcggcaccggcccgtatgtcatcgacaccttcggccccaaccagtacacgctgaagaagaacgagaactactggcagaatgacaaggtcgccgtcgagaagatcgtcgccccggcatccaacaagcagctggacatcgtcaacaagggctacgactgggcctactcgttcatcacggacgtagacaagacttgggtcggcgccaacaagcagcacaaccactattggttccccccgggcggcaccgtctccctctacccgaacctgactaagaagccgtttgacgacgtgaacttccgcaagggcctgagctacgccatcaaccgcgacaagatcgccaaggacgccgagctgggctacgtcgatggagcatcgcaggccggcctccttcttcccaactgggaggattggatcaacgaggacattccgaaccagggcaaggtcgagcaggacaccgacaaggccctcgaatacttcgccaaggccggctacacgcagaaggacggcaagctggtcgacgcgtccggcaagcagctcgaactcaacatcaccgtgcccaacggctacaccgattggcttcgcggcatgcagtccgcgcagtcgcagctgggcaagctcggcatcacggtcaaactgacccagccgcagccggccgcctacacgcaggcccagaacaacggtgacttcgatttgatcgtctcctccttcggcggcaccggcagcctgtaccaggacttcaacaacctgctcaacagcgaattcgccaccccggtcggcacctccaccagcgccaacttcgaacgctacaagtccgacgaggctgaccagcttctcgcccagctccgcgcggcagccgacgaggatgagcagaaggagatcgtcgaccagctccagcagatcgtctacgacgaggtgcccgtggtcacgatgttctacggcggactttggggtctgtacagcgacaagaacttcactggatggcccagcgaagacaacccatacgcgcccccgaccacttggaactcctcgatgcttcttgtggtgacgaatctgaagaaagccaactgaacggcatagaccagatacggcaagcaatgtgggtgccgatggcatcagcgccagacacccacattcataagttcgagacgatcatagaaaggacgcatcgtgcgttattttcttgggaagataggattgttcctgctcactctctgggcggcaatcaccgtgaacttcattctgccgcgactgatgccgggatctcccgccgacgcggcggtcgctaaactggctcagaacggtccggtcactccggaaatgcgttctgcaatcgaggcccagctgggcgtgctcaagggcaacctcttcagccagtacatccaataccttgacaacatcatccacctcaacttcggtgtctcctacagtaatttcccccagaacgtgtccgacctcatcggcgcggcgttgccctggacgctgacgctggtcggaatcgtgaccattctttccttcatcatcggaacgatcatcggcgcattcatggcatggaagcgtggctccgccatcgatgccgcgggcagcgtgagcagctccttcctctccgcgttccccccgttctggctcgctctgatgctgctgtatttcctcggatacgtggcgggcctgttcccgacctcgggttcctattcccctggaatggtgccgggcttcaacctggcgttcttcgccgacatcctgcagcatgcgatcctcccggctctgaccattctgctcacctctctcggaggctgggtcatgggcatgcgcaacaacatgatcaacacgctgggcgacgactacgtgaccttcgcccaggcgaacggccttcgcaaccgcaccgtcatgctcaagtacgcggcgcgcaacgccctgctgccgaacctgacctcgttcggcatggtcctcggcggcgtcgtgggcggctccctgctcgtcgaacaggtgttcaactatcccggagttggccagctgctgttcctcgcagtcaccaaccaggactacccgctgatgcaggcgctgttcctgatgatcaccatcagcgtgctcgtcgccaacttcatcgtcgacatgctgtacggcgtgctcgacccgaggacgaggcggtgaacgacatgacgactgaacgcaaggaaacatccatgaatgcttcaaccaacaagaagacggaaggcgacggcgacaacgcgctgatgcgcggactgagggtcgccggacgcagcttcgccacggtctggtccgtgcccaaggcccgtttcggcatcgttctgctggcgctcatcatactgaccgccgtgttcgcaccattgctcgcaccctacgatcccaaggcgaacgacttcgaaggcagtctcggcccctctgcgcagcacctactcggaaccaccgccaacgggcaggacgtgttctcgcagctcatgtacggtggccgggtctccgtgttcgtggcgctggtgggcggcatgctcgcaaccatcgtcgccgtggtcgtcggcctgagctggggatacatcaagtccttcggcggcgaattcgtcggcttcatcgtcaacctgttcctcgtcatcccatcgctgcccctgatgatcgtcgtcgctgcatatctgcagaacggcggcatgagcgtcatcattctggtcatcgtgctcaccggctgggcatggggatcccgagtgctgcgttctcagacgcaggcgctgcgatcccgcgattttgtaaccgcggctacgttcagcggcgacagctccgcaagggtcatcttccacgagatcttcccgaacatgctgtccctgatcatcaacaacttcttcggcgcagcgaccgcagccgcactcgccgaggcaggccttgaattcctcggtttgggcgactcgaccaccgtcagctggggcacgatgatctactgggcgcagaacaacaacgttctgctcaccggacaatgggccctgctgctggcccccggcctgatgatcgccctgctcgccgtgtccatgacgtttatcaacttcggcgtcgaccgactgagcaatccccgtttgcgtgaagggagcaagtgatgagtctgctgaccatcgaccatctgtccatcgattacaccacgcctggcgaaaccccggtccacgccgtcaaggacgcgaacttcaccattgaacagggggaattcgtcggtctggtgggcgagtccggatcaggaaaatccaccctaggcttcgccatcacccgcctttcccagccgccggcggtcatcgcaggaggaagggtcctgttcgacggcaaggacatcacaacgctgtccgccgaacagctgcgagtccagcgtcagggcggtttcgccatggtgctgcagtccggcatgaacgccctcaaccccgtgcgcacgattcgcaagcacttcatcgacatctacaaggcccacggccatgtcaagaaagaccagtgggagaagtgctccctcgagctcatcggcaaggtcggacttccggaacgcacgctcgaccgatatccgggcgaactctccggcggcatgcgacagcgcgtggcgatcgcactcgcactgtccctcgaacccaagctgatggtgttcgacgagccgaccaccgcgctcgacgtgctggtgcagcacgaggtgatgaacacgatccgcgagctgcagaagcaagaaggcttcaccgccatcctcatcagccatgatctgggcatcgtgctcgaatccaccacgcgagtcatggtgatgcacgacggtgtgattgtggaggacgcccccagcgaacagatcctgcgcaatccacaggatgactacaccaagatgctgctgggccactacggcgatccccgcgcggagaaggtctccgtccccggcctggaacgccgcgaatccacacgcgcctgcggctccgacgccgacaccactgacatgacgatcaccgtctctggcctctccaagatctatccggcacgcaagcgcggcgaaaaaccagtgcaggccgtcgacgacgtgtcctttacgctcgtccccggcgaatcactggcattggtcggcgcctcgggttccggcaagtccaccatcgcgaagatgatcacgggtgtcgaacgacctacgacgggacagatcacgttgggggacaagcgcatcgaccagatgaaaagcaagcgcgccttgcgcgccctgcacgccgacgtccaaatggtgttccaagacccctacgccgcgctcaatccgctgcacaccgtcgaatacaccctgacgcgtcccatcctcaactacacgaacctgcgcggagctgcggctcgcaagcgcatgctcgaactgttggaaaccgtcggcctgacccccgtggagacgttcgcggccaagctcccgcaccagctgtccggcggccagcgacagagggtcgtcatcgcccgcgccttggcatccaatcccaaggtgctcgtggccgacgaacctgtctccatgctggacatgacattgcgagccggcatcctcgcgctgctggacgacctgcgcgtccgactaaacgtgagcatgctctacatcacgcacgaccttctgtccgcgcgactcatcaccgacaagatcatggtcctcaacaagggccatgtggtcgaacgaggcgacaccgcgcaggtgctgcagcaccccaccgacgattacacaatccgtctgcttgacgcgattccccgactaggaacggagcagaaccaatgacgacaagtctgatcggcaaaggcaaggccttcggcccgcttcccaggccagaaaccatcgaaccagtggtcatccccgcggccgtcggcccgatcacggccatccaccaaccatccatgaccggggaatccaagggcaccgttctgttcgtcccgggattcacgggatccaaagaggatttctatgacctcttcccgctgctgggcgaatacggatgggatgtctgggccatctcccagcgaggacagggcgattccatcgcccccgaaggccgtgcggagtacacgcgcgaaaaaacggccggcgacgtggttgaaatcgcgcagatcatcgcccaggcccagggcgtggaccgagtccacctgctcggacacagcttcgggggcaccgtcgcgcaggcggcactcatcgaaaaaaccatcatcttcgacagcctgacgctcatgtgctccggcccgcacggatggcccggacgcaaggccgacctgcgcgcgcgactgctcgaccatccgggagtcgacctatggaggctggacaaccccgacagggccagcatccccgacgaggacctcaacgtcaacgaccgtttcctacgtatccgctccgaacggacgagtcacgaccagctgatcggcgcgatcgaccagctggccaacacgcacgacacaacgttcgaagtcaaggcaaccggcgttcccgttctggtgttccatggggagaacgacaactgggcgtggccccaggagtggcagcggcgtatggccgaactccttgactcccggtacgagatcatcccgaacgccttccattgtcccaacggcgagaaccccaaacccacggcggccttgctcaacgacttctggacttcagtgacgaaggataaaagcaatgactgaaatcacacgacatcacatcacctcaggcgatctggacatcacgattaacgcgaacggcagtgtcgcgaggatcaagtccggggacatgcaggtgtcccagtacgtccccggaatccatgacgccggcatcgctggagtgtggctccgccgccgcgacggggagaacatcgagtccattcccctgaccggcttcgaatccgccagccgatgctcctttggcggcggcacggcgacatggagcggaaacggactcggcgtggattggacggccaaactcgtcattatcgactccaacgagtgggcatggaacgtgaccgcaaacccgtctgcgaacggtgacgcgggggactatgaatgggatctcgtcgtcgcacaggaccttgctttggctccgatcgcacaggcgctgaccagcgaaccctacatctcccagtacatcgcataccacgtcgagaacgacgacaagtacggcaaggttctcgccgcgcgccagaccatgtcggcggccccgaagctcccttcgttcacgatgatgattgccgagggcgcgtccgcatggctcacagacggattcgacttctacggtcgcacggccagggctggagaacagcccgtggctctcaccgatcctgactggggaggcggacgcacgaaccagttcgaattcggcatggcatgcctgctttccaagccacgatctcttggcgaaggcctgcaatggacgatcctcaaccatttcgacgccgacgaccgcaatgaaatgagcgacatctgcaccaccacggtcgagaaagtcgagaacatcctcgacaggcttgacctcgacctcgtcgacttcgccgactccaccgagatcaagcttcccgacaacgcgtccatcctggccaaggctcccgcgttgaatggcgacgaactggacgaacaggcgctcctggcaatcggaggaggaaaggcaacgtccccggagcggaacggcgagggcaagaccctgtcgtacttctcggatcatgcgcgacatgtcgtctccggtgaaaaggaaatgaacgtcgaccgttcgcacgggcagatcctgctcgccggcggcgtcaccgatccctccgtcccggcgttcgctgcgacgacctatgcgcccggcgtgttcgcctcgcacatcgtgttgggtaacacaaacatgaaccgactggtgtccgtgcatcgcacgagcctgaacctcctgcgctcccagggcgtcaggatcctcgttcgactctccggacgcgacgatgagacatggcgtatgctgtcggtcccgtcggcatacgtgatggatctcggtggctcgcgttgggtgtatcagatcggcgacgaacggatcgtcgtcgaaaccgtggcttcctccgtggagtcggcgatggatatcgcgctcacctcgacgtgcgagatcgatgcgctcatgaccatcgacatcgagaatcccgagcaatgggctctcgaatcgtcggacaactgcgtcacgatgattcccgcgcagggaacgctggccgccgaacgctgtacgcaattgggatacgcgttcacatccgacggagattcgaactacgtcgaaaccgagacgatgccctcgtttgtcgccactcgcacgcacggcatgcacgtcgccttcgccgccagcgaggaaggcggagcttcgaccgcatctacgcgggccgccgcgcacgcgttccatgcggtcgacgctgacgcggagttggaacgtcacgctcgaatcatctccgagtacgtcgccgatctcgacatcgccaacgacgacaagcttgaggaattcaacctcagcctgccgtggttcgttcagaacgccttggtgcatttcctgtccccccacggtctggagcagtattccggagccgcatggggaacgcgagacgtatgccagggaccgttcgagatggccctcgcgttcggacatttcgacgccgcgcgaaccatcatccgcaaagtgttctcgcatcagaacgaggacggctcactgccgcaatggttcatgttcgaccagtacgcgtccatctaccagcatgattcccacggcgacatccccgtatggccgctgatggtcgtgggcgaatacctcgacgccaccggcgatgcgaccctgctcgatgacatcgcgccgttctgggacaacgtcaacgacaagccatgcgacggggaatccaccgtcgcggaccacctgcgccgaaccctcgactacatccggtcgcaccgcgttccgggaaccgaactgttcagctacggcgaaggcgactgggacgacacgctccagcccgcccaggcggagatgaagaagagcatggcctcgacctggaccatcgcactgctctaccaagccacgagcgcactggcaagactacttccgccagccggagccgatgaactggccaaggatttcaaggccgagtcggaaagcatccgttcggtctacgaccgggtgttcgtcttcgacgacgtcctcgccggttatgtccattacgagaacggcgaacccgaaccgatcatccatccgagggatacccgaaccggaatcaaataccgtttgatcccgatgacccgttcgatcatcgcaggactcttctccccgcaggaggaacgacttcacgaaggcctgatcgaggacaacctgcattatcccgacggcgtgcgcctgatgaaccgtcccgccgcattccacgacggcgagaccaccgtgttcaaacgcggcgaacaggcggcgaacgtgggccgtgaaatcggcctcatgtacacgcacgcccacatccgctacaccgaagccctcagcttgctgggacgcggaagggtcggcgacgagctgcttcgcatcagccccgtcaaccagttcaaacgtcttcccacaagcgaaccgcgacagcgcaactgctacttcgcatcctccgacgccgatttccccgaccgctacaccgcttcggcgcaatgggatcgactcaaggacgatgcggcgaacccggtcggcgttcgcggcggctggcgagtctactcgtccggccccggcatctacctgcgccaggtcgtccagcacctgctcggaatccagatccatgcggatcgcgtgacgttcgaccccgtgctcacaacggatgacgacggtctggaggtcacgatcagcctgttcggaaccaaacgaacgatccgctaccatgtcgcggacgttgcggaagtgaccgtgagcggcgaacatggaagcgttgacggccagcgtatcgaactgccctaccgcgcaggcggcctcagcatctcccgcgaggcgttgggcggcgcgcacgtgctcgacgtgaccgtcccgaaccgcggctgacgcgccgcacaccggtgttggctgccatcccgatggcgcatggccgccaacaccatgcatcaaccggccaacagataacgacgaggtatatcatgcaacagaaccagcttgaacaactactttcccaaatgacgttggacgagaagatcggccaactgacccaggtcaccggcgacttcttctcggacaaagcggaggaacgcaccggccccatgagtcagctcggacttggcgacgaagaactctcgaacgtcggaaccgtcctcggcgtcaccggcgcggccgaatgccgacgaatccaaaccgaatacatgaagcgcaaccgactgcacatccccaccctgttcatgggcgacgtgattcacggatgccgcacgattttcccgattccactggcgctcggcagctcctggaacgaggacgcggcgcgcaagatggccgaagtgtccgcgcgcgaggcctccgcagcaggtatcgacgtgacgttctccccgatggtcgacctggtgagggatccgcgttggggacgtgtgctcgaatccacgggagaggatccgctgctcaacggacgcctcgccgccgcaatggtcaagggctaccagggcggagacgacgcggagggactgggagaacgaaccgaccacgtcgccgcatgcgtcaagcacttcgccgcatacggtgccgcaatgggcggacgcgactacaacaccgtcgacatgtcggaacgagtgctgcgcgacatgtacctgcccggttacaaggccgccctcgacgcgggcgcggcgatggtcatgacctcgttcaacaccgtcgacggcatcccatccaccggcaacaagcacctcatgcgcgacatcctgcgcgaggaaatgggattcgacggcgtgctgatctccgacttcggcgcggtcaaggaactcatcgcgcacggcgtcgcggcggacgaaaccgaagccgcgaaactgtccatcgaagcgggcaccgacatcgagatgatgaccatctgctacatgcggcatctacgtgagatcgtcgaaaacggcagcgtcgacgaagctttgatcgacgaggccgtgatgaggatcctcaaactcaagaacgacctgggactgttcgagaacccgtaccgtggggtcgacgaggaaacggaatccaaggtcacgctttgcgacgctcaccgccagtcggcgcgtgaaatcgcaggcgaaagcatcgttctgctgcgcaacgaacgaaagaccctgccgttggacgaaggtggccacgtcgcattggcgggcccgttcgccgcgtcccacgacatcctaggagcttggtcgtggaagggcgtctgcgaggaatcggtcacgcttcgcgacgcgctgcgagaggccgatggctccgagggatggctcagcgtcgcgcagcataccggcaacccgctcgacgtggacgaggccgctgtcgccgaggcggtggaactcgccaagcgctcggacgtgatcgtcctcgccctgggagaaccgcaggagtggggcggagaggcggcgagccgctccaacatcagccttcccaagacgcagatcgatctctaccatgccgtccgcgacgcggccggagaccattgccgcgtcgtcgtggtcctattcaactcccgtcccctggtcctctccgacatcgccgacgcggacgccatcgtcgaagcctggttccccggcaccgagggcggccacgcggtcgccgacatcctccttggcggcgtgaacccatccgcgcgcctgtcgatgtccttccctgtcaacgtggggcagatcccggtcttctacaactgcgagaacaccggacgccccttcaatccggagaccccggacgaaaaataccagtccaagtatctcgacgtgtccaacgatcccgcgtacccgttcggatacggcctgtcgtacagcgaattctcctatggcccggtcgcggtgtcctcgaacgagttcgccgcaggcaagcctctggaggccaacgtggaggtcgcgaacgtttccgacgtcgatggtttggagacggtgcagctctatgtccgcgacatcgcggcacgcgtgtcccggccgatccgacagctcaaggacttcaagcgcgtgaggattgccgccggcgagaccgtgacggtaaggttcacgttggacgaggccgacgtgcgatacgtccatccggatctcaccgaggcaagcgatcccggtgaattcgatgtgtggatcgcccccaacagccgtgacctcggcgccgcggcacgcgtgagcctcatctgaacacgcagccggtagagctgattcgctcactcgaagatattggtctcctccccgcttgattcgggaaggagatcaatcgatatccggcgagcattgtatgagccttctgttgttttcgtgggttaga

SEQ ID NO: 3400 - DNA, 17197 bp, Unknown
  R151_18m  MAG No. k141_32413
aaagaagtagtacaaacacgctcttgagttctcaaaccaccaccacaccagcaagacaggaaaccaaccagaagaaggaacccgccgcgctgagcggcaacaggtgaataacttacacgcaaccacgccacaacgcaaatcgggcatgaaaaggtacgccagaatcgttgcaacgacggcgttccatcggcgtgtcgaaatcagcttgaatcacgccgttaccatcaggatacgccggctttttatgggctcacgtaacgaaatcagatgttcaccggcgtgtcgcaacaattcattccacgttcaactcccctcagtccgatcacgcggacagctcacccgcaattacggacgagcaaagctcgcgcccttatggctcgactatcgtctcgccttcgtctaaaaaaacagtccaccggactgttttttaaacgacccagcatcaaagagggaagccaaaaggggattagaaggtcaggcgcatttggtgccagaccacgtcaccgtgagtggaatcggaaatgccctcgtcctcatatccgaatcgcgcatagaatccgaccaaccgatctttgcaggtgagcaccaggcctttacggccggctgcacgagtgtcttcaatgactttcctcatgagtgtactggcgcaaccgcgatgctgatacttcggcgcagtatccacgccgaaaatcatttgccagtcaccttgagggttgtgctgcgcggcatcctcgtacatgtcatcggtcaagtcgcgccgatcggtcgcgaaaccgttgatgaacgccatgacgatctcgccatcaatcaatagccagaaacattccggataggtctcgattcgggcgcgcagggacgagcggtcggcggcctcggcggccgggaagcattcgaattccatggcggccagcgcgtccagatcgtcgatggtggcgtggcggattaactggggatcagaatcagtcatgtttttgtctttctcttaacactccgttgtgagcaactcccccagtcacgcttcgcgtgctggctcccctcaccttgaggggagccggatggatgtcagattacgtggtattcgcgtagcagggtggcaatatcggtgccgtcgagtttcttgagcaccttcttgaccacggccttttcaatgaagttgagcttcatatcggtgaccggtgcaccgtcacgcaatttgacggtggcgttgagcaggttgcgcacgtcatagacactgccccacacttcaggcacgccgcggtccacgccgagcaacgtgtagacagcttccataccggtgcgcatcgagtactcggtggtgaagatcgtgtcacgcggggtctcggcgaactggccaaggaatgcgaagttcacggcaccatcgggcaccacgtccgggcggtcgccggccgcgcgcggcatgaagaacgcggtgatgtacggcatcatgaccggcacggtgttggcgtgatgcttggcgagcgcctcgatcttgtcggtcggcacgcccatgttgtaacgccactcctcgcaaatctcttcaccggtgcattcgggcatcggcttcttcacatagttgccgggcttgtccgggaacaggccgtagacccatacgcacagctggtccttgggctggtcgcggaactgctgctggcggttcagggtccaactcatgagccagttggagtcctgcacagtgacgatgccgccggtgacgaccttgccggagaacgggtcgcgcttgcaaatcttctggatgtacggcggaatctcgccgtccagggtggtgatggtggcgctcatccacttggtggcattcggatcggagcagaacttctccggatggccaaagctcgggtcctggtcggcgatacgcttccacatatcccagccgccgccgggcttcaggtctgggttccatgcggcgggcgagttctgggaacccatggtggagttctccacgcaaccgccgttggtgatgaacaccagatcgttctcggtcaggtcgatggaggatttatcaccctcgtgatccacgtcgatgcgcacggcaagcttcttggtgggcgtgctggcagggttgcgcttgaagaaaccggaggtggcctgaatcttttggatggtgtcctggcctacgccggtgtgctcgcgcttggggccggctcccccgccaatcgcgaattccacgttctcaaccttggtgttgtagcggaattcgacgccatgcgattccagatacttgaccatcggcagaatcatcgactcgtactggttgtagcgggtgaaacgcagcgcggaaaagtccggcagtccgccgatgtgatgaatgtagcgtttgatgtacagcttcatttccagcgcggagtgccagttctcgaaggcgaacatggtgcgccagtacagccagaagttggagttcagcacctcatcatcgaagaaatcggtgatcggcttgtcatacaggtcttcgtccggggtgaagaacagcttcatgatttccatcgaagccttgtcggacaggccgaacttgcccttgagccccgcgtccttgccgaggtccttggtggcgcggcacagcgagtagttcgggtcctccttgttgagccagtagtactcgtcgagtacgctgacgccctcggtttcgatggaggggatcgagcggaacagatcccacatgacctcgaaatgattgtccatctcgcggccgccacgcatcacatagccgaggccgggaatatcaagaccgtcacaggcgccgccgggtaccgggtccttctcaaggatgtggatgttctcgccaggcatctgaccatcacgcaccagataacaggctgcagacaatgccgccagtccggtaccgatgatgtatgcatgcttgttgtccacgtcggccggcttcttcgggcgtgcaaaagcctcataattgccgctgctgtagtacatattccgcctccttggggtagagttgacgcttcgtcaactcttcttgaatagacatcatgtcacattattgccgaacacgccataggcaacgttcggcgttctgccgtattcgccaataccttgcgtctacggttttcgaggcctgtgttggctgttggctcataactattgaaggcatacaggcatactgaggatgctgggtgcttcaccgaaccggatgattgataaggtcccgctcaatccatgccatgaccaaatcggcaagtcggtttacctccgcttcggtgagttcacggcctttgggcagatgatgccatttttcgatgcatccgcggcagcatgtggcggtagcatgctgagcggtgaataccggatggccgcgccatggcgtctgcctgccgtcgttcttcggttcggctgcgcctatgcggtctcgcaacatttctcgcgcatgacgatcgatggtcgccttgcctttggtgcgggcataggctcgttctttgtcggtcaaagcgaatttggcgcggaactgcgaatgagacagccgttccagcatcgcggcaatccattgtcgctcgtcatcgttgttaccagtatccgccatctccatgcccatacgttccacaatagtcgcgcacatcgtatggtggcacatgccttagctccctctgatgaaggagtccccagcaaagccaggtgagggagaggccaggggcgaaacccgccaatcaggcggcaggcaagcagctggggccaaacagaatcttgatctcagcaaacaacgaagtatcccgcttgacgcggaaacgatcgccaaacgtgagcacctgagcgttacccttctcatccagcaccgcaagatgtacttcgcagtaaccaggatgattagcgagcacctgaccgagttgcatcatgcgttggcgctccaacgccaccggcggcagcgtgatgaccaacggacgttcatcctcggcttccaaggtcggaatctgcatttccgtggctctcagagaaacggtttcgtcgcgcaactccacttggccacgaatctgtacgatggcgtccacggcgagttcggcggcggccgcttcatagaccttgccgaagaacatgcattggacggagctttccatgtcttcgatggtcacgatggcccaggggttgcccttcttggatacgcgccggtccacattggtgaccagaccagccaacgtgacctgctgtccttcacccatcgttttggctcgatcaaccagatgcgcgatggacatttcacgcaaggacgcgagaatcgactgcataccggagagcggatggtcagacacatacaggcccaacatttcgcgttcgaagttaagcttggtcttcttgtcccattcctcaagatcgggtacggtcacggaagcgtcgcccatggcctccgctcccccatcctcggcatcggagaacaaatcgaactggccctccgcctgtttgcgcttcagactcaccaccgaatcgatggcggcctcgtgcacggtgagcagcgcgcgacggttcgggtcaatcgagtcgaaggcaccggccttgatcaacgattcgaccaatcgccggttcagcgcggtcaggggcacgcggcggatgaagtccatgaagttcacgaacttgccgcgcgggccttcgcgttcggcgatgatatcggccacggccttgtcacccacgttacggatggcaccaagaccgaatcggacgacgtcgccgactgccgagtactcgtacaccgattcgttgacgtccggcgagagcacctggatgcccatgcggcgggcctcgcccaagtacagtgcggtcttgtctttgttggtggcggcaccttgcaacagggcggccatgaattcgaccgggtagtgcgtcttcagatatgcggtccagtaggagatcagaccgtatgcggcggagtgcgctttgttgaaagcgtagccggagaacggcaccagaatatcccacacggcctgggaggcctcttcggagtatccatgctccttcataccggcgaagaacggcaccttctccttggccagcacttcgggcttcttcttacccatggctcgacgcagcacgtctgccttgcccagcgaatagccggcgaggattcgggcggcggactgcacctgctcctggtagatgatcagaccataggtctcgtcaagcacctgtttcagaggttcctcaagctcagggtggattggcgtgatcttctgcaggccattcttgcgcttggcgtagttggtgtgcgaatccatactcatcgggcccggtcggtacagagcgataagtgcggaaatatcgttgaagttatcgggcttcagggttttcagcagtgaacgcatgccgtcggaatcgagctggaacacgccgagcgtgtctcctcgggacatgagtttgtaggtttcggcgtcatcgagcggaatcttggtgtagtcgatggcggatttgccgttggcctcgatgttcttcagggtgtcgtggatgatcgtcaagttggacaggccaaggaagtccatcttgaccaaccccaacgtttcgcacgtgtggtattcgaaggtggtggtgatggtgccatcggtgcgttccagcaacggcgaggtgtcggtgatgggcgcgctacccatgatggtggcgcaggcatgtacaccggtctgtcggatcaggccttcgatacccttggcttcttcggtgatgcgcttggcgtccgggtcggaatcgtagagttctcggaattccctggcctcggcgtagcgtttggctgtcgggtcgaagatgtcatgcaggctgatatccttgccgccggtggccgcgggaggcagcgccttggtgactttttcaccgaccgagaactcgtagcccatgatgcgggcggagtccttcaaggcctgcttggttttgatggtgccatagatcacgcactgggcgaccttatcggtgccgtatttttcgccgcagtattcgatgactcgcgcacgaccttcagggtcgaagtcgacatcgatatcaggaaggctcactcgctcagggttcaggaacctctcgaaaatcaggccatgcttgagcggatcgagctcggtaatgcccatggaataggcgaccatggcgcctgcggccgagccacggcccggacccaccataatgccgtggtccttggcccactgaatgtagtcggcgaccacgaggaagtatccgcagaactgcatctggcagatcacaccacattcgtagtcggcctgcttcaatacgtcgagcggcgggttgccgtcgtaacgcttctccagaccttcctcgacttttttaaggaacagggaggtctcatcccagccttcggggcaggggaatttcggcatgaacgcgccgtcttcgtggtcgtcgaacatcacgttgcagcgttcggcgatggcgagggtattgtcgcaggcgtccggatggtccttgaacagttcgcgcatctcttcggcggttttgatgtagtagccggtgccgtcgaatttgaatcggtccggatcgtcaagacgggaaccggagttgatgcagagcatggcgtcctgtgcctgggcatcttcggcgtgtacgtagtgggaatcgttagtggccagcagtggtgcgttgagtttcttggctatggtcagcaggtcaccggtcacctgagtttcgatgggcagaccgtgatccatgagttcgatgaagaagttgtctttgccgaagatgtcctggaattcgccagcggcgcgcagggcctcatcgaactgaccgagacgcagacgggtctggatgatgcccgaggggcagccggaggatgcgatcacgcctttggaataggtggcgagcacctccttatccatacgcggataacgcatgacgcgaccttcgaggttggccacggacgaagctttgatgaggttgaccaggccttcgtcgttttcagcccacatggtcaagtgggtgataagaccaccaccggagacgtcgtcacggcgctgggcttcagtgccccaatgcacgcgggatttgtcttgacgtgcggtttccggggtcacataggcttcgatgccgatgatgggcttgacgccattggccacgcagttggtgtacatctcgtaggcgccatgcatgttgccatggtcggtgatgccgaccgcaggcatgccaagttcggccgcacgcttggccaaatcagggatcttcgacgcaccatcgagcagcgaatagtgcgtgtggttatgcagttgcacaaagttgttcccgtaatcagccatgcgccccaccataccgtgtggtctgggcggttgttcagcattcccgtcggcactccgcgatgagggcggcgcacagcatgatgacctgggcgacgagattgaaccacaccagcgcgccgatcaacgccgcgaacggtgcgagcagcggattgcgggaggctccggctaatagtcgcgcaccgagaagctgcattgcggaaaccgtcagagatcccagtaacgcgccgaatatcgtgaatcgtccggctttgatgtgggagaccacacgcagcagcaacatgaacaacgcgaaattcagcgcgacgccggtaccgaaaccggtcatctccaaaagcacggtgccgggcaacgaactgctggggatgccgccccattgcagcagtcggcgtacgatgccaccggacaccgtaccggccgcggtcgaaagaatgaacagtattgcgatggcgatggcggcaagcgtatcgcgtaaccttgcgacgacgatattgagctcgtcgccgcagtcgtcgaacatggaccgtacggcgtggcgcagcgagttcatccagccggtcaccgtccaccagaatatggccaacgtggccagaccggtccacgtcaatgtgcttgacatggtgtttagtgcggaagacgtcagaaacgagtcggccacaccgggaatgacttcacgcaccgcgtcaatcagcatctgctgccaatcaatgttgccgaccatgataaggccgaacacgctcaccgcaatccaaacgccggcaaaaaaggcgaatagcagaccatatgccagaccattcgccagcagggggccgcgccgcgacacataccggtcgagcacgcgcccaggcagcgaacgcgcccacgcgtccgctcccctgtcaatcgcactcttcaacccatgcatagttcaactgtagctgttgttaccgttgttgaaacagcgtggcgcgaaatcgcatttagccagctcaaacgatggcaaccatcaacgcccccactcaattgttcagaatcggataccatatgagtattcaattcatccgtcggagttcaatgtcagcagtcctcaccaaccgatgtcttgctaatccgctggccgccctagtatctactgtttcttgtggacttcgttcaacagccaggcagagcgtacaacatactgcgtagtacatggcgcgaatcccaatgaccaccatcgattgatgacggccacgaatactcgtactcagcctccgcagtcacttggggtatggtcatgacggagagccatcatgaccgatctctcattattctgggatgaatccggcgaggctggaactgaatctaaatattaaaacgcatgatgcacacgttgcggaattagtccaccagaacttcggcatgctcggcaggttcagcgggttcgatgtgacgggcacgcatggcatcgagggcggcggccaggtcggccgggtactgggaccggaccgtggtccagacgcgggtgcgaggatggcggaattcgagcttcatggcgtgcagccactgccggtcaagtcccaaagcttcagacagcaccggattggcaccatacatagggtcgccgcacagaggatgcccaatcgaggagaaatgcacgcgaatctgatgggtacgtccggtctccagattcacggataccagtgtggcctcatggccgaaacgctccaacacatcccaatgcgtaacggccggtttgccggccggagtcacgcagaagcggaaatcggacactttggcgcgcccgatcggtgcctcaatggtcgctttgttctctttaagaccgccctgcacgagcgcatgataggttttctttacctcatgctcggcgaactgccgacgcatctcggtgtacgcaaggtcggacttgcacaccaacatcaagccggaagtgcctacatcaaggcgagaaacaatgccttcacgcccggccgcgccataggaagcgatatgcacgccacgatcacgcaacgatcccaataccgtgggaccggtccagccaaccgaggcatgcgccgccacgcctacaggcttatcgactacgacgacatcatcatcttcgtagacaacagccatatcagttgcgataggctcaggcccggcctgttcctccgccaaatcaaattcgacggtctcccccgcctgcaacgtgctggaccgcgcaacttcacgccctaaaacgcgcgcctgtccggagtcaaccagatcggcggctttagatcgtgaaatacccagcattttggccacggctacgtcgaaacgcttacccaccaatgcatcgggagcagggaccattcgactcattacttggcgtccgcctccggctcagactgtagggattcgtcggattgctcgataagatccttgtgggagaacggctcccccataagaatcagaatcaccaggaccacaccggcgactaccagatagatatccgccacattgccaacggaccagccatagttaaggaaatccaccactttgccgttgaggaagccgtcagcgtacataacacggtcaatcaggttgcccagagcgcctgcaaacgcgaaagaaagcgccaccgaccatttcatggagatagtgcgcaccccagccacagcaagggccacgcaagccacaacggccaacagactgattacccaagtagcgcctgaccccatgcccaaggacgcgcccggattacgcaccaaggtgaaggacagcagtccgggaatcacgcgaatggtctgaccgttggataacgcggccatcgcccaagccttggtgagctgatcgacaatcagcgcagccgcggccacacatgcaaagacggccacgcgagtgcgcagccgtccctgttggttcgtcatacgacctgtacctgcctacgctcagttggtcttggacgaggtctggtcgacgtagttgttcgactcggaaacctgcgatgccagctggccgaggtactcggtgaggcgggcgcggtattcagtctcgaactgcttgaggctctggatgttgccctcgacgaccttggactgagcctgaaggttgtcgcgcacctgctcggcatacgtatcggctgcagagcgggtgttcttgtcgtacgcatcagctgcggaacgagtgttcttgtcatactcggcggcacgctgctgcacttccttctcgtagttgtcagcgtcatcgtgctgagacttggagtagttgtccgcatcctgacgagtcttgacggagtatgcgtcggcctcagaacgggtgttctgggagtaggtctcggcatccgcgtgaatctggtcacggtaagcgtcggcctcggagcgggtacgatccgaataggtgtcggcgtcggaacgagtacgagtggagtagtcgtcggcctcggagcgggtacgctcggagtagttgttggccttggtgaccaaatcgttgtacttgttctggctggcctcggtgatttccttggccttgttcttgcccttctccacgtactgatcgtgcagctgcatagccagggtcagcatggcggtggcgcgctcgggctcggtgcccggcatggaagcgacgccagcgatcttctgcagagaaccggtctcagtgctcggctcgaccttggaaacctgggcacgaagctggttttcacgctgcttggcttcttcgagctgacgagacagttcagcgatctgagcggactgctgctgagcggcggaaccctcctgctgagcagcggcgagctgacgggacagctcctcgttggccgcgcggaactgatcacgttcctgctgaatggcggcgatctgctggccgacggcttcctggttaccagaggcctgagcggcctgggcggtgagctgatcgatttgagcgttcagctgatcgacctgacccttgagctgctcattctgggaggacagcgcgcggttggattcctcggcttcgctgagcttggcagaggcaagctgtgccgcctgatcattgccagcctgagcggcctgctgggcctgagccacagcgttcttcaaaccagcattctccgactggagttgctgcacctgaccggtaagatcggagatcttcgcattaaggttggtcacgtcagggcccagagactgagtggcctgaccgccggctaccgcctgacgtccaagagcctcgacggtttccgtgacctgatcaaggaagtcatcgacctcgtcgacatcataaccttccttgaatcgaacagtctggaaggtatgctccctaatatccttcggcgtcaacagagccataaatcttgcacctcgctttggggcattgcccgcacttacgttggtctcaagtcagaatgctatcacgaccccatcgtttcagaacattcaacgtgggtttttatgccagatatatgcctccggcgggtcaaaaacggcctcagaacactatcagaacaacactttctagtaccaccaacgcaaaatacagcacgatgaagctgacatcaagataaatcgagccgagcggcaatggacgaatatagcgacgtagccagcgcagagggggttcggtaatggaatacacaatgttgatcagctgggccaccacaccacgtggataccagtttcgtgcgagaacggagacccagtccagaatcatgcgcacgaacagaaccgtgatatacgcgttgatgagccatgcaagaatgcggccgatcagagagaacactaaggaaagcatgctgacagactaacaaccgcgcatgaaaagtttgctcggagcgcaataagaatcggccgactccttgctgggagtcggccgaataccgatataacgtcgaatgcgaaaactactgaaccggtcagtcagcgaacaaatcgtgtgccgaggttggttttgtcggctcttcgaccttgatgttcacctgcgccgggctcaacaggaacacgcgcggagtgacacgctcgagggaaccacgcacgccgaacaccacgccggcggagaagtccacaatgcgatatgccacggcttcggccacaccggtgagattcagtacgaccggaacaccgtcacgcaatgcgcgaccgaccagctgagcatcctcatatgacttcggatggatggtggtgattctgttcacgcgaccaccggggaacggcttggtagtcgacgatgcggcaggcgcggtggttgatgccagcggcgtgaccgtatggtcggaatcaaatgcggacttcgaagccggcttctgctcctcgtcctcctcgatgtagtcgtcctcatcgtccacaacgtcgctcatgcccagataggacatcgcgtttttcatgaacccagccatggatcagtcctttcagcgcaggaaatcaggaatgtcgagatcgccggcgggatcgttcacggcgatgttcggatgcgaggtagtcggatcgtcaaagggcagggatgccgggtctgcggtcgtcggggtgaattccggacgcggagtggccacgggctgggcggccggagcggcggcgggctgctgcgtttgcgtggcagccggctgggcggccggtacggcaattgccggagcggcggcagagggatcctgcggtgtaaccggatcgaaaccggccgcgatgacggtaacacgcacttcgtcgccataggcatcgtccagagcaagaccccagatgatctgggcctcggggtgaatggccttgcgtacaagctcggtggcggcggaagcttcctgcagcttcagatcggtcgggccggcaatgttgatcaacgcgccgtgggcaccctcgatgctctcctcgagcagcggggagctgatggcgatttcggcggcctgggtggcgcggtcttcgccccgcgcggaaccaatgccgaacagcgcagtaccagcgccacgaagaatggagttcacgtcggagaaatcgacgtgaatgtaggaattcatcgaaatgaggtcggtgatgccctgcacgccggcgaggagtgcggtatcggccgtcttgaaggcttcgatgatgccgatggaacggtcggaaagctcaagcaggcgatcgttcgggatgacgatcagcgcgtcgacttccttgcgcaggttgtcgatgccgtattcggcggaagcggaacgctgaggaccttcgaagctgaacggacgagtgacaaccgcgatggtgagagcaccttgctgatgagccgcacgagcgacgatcgggctggcgccggtaccggtgccaccaccctcaccgcaggtgacgaacaccatgtcggcacccttcagggattcctcgatatcagactgatgatcctgtgcggccttagcacccttctccgggtccgcgccagcgccgagtccgcggctggactgatcggacagggagattttcacgtcggcgtcggagcgcagaagatccttcgcatcggtatttaccgccacaaattcaacattctgcagtccctcggcaatcatgcgattgacggcattaccgccggcaccgccgacgccaacaaccttgatgttggtcttgtcgttgaactcattctgcgcgatctcgctcacgtttggctcctgtcacttcacggttacacccaagagtagcgcaaacaggctactcttggagggaaattcacgcgcagaatggcgcgtgttgcgtgtattttcagtattttttcagtaactggcgtccattgggtcgtcaccgaagagcgcctcacgctcttcgtgggtggtggtacgcgattccaaccacccatacggcaagtgcaccttcttggcgaaacgcacgcggccgcgcggtttgtcgaccacgcgtggcgggtattcgatggtcgggtcgagcttgccgatctcgcggtccacatcggccaggctctcgcattccataaaggccttgcgggtggacccacccaccgggaaccctttcagataccaggcgatgtgcttgcgcagatcgtggacggccatcatctcatcgccctcatagaactcggtaagcagctcggcatgacggtgaatcacccggcagacctcgcccagattcgggttgagccgttcgggattgccctcgaaggcgtttttgatgttggcgaacagccacggccggccctgacatccgcggccgatggccacgccgtcgcagccggtctcgcgcaccatttcgagcgcgtcctcggcgccccagatatcgccattgccgaataccggaatgttgaggtgttccttgagctcgccgatgcgggaccagtcggaatgaccgccatagtattcggcggtggtgcgggcatgcagggttacggccttgcagccctcctcctgcgcgatgtgtccggcttcgaggaaggtctcatggttatggtcgatgccgacgcggatcttcgaggtgacggggatgcccgccggctcgcatacggcgaccacgcgctggatgagctcggtgaagatgtcggttttccatggcagggccgagcctcccccgcgacgggtgaccttgggtaccgggcaaccgaagttcaggtccacatggtcggccatgttgccgtcgaccacgattttcgccgcctgttcggtgatggacggattcacgccatacaactgcagcgaacgaattttttcgcttttggcgaaatggcagagacgcagggctttcgggttgcgcgccacgagggcccgcgcggtgatcatctcggccacgtaaagaccatcgggaccgtattcctcgcagatcacgcggaacggccagttggtcacgcccgccatcggcgaaagcaccaccggggtcggcacggtaatgttgccgagctgcacgggggcgatgtataccggagtctcgggccgtgccggcgcgtccgtacgcgggtcgagattgttggtctcgtgagtagcggtgatggtggtttcggtttcagattctgccatgtggttcctgttctgaaatagttttggctcccctctttgaggggagctgccgccgtaggcgactgaggggagtcgcctcagcaagagccccccccctcagtccacttcgtagacagctcccctcatagaggggagcctctatacagacccgtctttagtacagaccgccggcttcctgaacgccggactcaggccaagcctcgccgcccatttccacgggcttcaggggcacgcgggtgcgcttctcgccgatgcgggcggccacgtaatcggccaccttgtcgagggcgatacgctcctgggccatggtgtcacgctcacggatggtcacggcgtggtcctcgagggtgtcgaagtccacggtgatgcacagcggggtgccgatctcgtcctgacgacggtaacgacggccgatggcaccggactcgtcgtagtcgatcatccattcgttgaagcgcaggtcgtcggccaggttctgggccacggtctgcagttcaggcttcttgctcagcggcagcacggcggccttgaccggggccagacgcgggtcgagacgcagcacggtgcgcttgtcgacgccgcccttggtgttcggggcctcgtccacatcgtaggcgtccacgaggaagcacatcagggagcgggtcaggccggcggccggttcgatgacgtacggcacgtacttctcgccggtggcctggttgaagtagctcaggtcttcgcctgagtgcttggagtgcgcgctcaaatcgtaatcggtacggttggcgatgccttcgagctcgccccagtcggaaccttggaagccgaacttgtattcgatgtccacggtgcgcttggagtagtgggagagcttctccttcgggtgctcgtagtggcgcaggttctccggcttgacgccgaggtcgatgtaccagcgggtacgggcgtcgatccagtactggtgccattcctcatcggtgccgggcttgacgaagaactccatctccatctgctcgaactcacgggtgcggaagatgaagttgcccggggtgatctcgttacggaaggacttacccatgttggcgatgccgaacggcggcttggaacgggaggaggtcatcacgttcttgaagtcgacgaagatgccctgtgcagtctccggacgcaggtagtgcaggctgttctcgtcctcgaccgggccgaggtgggtgcgcagcatcatgttgaagtcgcgcggttcggtccactggccacgggtgccgcagttcgggcagacgatgtccttcatgccgttttccggcatcttgtcgccgtgcttctcggcgtaggattcctcgagcttgtcggcgcggttgcgcttgtggcagttgaggcactcgacgagcggatcgttgaacacgctcacgtggccggacgccacccacacttcgggcggcagaatgatggaggtgtcgacaccgacgacatcaggacgggtgacgaccatggagcgccaccattcacgcttgatattgtccttgagagcgacgccgagggggccgtaatcccaagcggaacgggtgccgccgtaaatttcgccggcggggaacacgaagccgcgacgcttcgcaagggatacgacttcatcgagtttggactgagccacaatgcaccttctggtttgaacggtttggggtctaataacaaccgcttcaggatagccgtatacggtgacaggtcaggcggcattgtccggtatatgttccgcgtctcacgagcggccgttcgcagcgattcctatatcgcaacacctccatattgttcctgttgttttatccttcccgaatttgtaccactgacatcgcgtcagcgtcacaaatccgggagatattgctcggcggaggcgtctatatatcacgaatggacgggacgcgccagacctgacgacacgtatcgaacaaatccgtcacgataatgtccatgttggcgcatagcgtcggcactgtagtgcagggggactcgcatgtggttcgcgagttgagaaaggcctgagcctgacccttagaacctgttggttaagaccatcgtagggagcagtaaatgagcaatagtgcatcatcgtttgccg

SEQ ID NO: 3401 - DNA, 11620 bp, Unknown
  R151_18m  MAG No. k141_32489
ccgaatacaccgcgccggacgggttgttcggggtgttgatgagcgcggcctgcacgttcgggttgagcgcggcctcgaacgcctcgaagttgatctggaagttctcggtgtcggccggcacgatggtcagcttggcgccgatgcccttgacgtacggctggtattcggggaagtagggggcgaaggtgatgatctcgtcgcccggcttggtcaccgcgcgcatcgcgtgggacagcgcgcccgccgcgcccgtggtcgggaagatatggttgccggtgtatgccatgccgaaacgttcgttgaggttttcggcgatcgcgtccttgacggacggaatgccgagcgagggggagtagccgtggatggccgccggatcgccgttttcgtagaggtcgaccatggcgtcggtgaaggatttcggagccggcaccgagggattgccaaggctgtaatcgaacacgttctggtagccgatttcagcaccgcggctcgtggcgtactcgctcagcccgcgaatcacggacttgccgccaagcatggccttgtattcctcattgatcatggctgttctcctcgcatggttgtactggtatgcaccacgctactactatcgcggccggtttgcgccatttgccgcgccgtacctaagccggctgttctatttgttctattagtggagtttgaaccggcatatacccttgcaataaagccatttgtagggtctgaggctttccggggttgcttgtctcatagattttcggcctcttgatatttgcggttgatagctgtgatgtgtgtgggcgatggctgttgaggcatcatggggatctcttcgactgtccgccgtcgccatgccgccatgatgcctacagaaagtcgagttgcgtatttccgccaagcagggtggtgaccggtgggggcgatcggtgggggtgaccgacacccgctataggcagcaggcagccgcacacatcccaatatctgtgggacggcagacgagtcaatcgtttgtcgtccgcgccgtccctcaagagcgcgggatggcagacaagtaaaccgtttaacgtccgtagcgtcccacaccgacgactgtagaaaccgcggaataacgccgattctcgctgcagctccatgattatgcacaaccgttcatagcgagcgctgtgggacggcgggcggaaaacggccgaatccgcgtgccgtcccacacctcgtacaatccgcgttttgggaaagcatcaccgtaaggctgacgcgcatccgcatccacagcaggagccttaccggccgtaatcccgcactcgattattttttctgacaggaaatcgaacccgaaacactaacccatgcccgccccaccgcaaacagcgaataaccaaaaaaatgcatgatctatccttggtgccgaataatgagagcctgactgtagtggctacgggtagctatatcggagaaggattcgatcagaagcgtttcgacacgcttctgcttgccgctccggtctcgtttgagggtactctctcgcaatatgtagggcgacttcatcgcgagaatgatggcaagaccgaggttcgtgtctatgattacatcgacgtgaccgtgcctttatccgctgtcatgtatcgaaaacggctgaaggcatacgcaaatcaaggatattcggtaaatcctgaccatactgagaaaatggacatgctcagtgcaaaggcggaagcgttgcgcgcttgcatgacggccgcgacgcagggcgaagatgctgcggatgcgttgctcgacacccggtctgacggattattcgaaggcagcatcgttacagccacgaattatgcagagatactccgcaaggatattgccggttgcgcacgttccctgattatctcggctgaatatgtatcacaacagggactcagcgcaattgacgatgaattgctccgactggccgacaggaaagcgctcatcgaagtctatgtccgtttgccggcgactgctgcggtggcaaccagaacacgaatagaacggaatattaatcggctgcgtgctattgggtgcattgtccggaccgtcgaatcgtgttccgattttgccataatcgatgacggattgatttggtttggaggcatccctttacttggcaatccaaggagtgacgactgtgcacttcgattcaaagatacgaaaatcggcgagaatctagcagatggactgaaacgacggtcgtcctgagtcaatattcagttaagataatcgcgcagtacgagggcgtgattgacgtgcgggtccttggcggcgtagagcagggtcacgtcgggatgctccgcgcagatgcggcgcagattgtccacggcggcattggcgtcgagctcggcgatgtaacgcatgcggaattccgcgaatttggcggggtcatggccgaaccatttgcgcaggaggggagagggggcgacgtccttcagccacaggtccaacgccgcacgctccttcgtcatgccgcgaggccacaggcgatccaccagcacccgatacccgtccgacgcagtcggctcttcatatatacgtttgattgcaatacccatacgccctatgattggcgtgcgcttgccggaagtcaaggggagacgtgatccatctacccgttcgatttctgggtgttctgcctaaggccttgtgctatgacagctagcgattcagcagcttttggtgatatcgtccaaccgaaccgtcttgcccctgtcgaaggtgttcatagtgagatcgacgggtttggtcttgatgaacgccgacagcgcggtgtgcggcgggttgccgatcaagtgggtgatggggcatcgcctcctcgacgctgacgcccacaatggcgtaaatggcacgcgccagcagcttcatcagtggcgaatcgaaactgttcaatgccccattgctgcgcacggcccaagggttgaacaacacatagcggatgcggcctccggtctgctgttggttttccgcgaagagcgctccccagcagatcgttcagacgactcgtacagatagtcgcgcaatgctagaacgtgattgatgtgcacccttcattgacggtctctcaattgatctcctgcgattcatgccgtataaggaagttctcgaccaaggcgatcatcgtgtccttccccgcaggtgcggacagcgcaatcatcagcgtcatcgccgccaaggcgttaccctccacaagcaggggagtcatcgtcgcccagtatactgttgccgttcaggaaatacacgaacagtgcggcggcacaacgtttattgccgtcggagaacgggtgattcttgacaacttgatacagcaggttcgcggctttctcctgggtggaacggtacagttcttcgcctccgaacgtctggtagagtcctgcgacgattccttggaacgaaccgttgcgttccctcccgaacagatcggattgcgtgtagaacggcatcgaccggatgaacagcatcgcgtcctcataggtcaagacccactgggactcgtcgcccttgggtatagggacattgcctgtgtcatagtcgttaagcagcacaagactcggcaaatatcgttccaagatctctgcggtgccagcaatttccggttcggtgggcctcgatagcaccttgacgacggcgtgaagtgcgtcaagccgcttgtgattgatggtgtaaccatcaacgagatgctgcttcagaactgagttggcccatcgccggaaattagatgccttccttggatttgacgcggtatccgaccgacaggatcatatccaagttgtaatgctcgacttggtatgtcttaccgtcagatgcagttgtcgcaaattttgcgacaactgaaaatccattgagctcttccctcaatgcattgccgatatgcttgccgattgttttgatatcgcggccaaacagcaaggccaattgctttctgttaagccacaccgtatcctcgtccaccttcacatcgaggtgcacggtgtggtccgcgctttcgtactgccggttgagaaccgggtggcaggggcggccaccaccagtatagtcaccacaccggcgcacaggatgccggcgatggaggccacatccgaagcgatgtccgcacctgcggccggcagcagtgtgccggaagcgtagtcgaagcgcgcgatgtacaggatgtagagagcgaccgtcaccaccgtctgcaatgccacgtacacggcgtagataccaaacagggcaaggattttcgcattgatgatcgtggcgcggtccagatccttgtacaggaacatgcggccggaggccacgggcgtatagatggcaccagccaccagataggccatgaccaccatcggcagcatcaagcatgttctgtacgacgaactcgccagcgaggaaatccagcacactcaccgaaccggtctttccgctgactttcatgaaatcggagttgaacaggttcacggccggcagaatcagtatgaatgacggcggccggatccaaagccgcgaccgccgcacgtttcgcgacaccgagcggccggccaagctcgataaccgtgatccgcttctgttcgccggcgaattcgtccgcaagccggccgcctttgatgaacaggaatcgcccgcacaactcctgcaattcgttgagctgatggctggagatgagcatggcgatgctgcggtcgcggtacggccaaagtcccacaagttcaagcaccgggcggattgggaggcgcgagcggtgggtcggacgattacagtgtgagccgaatacgttcatgaatcatcgaatcacaaggcgaggcggcccgcaagtattcgagagtcgccagttcggtcgatttcaatgacaatggtgtggacgattacgcggatatcgtggcgggtgcgcgcaaggacgccgaaaaccatccggcttacgattccggctactatcagggcggctatccgccggccgattgcggggcgtgcaccgtacgtgattcacaacatggcgcagcggcagcgcgaaaacgactacttcgccttcaagaagcacatgacggtcaccgggcactaccgtttcgacgcttcgaaagtgctgtagagcgtactcagggcttggcggtgacggtcggagcggcgtcggcattgccggctttggctccggctgtatcagctgaatcggtgccggccgcactggcgttagcactatcgtcagcgttggcaccgccggctttggccttggcatcagccgcgctcccgccatcgatcaccagtcgcagataatcgcggtcggcggacttgcggcgcggcacgaaccgactgatgatggagtttttcttgccgcggttcttcacgtacaggaagccgaacacggagaacacgaccgcgccgatgaagttgacgataagatcctccatcgtgtcgatcagaccgatgtcgaggtagccgccgaggcccaagtcttggccattgaccgtgacctgggtgatgtcgttgatgcgaatcgcatggttggtgtgcgtggggtcgagcatcaccgagctgatggaatgcacgatggcgtctttctgcatgtcgaatccgaacaactggtccatgccgaattcgaagaactcccagatcacgccgatggtcatggagaagcagaaggagacgatcgccagatacaggggcgaaagctcgaacttcacccggtcggaccggttgagcaggtcgaccagcgagaagccgatcgccgcggcgaggaagccgttcatcgtgtgcaacaccgtgtcccagaacgggaagatctcatagaacgaactgatctcgccaagaatctcggacgagaacacgaacaccagcacgatgacttccagcaccgaaggcagctcgatgcggaactgcacctggatgaacgccggcgccaacagcaacagcaacgtcaggatgcacaggaacacattttcgtagtcgccgttaaagaactggagtattgccatggcgagcaccagcatgcgcagcaccacatagaccgcgaatgagcttttgtgttcgcggatttccatgtctacggctcggctcatggtcttccagcgtacgcgccaggacggtttgcgttgtgcgtcgtgctgttgtgaccgtttccgggtcattcttgcctctttctcgcattgttctcgcgccagtctatccgaacctgcttacaggcaatcggcaagaacgggcgatagtctggccgcatgaaccgaatggaaaccgatgctgcctcgattgtggaccgcacgaatcatgtggcgatgctcgatagggccattgtgccggcggcacgccaccgcgtgctgattgcagtgctcgccgtgctgctgtaccgccgtatgggcatgattacaccgctgatcgtggctcatggcatgtatgacgtctccgccgccatgaccaatctgaccggaatcgccggctcctcatggtcactggtcgtagggctggcaatcatggccatgccggtggtttgggctatcgtgaggtgtgcgagataggctttgtaccggttggcagcaaatcaaaccagcgagacaacggaatgaacgaagcgaaaggaacggtatctgatgactccgattgaattgtcaacccgacgccgggttacgggactgacttcggatgagttcgccaggctgttcgtctctttgcaacgcgatgtggacggcgaagccgcgcattggagcgccacggacgtcgaatcctgggagctggtcggcccgccggtgaccgccgaacagcatcttatcgacacgttcgccgcggccaacgaattcgtggccacgcttgcggaccgtctgtaccacacgatcatgccagtcacggaagaatcggtcatcaccgcatacgctgatgacctcacattctgggcatcgcatccggaccttggcggagtgccgtgcgcattatggaacatcgccgcactgcaggcggccgaatgggcccgcaaggaaaccggcatcgcctgtgaactagacgtgcgcgaaccgctggtgtgacagctgagctcaaacatgggcgtaggtaacggcatggtttgaggactatggtgttgcgttaccggtcggaaaggatatgatggtggggcgtcatagcaaaaaagcgcgtggacagtcgaggagacatgcgcgaaagccctccgtttggagtgaaattcgcggctatctgctgacggtgatcgcggtgatgctggtcgtgttgctgggacgcaccttcgtgttcaacgtctatgtgattccatcccgtagcatggaagacacgttgcaaatcggcgaccgcgtatttgcctcgcgattgactccgagactctttgcactgcaccgtggcgacatcatcgtgttcaaagatcccgcagactggatggagggggagcagcttcccaccaatctgatgtcgataatcgacagcaatcgttacctaatcaaacgtgtcatcggtctgcccggcgataccgtcgcctgcaagggatccggggagcccatcacggtcaacggcaaacccattgatgaaagcgcttatcttaagtccggcgtgaatccaagcgacagtcctttttccgtaaccgttactgacggcaacgtgttcgtgcttggtgataatcgctccaattccagagattctcgataccatcttgacgacggcaacaatgggctagtgccatacgacgatatccaaggtgtggcgttgttccgcttctggccatttacgagaatcggcttgctcaattgagtttggcgtgaatacgcaagttgacatgtgtcgcacggcccggtgcatcctgcagtcggaccgtttccggaaccctccccccgaaatctgacgaccccctgtctcacagctatcgtacagctccgatacgggaaacgtgcgggtgattccataacgactacgtacttcaggaagtgacgtgtatcacattatggtcatgtgttcagtgccgcagataggcgaagtttattcatgagccgaatagggccggtgaagcgggctctcactgcgttcataatacggcatatcgtgaacggcgttatcatcacagtcaggccgaattaaaggaggctggtcatggtcgccgcatccacggcattcagcccgtcaagcacgatgacggccagtttggtggaatcgactggcctgcccagtgccgctattcctgtgcacgaggatggtaacaacggcaacggcgacagtagtgccgatggcagcggcgacgacggcggcatggtcagatcgctgagcctgtggaactacttcaccatgggattcggcgcaatcatcggcaccgtatgggtgctgctggtcggtgactggatgatcgtcggcggtggcccggtcgaggcgatgatcgccttcgtgctgggcgccgtgtttctgctgccgatcggctcgacgtccggcgcggttaccatggtcgggtcgtttctgcccggagtgctggtgatgacgccgctcttctacaccggtttcgacacgattccgcagagtgccgaagaggcaagcgaaggccttgactggaagaagttcggtatggtcatctcagcttcgctgctggccgccggcttaatcatcattggcctgcaggtgctgccgttctccccggccgcgctcaaacccacatcatgggcaatcgtggcggtgtggatttgctgggtctggcattgcgttggatcagtgcacgttcacggcgcgaatagcggtgcgccggtaggtcgcgagccgttcagtcacgcgcgacccaaagcgtatcgaggtcgtcggcctcggtcgcctttttgcgcttgcgtacccactgttgcaggaaatacgccccatagcaggccacgatgaacacgagctcggccacgagcgcgaaccgttgctccacgtcgaaaatcaccaatacgaacgatgcggtgcacaggatgaacgccgcccaagacacgtacggatagccgggcgtgcggtatttgagttcgctggtggaatggccggactccagccaacggcgacggaacacgatctggcagtaggcgatggcgatccacaccaccacggcggacaggccggaaagcgccaccagcaccaggtacacagtcgaggcggcgatcacggaagacaggagcgccagcaggccaccggccatcgcggcgcacaaggcgagcatcggcacgccgcgacggttcgttttggcgaaccagcgcggaatcatgccttcgttgcccatcgaccacaccatgcgcgtggaggcgtacaggccggaattcgaggcggaaagcacggccgtcagcaccacgaaattcatgatgtcgcccgcataggggatgccgatgctgttgaagacgagcacgaacgggctttcgcccacgccggcctggcgccacgggatcagcgcgcacatcacggtgatcgagccgatgaagaacagcgccagacgccacagggtggtgtggatggctttcggcacggcggtttgtgggtccctcgtctcaccggcggtcacgccgatgagttcggtgccggagaacgcgaagttgacggtcagaatcgtggcgaacaccggcatgaagccgttggggaagacgccgtccttgatgagattgccgaacatcggggcatgttggtagccggcgaccgggatgacgccgaagatggcgagcgatccgatgacgatgaacgcgcagatggcgaacaccttgatggaggcgaaccagaactccgcctcggcgaagaaacgcaccgacaaggcgttcagggtgaagatgagtgtgatgcacgccgcgctccacgcccatgtgggactgttcgggaaccagcgctgcatgagcagcccggcggcggtgaactcggatccgagcgccaccgtccatgtgagccagtactggatcgcgatcacgaagccggtgccagggccgatgaacttctcggcatacacatggaaggagccggtcaccggcatggccacggacagttcgccgagcgtgagcatgaccaggtagacgatcagcgcgccgatgccatacgccagaatggtgccgatggggcccgcctgctggatggtgtatccggagctcaggaacaggccggtgccgatcacgccgcccaacgagatcatctgcaggtggcgggattccatgccgcgcttcaggttggtatgtagggcgtgctcgtctttgccatcatgtgacgactcggactggctggtttgcgctggttggttcatctgttccgaatggcttcgacggccatccgtctgaatctgcggttcctgttgcgaggacggcgattgtgccgccgtgtcggtgtcgggctgactcatgtttctctctttgccatgcgtgcgttccataggcgtcgtcgtgacggcccggaatagtatacccgcactgaggatatagctgcgctgcatgatgctgagtcaaaatcagcttcaaggggctgatttggcgtttgccggaggtctacttccgtttcaaggggctggtcaactggcggaacgcagatagaaatggcattgttctatcactattccgccgtttttaaccagtggctactttggcatcagccccttgaaacggaagtagatgttccgcaaagtcaaaatcagccccttgaaacggagataggcactcgcagcggctacttcaccttctggatacgcagcacgaacacggcagcgcacacggccatgacgatggagatggcgaacgccggcgtgtaggtgccggtcgtggtcttgaccacggaggtgatggtggggccgactgcttggccgagcgtggtggccaagctgaggatgccgaggtccttgtcggcctcttccttgttcggcaacacgtcgacgttgagtgcctggtcgatggccgagtacacgccatagccgaagccggcgatgcccgcgtacaggtacatgcccgtgacactcggcatgatccacggcatcacggcgccaatcgcgaacagcagcgaggcgatgatgaccggtaccttgcgcgtgtgcatcttgtcggagatcgggctggagatcagcgaagcggtcagggaaacgaccagggtgatgacggacatggtggcgatggtgccggcagcctcggtcttggtctggtgcacgtaatcctcgacgatgtagagctggtacacggagatcatctgggagctgagcaacatgcatactcggcagccgaacgccttgtagaagtcacgcgaggtggagaacttcgggaagtggaaggagacagcgagatccttgagcgtcatcttggtgcgttccatgtcctttgaggattcctcgcgaggtcagatggcaagcgccacgaatccggaagccagcatgatcacggcgccgatgatgaagccggcttgcgcattgttgatcatgcgagagccgatcatggtgccgatgggctggccggcgaccatgccgccgccgtagaaagaggagacggtgcctcacgattcgccgcacccatcagccgcagtcgtgccggcctacagatacatgacctacgcagattgcagccagctggtgcaaggcgggaatgtgaagtcattgtgcgtttgcttcgcgaagccgcgcaatgccggattcaaagcagctgctcatcattgctatggatgcgggactgaatggtcacttctcttggac

SEQ ID NO: 3402 - DNA, 5992 bp, Unknown
  R151_18m  MAG No. k141_33396
taccccaccgtaaacgtcaccggatcgctcttcaccttcggatgatccttcaaactcagctgcgccacgtacgttcccgcattgaccttggcccaatccgactcatccgtgcattcggtgagcgtggcgttcgcatcggtattccacgtgaccttctgaacgtccttatcacccttggacatcagcagcagacgtgaatccgccggacacacatcggacttgtaaatcgtttcctgaccggaagtaatggtgagcacacggccggaatcggccccgtccaccaaacagttgcctgacccctcgtgcacgatggtcgcggtgaaatcaagcgatcctcctaccggcacggattgggaggccgcggaaagctgcaatgtcacatcactggccgagcaatccttgacgttgctgactttcttcggagccggcgtggcgtcgcgggaaatcgcatacacctcgtcatggtgaatcatcgtgttcacggcaccgataccccggccaaggctgtacacgcagaatacaatcagcgcgattatcagcagcaacaccgtgccggccacgatacgccgacgacgatagatggcctgctgctttttgctgatcctgcgcttgcgcggcttgccggaacggtcgtttcgggcgggcccgccggatggcccattggccccggtgccggctccgcgtgccgttctcgcgcctgatgtgttcctctgcactgccataacccttccagtctacggtcaccacacccatacacgcttggggagcccgccattttcacaatgtcagctgggtaatcgcaggccgccgtccagaatctcgatcaggccgtcatcgtcaaggctggcgatgcaggcggcaagctgaatctggtccttccaaagcttgtcggcatcttccctgggcaacgtgactccagcgggaagctcgcgcagcgcggcgagcaccagaccgcgcacctgtcgatccgtgccttggaatcgttggcgtgggcgggtgcgacgctcccccagtccggggcggccggccttgaggaacgcgcaatcgtcggcaatcgggcaggtgtcgcataacggcgatttggccgtgcagatcaccgcccccagttccattaccgactggttccatgtgaccgatgggcgttcgccacgatgcagtcgggagcgtttgccgccacggatagtgctgttcacggtatgttcggcgctaccggcattatcggcgacgtcagcatcgcgcccgagaatctcgtctttgggcagcatgcggttcgccagcgcgcgttcggccgggctggccgctcccccgcgcgattcgacgccaaggaacacacggctcagcacgcggcggatgttggtatcgatcacggcgattcgttcgccgaacgcaaagctcagcaccgcggaggcggtgtaatcgccgatgccgggcaatgcagtgagttcgtcatacgtacgcggcagtttgtcggcgtactgctcggccaccacgcgggcgcattcctgcaatcgcagcgcacggcgaggatagccaagccggccccatgcggtgatcacatcggctttaggtgctgcggcaagagcacgggcgtcaggccagcgtgccatccaatcgttccaatacggcaccacacggctcatctgcgtctgctggctcatgacttcggataccagcacgccccacggcgtggcccgtccgaagcgccatggcaagtcacgcgcattggcctcccaccatgctcccaatcgcaaagaaattgctgtgtcgttcatcgttcttattcttagcagctatgacgaacgaggcaaaacacaacccccagagcacaccgaatccagcaaatcccgaaaccaaagtcgagaaaatgttcgaatacggctatcgcaagtcgaattacgggccggacgagctggtgaccgacgcacacggcaaccccatctccgtggtggacgcgatgctttccgccgagaaggccgccgccaccgaaaccgtgacgccgcacctgtgctattactcgccgcgtattcccggcaacaccggttcggccatccgcctgtgcgcagtgaccggcacgattctgcatctggtggagccgctgggcttcaacctgcgcgacaccaagctgcgccgtgcgggcctcgactaccatgacatggcccacgtggtgttgcacccgaatttcgacaacctggtggagtcgatgcccaattcgcgcatcatcgcgttcaccgcgcacgccaccaagctctacaccgaggtggaatacaagccgactgacatcctgctgttcggccccgagcccggcgacatccccgacccgatggacatcatggagggccctcatgtggccgaacaagtgcggctgcccatgcgcccgtccctgcgttccctaaacctcaccaactgcgcatccatcgccatctacgaagcctggcgccagctcaattttgcgggcggagcgtgaggagaaggcccggtgggccttcgagtaacgacgccgaacgaacgccgacaggcgcgagagcggaaacactgagcttcgcgcagtgatggacgctgaatataaggctacctgcgtttcgaggggcggatttggcatccgccggaggtctactgccgcttcaaggggctgtcaaaggacgagaccccgagtatggccgttgaaatatcaatgcttgtactcggggtcttcatatataccagcccctcgaaacggaagtagacctccagaaaggtcggaatcagcccctcgaaacgggaatagacctccagaaaggtaattcgagctggtatctgccttcaaagaggtacattcgagcgtttgcagaatgctatctgccttcaaagaggtaccgcaatcgagaaaccccgggtatgagtgttgatattccaacgctcatacccggggtttccgcatataggtacctctttgaaagcagatagctctccgcgaggggccaaatgtacctctctgaaagcagataccctaccgaatcaattcttgaagctgtgaatcggcgcagggattcggccgccacgggtcacgaaggcctcgcagctggtctggttcaccggaatgatcggcgcatagcccatcaggccgccgaagttggccatctcccctacgcctttgccttccaccggaatcacgcgcacggcggtggtcttctggttgaccatgccgatcgcggcctcgtcggcgatgatgccggaaatggtggctgcggtggtgtctcccggaatggcaatcatgtcgaggccgacggagcacacgcaggtcatggcctcaagcttttcgatcttcaggcagccattggttgccgcgtcgatcatgttcttgtcttcggagaccgggatgaacgcaccagacaggccacccacgtagctggaggccatgatgccgcccttcttgacctggtcgttgagcatggcgagcgccgctgtggtgccgggagcgccgacctgctcgaggccgatcttctccagcacttcacccacggagtcgcccacggccggggtcggggcgagcgacaggtcgatgatgccgaacgggatgccgaggcggcgggaagcctcctgagccacaagctgacccacgcgcgtgatcttgaacgcggtgcgcttgatggtctcgcacaggaactcgaaatccttgcccttggcctcgtccaatgcacgggagaccacacccgggccggaaacgccgacattaatcaccgcgtcgccttcggtcacgccatggaagccgcctgccatgaacgggttgtcgtcaggcacgttgcagaaggccacgaacttgacgcagccgtaggagtcgttgtcggcggtgcgctcggcaacgtccttgatgatgtggccgagcagttcgaccgcgttcatgtcgatgccggtcttggtggaaccgacgttcacggacgagcagacgatgtcggtctcggaaagggcttgcggcagggagcggatgagcaactcctcggccggggtcatggacttggagacgagtgcggagtagccgccgatcaggtcgacgccgacctccttggccgccttgtcaagcgcgtgggcgatcttgacgaagtcctcgctcgtcttgcaggagctggcaccgaccagcgagatcggggtgacggtgatgcgcttgttgacgatcgggatgccgtagtcgcgttcgatggccttgccggtggaaacgaggtccttggcataggtagtgatcttgcggtagatgttgtcgcaggtcttgtcgacatcgtccgaggcgcagtcgagcaacgagatgcccatggtgatggtgcggacgtcgagcttctcctgctcgatcatctgattggtctcgtggacctccatgatgttcagcatggtttgttccttacaggatatttaaagactagtttggcggtcaccctcatcagagggataaggatggctccgtcagcggaaagcccaccgggctttccgcctcctcgcgtgcggcggcctgctgagcgggccgcctcaaatacggtgcatcttggtgaagatttcctcacgctggcagcggatgcgcacaccgatgtcgtcgccgaggtcctcaaggttgccgaccatcgcgccgaagtccttgtccgcgttggcgtagtcgacaatcatcatcatgttgaagtaaccgtcgatgatggtctgggaaatgtcaagcacgttgacgttgtgctgggacaggtaggtgcagacgcgtgcgatgatgccgacggtgtcctgaccgacgacggtgatgattgccttgttcatggctctccctggtcgtatacaaaaagcgggtgactacccaattatagggaagacacccgccattatgttcattaccgattcatgtatcgtttgccgcccttgaacatgaaggagaacaccagcacaacgcccgagttgacgccgatggtaaagaactgtgcgccgccgatcgcggtcatcaccacgccaatggccagtatgcagccgacgaccatccactgggcggtaccggaggatacggagaactcgtccatcaaatcgggcagggcgatgttcatggatgtctcggacagcatgccgaggaatgcgccgatgtacaggccgagcatcaccttatgcggatggtcgaaatgcctggtttcaggagcgttatgggggttatgggaataagtggtgccggattcgccggcgggcatggtggtggtgcgggataaaacgaagctccctcgtcagagggagcttgcaatggctcaggcctcgcgcaaagcgctcggcgctgcgcacgcggtcctgcaattacggacgacctacggccgacccagcattacctcggcctcgcctattggctcgacctcgaccgcatccgccggacaacccaccgggttgtcctaggcctcgcgcgaagcgctcggcgctgcgtacgcggccagggcgcgcggtgcgtggaagccttgattttcgaattcgtcggcgatcttctgagcgacttcctgagaacggcccttatcaaccagagcgatgatggagccgccgaagccgccgccggtcatacgcgcaccgtaggcgccgttcttgcgggccacgtccacggcgatgtccagctcggggacggtgacctcgtagtcggcggccagcgaatcgtgggaagcgttgaacagacggcccgcagccttgatgtcgccctgagcgaaggcacgcacgaaggaacgcacgcgctcgatctcggtgaccacatggcgcacgcgcttcttcatggtctcgtcaggcagggcgtcaagcgtttccttgagggcctggaactggtcatcggccttggagatgccgtcggcggtcacacgcaggttggccacaccaagaatcttggcggcttcctcgcaggtggcgcgacgctgagcgtactggccatcgttgagctggtgcggagcctgggtatcgaccacaagcagctcgaggttgtacttgtcgaggtcgaactcctgctgggagacgttctccagcggggtca

SEQ ID NO: 3403 - DNA, 2540 bp, Unknown
  R151_18m  MAG No. k141_34620
atcgactgggcgagcttgccggacgggctgacctggccgaagatcacatcggcgagcgccgggccaccggactggccgagcagccaggattcgaggatacccttggcgttcttggcccacggggccacggagaccacggagccgttggacagcacgaccacgacgttctggttcgcggcggcgacctgttcgagcagggcgatctgcttggcgggcatgtcgagggtgtcgcggtcgaagccctcggattccgcggcttccggcaggcccaggaacatgaggaccacgtcggcgttcttggcggtttccacggcttcggattcgagggccgggtcggccggttccagatcgagcgtgaagccgggggcgaagtcggccttgatgccgcgttcggcgagcgtgtcgaggaagctggtcagcttggtgggggtgatatgggaggagccgccgccctggtagcgcggggtgcgggcgaattcgccgatgacggcgatcttccgggccgcggcagggtcggcgttcagcggcagaatcgcatcgtcgttcttgagcaggacgatggattcgatggcggcctggtgggccacttcgtcgtgcgcgtccacgtcgaaacggtagccgtcgatgctcatcgcggcgcgggccttgttgatgaggtcgatcatgccctgggccatgcggtcgagctgggcgggggcgatgcggccatcgcgggcggcgtagacaatctggtcgtcggtgtagctcggcggcatttccaggttgaggccggcgttcagggaggccacgcggtcatggtcggcgccccagtcggacatgacgatgccctcgaagccccattcgtcgcgcagcacgtcggtcagcagccagtgattctgggcggagtgcacgccgttgatacggttgtaggagcacatgatggtccacggctgggcggtcttgacgatgtgttcgaaggccggcaggtagatctcgcgcagggcgcgctggctgatgcgggcatcgacgcgcagacggtcggtctcctggttgttggcggcgaagtgcttgagcgaggtgcccacgcccttggactgcacgccggcgacgatgccgatggcttcatgaccggccaggtacgggtcttcggaccagtattcgaagcagcggccgccgagcgggttgcgcttgatgttgacgccggggcccaggatcacggccaccttctcctggatgcactcctcggccatcgcctcgccgaccttgtggatgagttccgggttccaggagctggacaggccggccgccggcgggaagcaggtggcgggcacggagttgtcgagatcggtctcgccggtgctggaggtcagggacttgcgcaggccgtgggggccgtcggtgatcatgtagccggggatgcctttggcttccacgccctgcaggtgccaggcgtcgccgccggaggtgagggacgccttctcttccagggtcaaatccttgacggacgggtaggtggactcgctcatgttgcctctttccttgagtttcttgagttgtgcggttgtccgatatgcgttggctccgattcggccgggctgcctggctgttgttcgaggttcctccacgaatctcgactgccgttttctctcgaccaaccggttggtaggcagattatcaaaatctacggcacaacacgccgaaatcatttggaatcactactaaccgaccgtaaggttgcctgtatgaacgacccctctcccacagacaccgatcgccgtaccgcgattctcgacgccgccgtcgaatcgtttggcaaacttggctattacggcacgtctctgcaacgcatcgccaccgaagtgggactcaccaaggccggcgtgctgcattacgtgggcagcaaggagggactgctcaagctggcgctgaccgagaaatacgaccggatcaccgaatcgatcaacgccgcgatggtcgcccaggagcgcccgcttatcgcggatatgtggcgtcaggtggtggctgtgaacaacaagaggcccgcgttggtgcatatgttctccacgctgagcgccgaggcgctcgacccggcccaccccgcgcacgattatttcgccgaccgcgagcgccgcacggtcaccacggcgctcaacatcaactgggccgtgccggaagacgtcaatgtcggacatgtgctgcaggccggattctcgatgatggacggcctccagctgcgctggctgcgcgcccccggccaagatctcaataccatgtgggccgattgcgaggatgttctgatgcctttgcccctttgggagggatatcgctaattggtgcggctgcaggccatccaaccggcgtgccaaacgtgggtgaggtcccatgggtcgagccgtgacgtgtcggattgcgggtcgatggtgggcaggaaagcgcgattgccgcgcagttggtagctccagtagatctgcccggcagatgcgctccacgctttgcgctgcatggcggcgacctcgcgatagacggcattcctcgctgaaggggttcggttcaccagattg

SEQ ID NO: 3404 - DNA, 9824 bp, Unknown
  R151_18m  MAG No. k141_35755
cacatttgtcggattgaatgcataaggcgggagcgcgattatgactacgaatgacatcaccagtgttgccccggccgtgcacaaggcggctgacggttccgtgattcccgctgtcaaggcggtgcaggtgcacaaggcctttggcccactgcatgtgctcaagggcatcgatctaaccgttatgcccggtactgtgacggtgattctggggccctccggttccggcaagtccacgttcctgcgtctgatcaaccagctggaaaccctgaccggcggttccatcgaggtggacggcgaactcatcggctacaagcacgtgaccaaaaacggccaggacatgctgcagaccctggacgataaggagatcgccgcacagcgctctcgcctcggcatggtgttccagcgcttcaacctgttcccacacatgaccgcgctggagaacgtgatggaagccccgatccacgtgcagcaccagtccaagaaagccgcccgtgacctggccgtggccgagcttcagcgcgtcggtctgggcgatcgcatggactattacccctcccagctgtcgggtggtcagcagcagcgcgtggccattgcccgtgctctggccatgaagccggagatcatgctcttcgatgagccgacctccgcccttgaccccgaactggtgggcgaagtgctcaacgtcatgcgttccttggccaaggaaggcatgaccatggtgtgcgtgacccacgaaatcggcttcgcccgcgaagtcgccgaccagatcgtgttcatggatggcggcgtagtcgtagaaaagggcggccccgacatcatcgaccaccccaccgagcctaggtttaaggacttcctacagcatgtgctgtaggaaggctgttatattacctcagcactgtcgtgcttcggcgtcgcctacggggagcccactgggctccccgctttacggctccgcctacagcacgtgctgtaagaaggctcgttgttgcagctccaaaagcgtacgctgatgaactcagcgtacgcttttcacgaaggggcatgttccaatcctgcaaaggcggcgggttggattcgctttgcgcaataatcgtccgctaggctggtgagccatgtgtggaatcgttggatacgcgggaaatattgaaacggcatgcggcaagcctttggaggtctgcctgcaaggcctggaacgtctggaataccgaggctatgactcggccggtgtggcgctgaccgcgcccggcatggataaggtggtcgtgcgcaagaaggccggccgtttgaagaacctggtcgaagacatcgagcgcaagccgatgccgctcgccacggtgggcatcggccacacgcgctgggccaccaatggcgagccgagcgacgtgaatgcccacccgcacaccagcatggacggcaaggtggccatcatccataacggcatcatcgaaaacgcctctcagctgcgtttcgacctgcaagccgaaggctaccgattcgcctccgccaccgacactgaggtggccgctaagctgctcggcaagatcgtggacaagattatcgcggacgaaggcaagccagacttgttcaaggctgtgcgccgtatggcccgcatgcttgaaggcgcgttcaccattctggccaccgactgccgccagccggacatcgtggtcggagcccgccatgattcgccactggtcgtgggccttggcgagggggagaacttcctcggttccgacgtcgccgcattcgtggcctacaccaagcgcgccatggaagtcgaccaggatcaggccgtatgcgtgtccgccgacaaggtcatcgtcgccgatttcaacggcaacgtggtcgaaaacccgaagacctacaccgtggattgggatgcttcggccgccgaaaagggcggctgggattcctttatggacaaggagattcacgaagaccctgccgcagtgcagcgcaccctgcttggccgcttcgacacgaatggcgacatcacccttgatgaagtgcgtatcgacgaacacgacttcaaggccatcgacaaaatcatcgtcgtggcctgtggcaccgccagctacgccggccaggtagccaaatacgccatcgaacactgggtgcgtatccccgtggaaatcgaactcgcgcacgaattccgttaccgtgacccgattctgaccccgcgtacgctcgtggtggccatttctcagtccggcgaaaccatggatacgctgatggccctgcgccacgcgcgcgaacaggggtccaaggtgctggccatctgcaacacgcagggtgcctccattccgcgcgaatccgacgccgtgctctacacacacgccggcccggaagttgccgtggcatccaccaaggcgttcgtggcgcagattaccgccgcctacctgctgggcctgtatctggcgcaggtcaagggcgcgatgttccgcgatgagattcatcagatgctcgactccctgaaagacatgccgcgcaagattcagtgggtgctcgacacccagcccaagaccatccaggcggccgccgagcgcatggtgaacgccaactccttcttgttcctcggccgccacgtgggctacccggtggcgcttgagggcgcgttgaagctcaaggaaatcgcctacacgttcaccgagggcttcgcggccggcgagctcaagcatggaccgatcgcgctggtggacgagggtgagcccgtggtgttcatcgtgccgccgcagcgcggccgcaatgtgttgcacgccaaggtgatctctggtatcgaggaggtcaaggctcgtggcgcgtacatcatcgccgtggccgagcagggcgacccggatgtggaacggtacgctgacgtggtgttctggcgccccgcctgcccaacgctgatgagcccgctggttgacgtggtaccgctgcagctgttcgccatggacatggcaaagctcaagggctacgacgtggacaagccccgcaacctcgccaagtccgtgaccgttgagtaagccacatcggtatgtgattgacgagcctcatattccgtttgagatggacgtgctgtatgaggacgagcggatcatcgtggtggacaagccgcattttctggccaccatgccacgcggcatgtggtatcggcagaccgcgctgatccgattgcgtgagcggctgggggagccggacatcacgccagcgcaccgattggaccgcatgaccgccggcgtattggtgttcgtgcgggattcggcctgccgcggcgcgtatcagatgctgttccagaaccggcaggccgtcaagatctatgaatgcctggcaccctgccggccgatcagcggcccgcgattcggcacgatcatgcaggtcgaaccgccacgcccgttcccattgctgcgccgatcgcacatcaccaaggaacacggcacgatggccgcattcgaggaaccgggtttggccaacgccgaaaccctcatcgagcgcggcgatctctgtttccctcccgctggcgggaggtggcgcgaagcgccggagggtggtccccatccgggaaatcaccccatctgccgctacacactccacccgcgcaccggcaaaacccaccaattgcgcgtccacatgaattcgctcggcctgcccatcgtgggcgacgacttctacccgcgcatccagacacgcccctacgacgatttcagccagccgctgcaattagtggcgcgtgtgctacgattcaccgatccaataacaggcgagaagcgcgaattcgtttcccgtgtgccgcttaagatctgatttcttaggggggatggcgagaccaatccccgcccgtccgaatcactgtccctttcgactggccatccagctcattgcatcgtcgtacaccatcatgatgcgcttgcgatagctatcgatgaattcctgcgcaccaatgctcgcgataacgtcgtgagcgggttgcacggtgctgtcgaatgcctccggcagcctatccaccaaggtgtggaatcgtaaaatcacggattcctcatctaatcccatccgctgtgcgaatcgttccagatgtttgcggcgtaattgaagaagatctcggcgtccgccgatgttcatcgccaaagtggcatttatgatctgcttgccatgccccaaataagggaacaccgaagcaaggtcatagagcggggcaagccgcacggacgcgccatcgagcaatagcgagtagttcttggcgtggctgtctgttgccccgacgagataactggcgaggatgccgtcggtgaaggctcggatattgctttcggcctgaccgggcagaccgtgcttgcgcaacatttccgcatatgcattggacgttgggccgttgcgttcctcgtatttcagcgatgagggaatgcccagcgcttgggtaaagtcttcttggtgcagggccgtcaccgtaccattggcggacactatacggtcataccgctcgctgatgatggctgggaccccatcaaagatgtgaaaagaggtgtgggccacgggtattcccatcgcctccacaatgcgcatggtgatgtgttcgttgaatgcttggtgtggaagggtcggtatgccgggcttgatgatatgagtcgtccgcgcgattccagtggtggagaaccatgatccattgcggttcctcagtgcgatcttgccctgctgtcccgcgaccgaccaatgctcgtctacgcttgcggactggatgcctgtgggggcggctgcgcgtagtcgattcgcgatctgcgaatcgctgattggaataagcgaatcgtcatctatgggcaagtgcgggtcggcggacagccgtaatgcgccggtggcatcgaatccgatggcttgcagcagatcaaatgcgcttgtcgatcgggcatgatgcaatcgcatggcttcatctcgggcctgaggggattccgggaccagggcctcaaggaaattacgcgggatgtcgcctgaatattcggctgcggtaatgggcatggaaagcgatattggtgtgggtgattgcgaccaacgataggaatcgtgatattggaaaataatgctgccatcgtttgttcttcgaaactggccgatgggtgtttcgccgagaaatgcattgagagtgttttcgctcatggtgtcaccattcatagagttcggcgggctgcggggttttgcggacatccagcgacaagccaagctcagtcagagcgctgagaatggtggagaatccgggattggggactcgggcgtgttcaaattcgatcagccagcgacgtgacacgcccagccgttgggccatgtcggtctgactgatgccctggcgttgcctttcatccttgataagccgcgcgtattcggcgatatccatgacaatcatgtgcaaaatatatcacagtatagtaaagtgtgcaatattctgcacatagttggaaatgtgcagaatattgcacaaccgagtcgattggtcggtgcggaattgcctatggatcactggcaggtgaatcactgacaggtaccagtggatgccagcacatgccgctcgtcagctgatgtcgcgcacggaaccgcgttcgatcagttccggcgggattacggttttgacgccgaccggtatcttctcgccttcgcattgacggcggaccatggagaaggcggtggcgccaatgtcgtcaaagcgcagcttcatggtcgtcaggttcaagcgcggaaccatatctgccagcgaatcatcgacgcccacgatgctgacatcctcgggcacgcgcttgcccgctgactgcaacccgagcattgcgccgtatgccatttggtcgttggcggcgtagatggccgtgcagtcggggtcgtgggccaacgccacgccggcctggtagcctgaatccgcgcaccaatcgccgatgtacatgctcggtacgcgtgctcccatttgttccaacgcttctcgccaaccgcgggcgcggctttcggcggcgcgcgaggtggacggtccggcaatgtggtagacggtcttgtgccccttgctcatcaggtaatcgacgatagcggtcgagcagccatactggtcggcgtcaacggtggggcagtggtcggcggcggattcgcagatgagcacgactggaagttctcgcggaggcttgtatccgacgaaatcggagatgcgttcctccagcactacgatgacaccatccaccggctgacgctgcatgcgatcgatggcggcggaaagcgtgcgttccgcaccgtggcgcatggtctggatggtgactgaataatcgtcatcggccgcgttggccacaatagaatcaaggatgcgggcgttgccgaacgcggtggtgttgaacatcaccacgccgatatcctggaagcggccgtgctttagggctcgggccgcataattcggacgatacccaaggcgtttcattgcagcttcgacacgctggcgtgtttcgggtttcaccgcatcgctgccattcgccacgcgggacactgtctgtggcgaaacgccggcggctttcgctatgtcttgcatggacacctgtgttggcctcgacatttcaccctcgcttgactcattaatgttggtgtttcgtttgcaacgcttatcttagggccgcttacggtaacgataacatcgttgtcttcgtgaccattgtagcagagtgactgagaaacccttaattcaacacggtactcaacacgattggacaatgttacaaatggtgttatgatgataacgcaaacattttggtcaaccttcgaaggagaggggttgggaatggcttcagccgatatcgcagctgcgcccgtgcattcgggcaaggctcgtgtgaataagcacaaggccgattggcgtggatggaaattcatgtggccttttgcggtggtgttcgtgttcgtgttcatcgtgccgatcgtgtacgccgtttatatttcgttcttcaagaagcagatgatcggcggcaccaagttcgtcggcttcgagaactacgcgcgcctgttgggtgatggccagttctggagcagtgttggtcgtgtggccctgttcacgtgcgtgcaggtgccgatcatgctgtgcctgtcggctttgatggccctggcgttggattcgatgaagctgcatggcacgaggttcttccgtatctcgacgttcctgccctacgcggtgccggcggtggtgtcgacgttgatctggggtttcgtgtatggcgcgaagtacggcctggtgggttcgttgaacgatttcctgggcacggacatcgacgtgctcgcccccagcgtgttgttggccagtatcgggaacatcgtgacgtgggagttcacgggctacaacatgctcatcttctacagctcgctgtcgaccatcccgcattccctgtacgaggcggccagcatcgacggcgcgtcggagtggcagatcgtgaagagcatcaagcttcccgaattgcgcggcagcctggcgatcacggtgatcttcagcatcatcggctcgttccagctgttcaacgagccgagcattttgcagaacatggttcctggtaatgcgatcacgacgtattacacgccgaacatgtacgcgtacaacctgagcttctccggcaaccagtcgaactacgcggccgcgttggcgatcgtgatggccgtgatcaccatggccatcgcctacatcgtccagctcaacagcctcaaggagcagatgaagtgacgacgactactgctgttcgtgttgaggaatcgatgatgatcgtgaaggagcgtatgtgatgagtgcagcaacgacttcggccgccggtcgcctgaccgacggcgagctcaaggcccgggagaaggccgccaggaaggcggagaaggcccgccagaagaggatcgccgccgacgaggccgccgaacgcaggcgcagcgcgaaggcggggttcgcgaacgtgaacaacccgaggcgttccacgttgttgaccgtcctgtgcgcggtcttcgccgtgtactgcctgttcccgttcgtctaccttttgatcaacgcgacgaagacgcaggccgacttcaccagtacgttcggcctgggcttcggcaagacgttcgccctgttcgacaacatcgcgacggtgttctcctatcaggacggtatcttcgcgcgctggctgttcaacacgatcctgtacgtggtggtcggcgccggcggcgcgaccctgctggcgatcatgggcggctacgctctggccaagttccgcttcccggggcgcaaagcggtgttcgtggtcatcatcggcgcgatcagcgtgccgggcatcgctttggcggttccccagttcctcctgttcgccaaattgggcctgacgaacaccccgtgggccatgatcatcccgtcgctgatcagcccgttcggtttgtacctgatgtggatcttcagcgagcaggccgtgccccaggagctgctggaggcggcgcgcgtggacggcgcgtccgagttccgcacgttctggcagatttccttgcccctgttggctccgggcatcgtgacgacggcgttgttcacgatcgtggcgacgtggaacaactacttcctgccgttgatcatgctcaaggacgcggactggtacccgctgaccatcggcctgaaccagtggaaggaccaggcctcgaccgcgggcggccaggcgatccagaacctggtgatcacgggctccctgatcacgatcatccccctggtgatcgcgttcctgtgcctgcagaagtactggcagtccggactcgccgcaggcgccgtcaaggagtgatggagtcggctccgccgacgcggtgtcttcaccgcctcgcggcggggtctctccctccgtcccggctccgccgagacaaccttccccatcagagggaggtaatagtgccaagcccccctctgacgagctgagccgttaggcaaacagccctgtgggctgtttattcccgcggacgcagattatcgataaaattcaataaaggagctgaatcatcatggaacgtaaagagttcaagtggccgcagccgcttgcgggcaacaagccacgcatctggtacggcggcgattacaaccccgaccaatggcctgaggaagtgtgggacgaagatgtagccctcatgcagcaggccggcgtcaacctcgtctccgtagccatcttctcctgggccaagcttgagcccgaagaaggcgtgtacgacttcgattggctcgaccgcgtcatcgacaagcttggtaaggccggcatcgccgtcgatctcgcctccggcaccgcatccccgccgatgtggatgacccaggcccacccggagatcctctgggtcgactaccgcggcgacgtctgccagcccggtgcccgccagcactggcgcgccaccagcccggtcttccttgactacgcgctcagcttgtgccgcaagatggccgagcactacaaggacaacccctatgtggtctcttggcatgtgagcaacgagtacggctgtcacaaccgcttcgactattccgaagacgctgagcgcgccttccagaagtggtgcgagaagaagtacggcaccatcgacgccgtcaacgacgcttggggcaccgcattctgggcgcagcgcatgaacaatttttccgagatcatcccgccgcgcttcatcggcgacggcaacttcatgaacccgggcaagctgcttgactggaagcgcttcagctccgacgccctgctcgacttttacaaggccgagcgcgacgccctgctcgagatcgcccccaagccgcagaccaccaacttcatggtctccgccggcggtgccggcatcgattacgacaagtggggttacgacgtggacttcgtgtccaa

SEQ ID NO: 3405 - DNA, 21845 bp, Unknown
  R151_18m  MAG No. k141_35811
gcgttggccatcgcgagacaactcgtatgacgcttcacgctgcggcatgttgtcccggctattgcccacgcccattcccagctctccgcgccattcccgcaatcacgtctcttccccggtctcaagcccatgagacacttgaagccatgactaccatcatcatgcgcacctctgagggcgatatcaccatcaacctgttcgacgacaaggccccgaacaccgtggccaacttcctgggcctcgccaccggcgagaaggaatgggcggacccgtacaccggccagccttcccatggcaagttctacaacggcctgaccttccaccgtatcatcaagcagttcatgattcagggcggttgcccgctgggcaccggtaccggcggccctggctacgagttcgacgatgagatcgacccgagcctgaagttcgacaagccatacctgctggctatggccaacgccggtctgcgtcgcggcatggacggcaaggtccatggcaccaacggctcccagttcttcatcaccaccgtgccgaccccgtggctggacggtcaccacaccatcttcggcgaggtcgccgatgacgactccaagaaggtcgtcgataagctcgaagcactggacaccgatccgatggatcgcccgctcgagccggccgtaattctgtccgtgaacgtggccgagtaagaccgacacatatacagcaaaggtcctgattggtattccagtcaggaccttttcgtattcttggctccctctctgaggggagctggcgccgcagacgtctgaggggagttccgcaagcccgcgctgctcccctcagtcagcttcgctgacagcccctcccggaggggagccaagcaacggcctacttcatcttgcgcagtcgaggttcggcggattccttggcaccggtgatgcggtacacgtcgaacacgccgtcgatcttgcgcacggcagccagcaacgagttgagatgctgcggatccgccatctcgaagctgaactggctggtggccacgcgatcggaaccggtggcgatcgtaccggaaatgatgttcacgccatggtcggaaagcacgcgcgtcacatccgacagcaggttgcggcgatccaatgcctcgacctgaatcttgaccatgaacaggcccttggtgctggtccattcgacctcgaccacacgctcaggctgcttgtttttcagatcgatcatgttctggcagtcggtgcggtgcacggatacgccctgattacgggtgatgaagccgatgatattgtcaccgggcaccggcatgcagcaacgggccagcttgatccacacatcgcccacgcccttgacggacacgccggtggagctgctggaggccttgcgttccacgggcttgagcggcagaacctcctgctcgacctcttcatcgacctcgtcggcacccgcatccttgaccagatgcgagatgacgttctgcgtggagacctgtccgtcgccaatggcggcgaacacggcgtccgcgttcgggaagttgagatcgtcggccacacccaccaacgcttccggggtcaacagcgtgttgaccggcaggttgcgtttgcgcatcgcccgggtcagctcgtcgcgaccctcctcgatggcctcggtgcggcgttccttggaaaaccattgacgaatcttgttgcgggccttcggactcttgacgaagctcagccaatcgcgcgaaggcccggccgtatcggacttggatgtcagaatctcgacggtgtccccattgtcgagcgtggtgtcaagcggcaccaaacgaccgttgacacgtgcgcccatcgtgcgatgacccacttcggtgtgcacggcgtacgcgaagtcgacgggcgtggcatgagcgggcagggatacgatcttgcctttcggcgtgaacacgtagacttcggacgagccgagatcctccttgagcgaacccagaaactcattggagtcgggggtttcgctggtccaatcggcaagctgctgaatccatttgagattgtcggcttcggaaagctcctggttcttctcgtcacgcctacggtcggacttgtccggcgagctcagggcgcggccggcctggccgttttccttgtatttccagtgcgcggcgatgccgaactcggcgcggcggtgcatgtcccaggtgcgaatctggatttcgaccggcttgccaccggggcccaccaccgtggtgtgcagcgactggtacatgttgagcttcggcatggcgatgtagtccttgaaccggccgggaaccgggttccaccgcgcatgcacggcaccaagcgccgcatagcagtcctgaatggtgtcgacgatgatgcgcacaccgaccaaatcgtagatgttcgcgaaatcatggccgcgcacgatcatcttctggtagatggagaagtagtccttcgggcgtccggtgacgtatgccttgatgttctgctcgtcgagatcctcgttgatctccgccagaatctgcttcaggtacacatcgcgctggccggctcggcgagccaccagcaccacaatctcgttgtagatcttcgggtagagcaccttgaagctcagttcctcgagctccgtcttgatggcgttcataccgagtcggttggccaaaggcgcgtacacgtcgagggtttcacgcgccttcttctgggcggacgtggtcttcacatagcgccaggtgcgggcgttgtgtacgcggtcggcgagcttgaccaccagggtgcgcacgtcgcggctcatggccaccacgagtttgcgaatggtttcggcttgggcggagtcgcccacttcaagctggctgagcttggtgacgccatcgaccagaccggccacggtgtcgccgaactcggcacggcattgatccaacgtgtagtcggtgtcctccaccgtatcatgcagcagaccggccgccaccacaatcggccccatgcccagatccgcgagaatctgggaaacggccaacggatggatgatgtatggttcgcccgacttgcgccgttgcgtgcaatgctggatgacggcgcgccggtacgcgcggtcgaggatggacaaatcctcaccgggatggtgggacttgcataccttcttgattggatccagcggattgagcggatcggcactgatctcacaacccaacttacgggcggcgtactgctcgccatcaatctctgccatgccagtcacctccctcgtcatgaagttcattgtaaccgcgaaccggagccttgtgcatgcacctgttcgccatcattggttccgcaaccgtcgttgccgtcatcaccttggtcattcaaccggcccaatccggtcaggacgccactcccgtcgaaccgaacccacgttcggcgcgatcggatccgggcagggtttcggccgggatgaaccgggcctcaacataccgctgaatcaccaattgagcgatgcgatcgcccggatggaagacggcggtgcgttccggatcgaggttgatcagcggcaccttgatctcgccacggtagccggcatcaacggtgccaggcgcgttgagcacggtgacgccctgcttggcggccagcccggaacgcggatgcaccaacgccacgtagcccgcaggtagggcgatggccacgccggtgggcaccagtacccgttcaaaaggcttcagcgtcacatcgacggtggtgatgaggtcggcaccggcatcgcccgcgtgggcatagtgcagctgggccggatgttcggggtcgaggctcttgaccaggacctcggtggattcgggctcgttgtaggtctcgtcgaacgccatcaggcggcgcactcctcacacaccggctggccatcctcgtccgtgtaggcgagctggctgcgatgcttgaccaggaagcactgcgagcagatgaactcgtcaccctgcatggggatgacggtcaccgaggaatcctcgttgctcaaatcggcgcccggcagttcgtagtcttcggcgatggcgttctcatcgtcgtcgatgtcgctcgaggcgttctgcgaggacttccccagcgcctgcagcgattcctcgtcctcatccttattgcggggggaatcataatcctgagccatcatggtcctttcgtcgtctttggttcgtaagtcgatatatatagcacggtcagcgccgtactcgcccataggatacacgatttgaaatactcgtaaagttcgacacgtggggcatacttaaaagaagtaatgtctttgcgacggaaagtggtgcgaatatgccagatgatcggcttgaaaaagcccgtttcgtacgcgtgagcaagacgggggacctcgtattctccattggcggcagggaaatggccgtgagcgtggacgacacgctcgaacgggcgattcttgaggccaagcaggtcagaagcgagatgcgacaggccccccagccgcatcagcagtccactttgccgatttcccagatacagtcgctgattcgcgccggcgccgatccggcccgtgtcgcggagaaatatcatctgagcgaaacgctggtacgtcgtttctccatggccgtggagaccgagaaacagtacgccatcgaacagttccttgccgtggcggcacccaaagacagcagggtgcgcaccatcagcgaactggtggaacgcacgctggcctctgctggaatcggcatggaatcagtgacctggaaatccacccggcgcggacttgagccttggcgcatcgtggcgatattcacttccgcgggccgtgagatccatgccgaatggacgtggaatatgcacgacaattccgtgatgagcctgaacaatgccgctcgaaaactgctcggcgaacagaatccggaatcagccacggattccaaactcaagccgacgattcctgaactgcccggcgactccgtacgttccgcgcgtatcgagcgcgccgtgtctgcttgggcggcgcctacgccttcgattccggccgcacggcctgccgcgatccggccctccgtcacttccacaggttccatgcccccggtggacctatccacgtccatctcaccggccacgaaccaggctcatgacgctacggcccccagcccggtctcttcgcagaccgccggatctgtttcgtcatctgccgcaggattgcagcaatcgcctgccacggcaccagagcagggttctgacaatatttcggacgagaccgtacggcgtggccccaatgcacagctggtagccaccgagcaggagcgggcggccgaatccgccgccaccaaacacgaggcaccagccaaaccggccaagcgtaaatcaggacgttcggccgtaccaagctgggacgagattctgttcggagactgaatttccgaatcaggccatatcgatcaggcagggaatatccatttccaatgccgtttgggagccatgcacgctcggcaggtgggtggctttgtctccttgcgtacgcgaatcgacgagggtcacggctcccgctgcctgcacgaccacatcgccgagcatcggccggactcgctcgcagaccggtccaaacaatccgtccgcgatggcctcatccctggtccgcaccaaggctcggtcttgcaggtaatcgcgccaccggcaagctatatcctcaggtcgttcatccgactcggcatacagcatcagcgagcgcggctctcccccgaccagtgacacgcctcgggtgagctgcggttcaacggcgatgtcaatccgctggcccatgtcggtttgcaccatgccgtggtcggctacgatgacgatcagcgtgcctttgggtgcgctgcgtttcaggagcgcgagctgggcgtcgatatgttcgaatgcggccacccagtgttcggaatcccacccgtaattgtggccgactttgtcggcgtcacggatgtacaggtaggtcaggccgggggtgcgtgaggcgcgtgaggcggccagcacacgatcgcgtggggtgacgttgccttgatagtcggtgcctcgcaatgcggcttcggtcaatggcgatttggagaacttgggcaaccccgagcttgtgacgcgcacctcttgagccgcaagtttctcgaacaccgtctcctcgcgctgctggtcgagcggatcgaccatgggtggcacaggaatgtgcggattggctggtttgggtgccagcgcgtctttgaactggatgagttggatgagcttatggctggcgggttcgagctgcgtatagcccgccattgcggtcagtcccgggcaggttccggtaccgaatgcggccatggccgccacagtggtgcttggagcgcaggtggcgatgggacgctgattggcgcgttcgttcatcagcgaacgcagatagggcgcgtggccgaggcgcatggcgaggttccagaagcccaggccgtccacgagcaccacgatggccgattcggcgtcgggcagtcccaacgcgcgctggcaggccttgggatcggcgtggaccttggtgggagtcggatgcccaatcgcggcggacaaggcgggcagcacggcggacaggtgcagtgctcccccacgccgatcggccggggcgtcatccccatagcccacagtgggcaccagccgcagcaactcgtccatatccggcgtctcaacactcatagttgcccattcaagtagcacccctccccttggctcagtgcgcagagaacggttctcgataacaactgtgcgccccaacgcacataatcaaacaaacgcgcatcgactgaaacactggaatcacgctgttttatcggcaaacatgtgcgattggcgcaccgaaaccagcgcacagttgttattgagaaccgttctctgcgcactgtttcgcgccctcccgctaatatgggggcgttcgaaagggagtttcatggcatcacaccgcaaaccgtccgcgcaaacctacgatccgcgcacggtcaaggagcatatcgtcgagacgccgctgaacgaggagatgagcaaatccttcctcgagtatgcgtattcggtgatttacgcacgcgcactgcccgatgcgcgcgatggcttgaagccggtgcagcgccgtatcgtctaccagatgggcgagatgaacctgactcccgaccgcccgtatatgaagtccgcccgcgtggtgggcgaggtgatgggcaagctccatccgcacggcgattccgcgatctacgaggccatggtgcgtttggcacagccgttcgcgatgcgtctgccgctggtagacggccacggcaacttcggctcgctggatgacggccctgcggcctcccgttacaccgaggccaggcttggcccggcggctctcggcatgaacgcggatatcgatgaggacaccgtcgacttcacgccgaactatgacaacaagctcaaggaaccgaccgtgctgccggccgccatcccgaatctgctggtcaacggcggctcgggcatcgccgtgggcatggccacgaacctggccacccacaatctgggcgaggtggtgaacgccgccaagttcctcatggcgcattcggacgccaccctggaacagctgatgcgttacgtgcccggccccgactggcccaccggcggcacgatcatcggccgcgacggcatccgtgaggcctatgccaacggccgtggtacgctcaccacgcgcgccgccacgcatatcgagcatgtcacggcccgcaagcaggccatcgtggtcaccgagctgccgtacatggtgggcccggagaaggtgatcgagcgtatttccgacggtgtgaagaaccgcaagctggaggggatttccggcgcgttcgatctgaccgatcgtcataacggcacgcgtatcgtcatcgagatcaagaccggtttcgacccgcatgcggtgctggtgcagctgttcaagcacacgccgttgcaggacaattttgccatgaacaacgtggcgctggtggagggccgcccgcacacgatgggcctgaaggagatgcttcaggtgtgggtggaccaccgccgtgtggtgattcgccgccgcagtgaatatcgcaagaagaaggcgttggagcgcctgcacctggtcgagggcctgctgctggccatgctggacatcgacgaggtgatccaggtaatccgcacctcagatgatgcggatgctgcgaaaagccgtttgatggttgtgttcgacctggacgaggtccaggcccagtacatcctcgacctgcgtctgcgccgtctgaccaagatgaaccgcatcgaacttgaggccgaacgcgatgacctgaagaagcgcatcgaggagctgacccgcattctggcctccgccgaagcgctcgaccaggtggtcaccgacgagatggacgaggcggtcgccaagtggggctcgccgcgtcgcaccgtgctgctggacgccgacccggatggcactctgacgccggtcgtggcgcagggcgccggggcttcgggtgtgtccaagtccgcgctcgaagcggtgaaggccgccaccacgatttcctccgccgaagccgatgtggccgcagccgcagccgcagccaagaagaccggcgaacagtccgcgctgaccggagccttgaagatcgaggacgagccgtgcgtggtgatgatgagcgccaccggtttgattgcccgtaccacgccaagcgcgatggacgtgttcaatgtacggtccacatccgatgaacgtctgcgagacgatcagatcaccacaatcttcgagacctccacgcgcgccacgtacgggctggtcacgtcggccggccgcctggtgctcgcgcatgtggttgatttgcctgccttgcccgctgccgccacattgtcgctgaagggaggagttcaggccgacgaactgatcggcatgaccgaatccaccgatccgattcgtggcgagcgtgtgattacggcgatcgccatggagcagccgacgtccggcaaggccagtgccgaggacgagagcgaggatggtgccgccgaggccaagccgttgccgtcgctggctatcggtacccgtaacggtgtcatcaagcgttggaaccgtgaggcacccaccaccatggattcctggcccgtcattgatctgaaagatggcgacgaagtggtattcgccgccgtggccgaggatgacgaccgtctggtgttcatctcctccgattcctcgctactgacctttgaggcgaagaacgtgcgcccgcagggtcgcaccgcgggcggtatggccggcatcaagctggccgagggcgcccgtgtggcggcattcaacgtggttcccgccggcaaggtggcatggacctatgaggagggcgagaacggtttgacttccggctccggcgcggtggtgctcaccgtggccggcgactccgatgcactacccggcaccgaaaacggcgccgccaaggtcaccccgctggaaatgtaccccaccaagggccgcgctaccggtggcgtacgctcccagcgcttcctcaagggccagaacacgctgattcttgcctgggttggtctctacccgttgcatgcctccacatccgcaggctccccggtcgagcttcccaagcccgatatgcgccgagacggctccggagtggacctcgcctcccccatcgccttcattgcgtaacctcaattaagctccctctgatgggccgagccgtaaagcaaacacccccagtggggtgtttgtaggcgaggagcgaacgatagtgagccaaacacatagagaagagaccctaaacccgacctacactaagcatcaaggaggtggcgatgagactactggttgccgtatccaatgaaccgttggcccgcgccattcgtggtgcgctgcttgcctgtcgtcatgaggtgtccttggcaagcaccggcagtatcgcgctcgccgcggtcaccaaggagctatttgacgcagtgattctcgatgaatccctgctcggcatctccaccgagcaactcatcgaatcccttcacaatgcccgtgcctccgtcaagattctgctgctgacttcgacgccactcagcaaaaccatcggcgaaggcagccgctggcgagcgctgcctgacgagtacgccccgatcgaagagacgccctacagctccttcagcgcggattcacacgcaaacaactcagatgccgaagccgaacagtgcacggacaatgctgccgctagcgcacgagctaatgtacgacacccggatgccgtactgagcaaaccattctccgatggcgaactgctctcatacgtcggctcgcttgccaccgactcccccaccatgatcattcgtggcaatctcacgttggacaccacgaatcgcaaagcctactacgcatccacacacaccgcaatttcactgtcccgtctggaatacagtttgcttgaagcactggtcaaggctgatggccagtttgtcaacaccagcgaattggtcaagctcgtcggtggcccattcttcgagcaacaagggctcctcaggaacgccctctacacactggataagaagctcacccacgccggcctcatcatgacccaacgcggctccaactaccgcattcgatagctgggctcaatcagtacagccgcatgcctcggggaacgggggtgaagccggactggtggaggatgcgggcgaaggggtgacgggcgttgaggggttcgccattgatgtcgctgaatgtcacggaaccggtgccattgcgtttgagagcgtaggccagttctgtggcggccttgcgcatttgttcgtcggaatcattggcggcgggttcatggccgaccgattgatcgaacgccgtcaagtgcttggctttggcagccgcgtatagtagcgcaccttgcgcattgagcacgaccgtggctccgatacggcgtgccggtttacccgcaccggcaggcgcgtccggccacgcgatggcggagccactgagatttgcggggtcgagcacactcaatgccaccacggactggccgcgatgctctgacggatgacgcaacgcatccacggtgtcgcgctcggcaaattgggccgcgccgaaaccacggacgaacatgcctcgtaccagtcgaccatgctcctccatgcgctgcaatatcggatacaacgctgagtagccacccgggatattttccttgtcgatcaccggctgcgcgatgacgccatacctgtccagcaacgtctcgaccagtgcgagcgcctgctcggtctgatcagtgtcttcggcttcagcttgcccgattacggcagaccacaaacctcctaacgtcatatccgtagtggctcggtgaatcggagcgacacgcccacgacgacgtgatgtagtggatttacgcgggcttgctgcgcctgcggttaatgcacgcaccggcgcgaagctggaattggtgaccttaccttgccagaccaagctccacaaggcatccttgaactgctgttcgctccactcttgcggaatgatttcaccggtgtttggattgatgtccggctccgcggcctcattccacacacgtttggcggcatccaccagttgacgggcatggaacgctccccctgagtccagtgcggtcagaatcgcttccggcatggtggcgtctgaggcattcgacgtcgtaccatgttccacaccgctgagcaatattgaatccgccggatagaaagcaacctcaccggggtccatcgcactggttcccccggtttttgagccgacccagaccacatcgccgctggtcagcaactcatccagcaatgcaggttggtagtctcgtactcgtgcggggaataccgccgactcccagagtgcagtgggcagtgctatgccctccagctgctcgataacgcgcatgagcccgtcggcaccttcatatcgttcgccgccgaccggcccgataccttgtcggtcgataagaaacatctggaacgcctctggttctactggcttgactgctttacgcgccttggccaatgagcgagaccgaatgcggcggaatacgtccttatggagccactgttggccttgcttgtcatcatctacaaaatggccttgcagcaactcgcctttggcagccagtacatccaaagtatgcacggcatccgtagcatcgaggtgcagatcggccatgagctgatcggcggtgaaaggaccatgggttttggcgtaacgggtcacgcgaccagtcacatcatcgtcggcaagttcattccagaaagtgcgctcccccagttcctgttcgacttcgcgaatcacgtccgggttgagcacttgtgccatgtcggtggtgccgagcaagcgttcgagcacgtgcggatcgagagacaacagttgcgcgctgcgctcggcctgaggttggtcatactggtacatcaccacgccgacgaagccaaagagaatgttctcggcaaaaggcgatggcggctcggtctccacgtccttcacggtaatggtgccggcttgcaatccggtcatcacctcgttcagggcgggcatgtcgtatacgtcttgcaaacattcgcgcgcggtttccagcagcagcggaaagttcttgaccatacgtgcggcttgcaggagctgtgcggcgcgcagtcgctgctgccataggggcacgcgacggcccgggtcggatcgcggcatgaacagtgatcgggcggcgcattcgcggaatcgtgcggcgaatagcacggactcgcccacttgacgttctacatctgctttgaggtcttctgggtcgaaaaggaacaggtcttgagcaggaatatgtccgtcaccgtccggtagctgaatgacgataccgtcatcggcggcatatacctgcccatcgaaaccgtagcgttggcgcagtctgcggctgatggccatggaccacggttcgtgaacgcggcggccgaaggggcttaacagtacgatgcgccagccgccgtcttcatcgcaggtccgttccacgatgagggtttggtcgctgggaactgtgccggtgatggcttgttgctcggagagtaggcgggccaggttggtgatagcgttggggtctaggccgtctcggtggagacgggtgaggattgttgggatgaaggttgggacagctggaccttctgcggcagaactccccccagtccgcttcacgtctaatccggcggcgatttctcgggtgaagcgggctatggtacggctgaaaccgtagtcacggccagcgccttcaccgtgccagaacggcagacgggcggtgcggcccggagccggagtcacgaccacacgatcacgggtgatttcctgaatctgccatgtggaggtgccgagcgtaatgacatcgcccacgcgcgattcgtagaccatctcctcatccaactcgccgacgcgacgctggcctttgccggcgtccgcctcaggcaggaccacggtgtacagccctcgatcgggaatcgtaccgccagaggtaacggccactttctgcgaaccgggacgggcggaaatcaggccattatcccgattccataccagtcgcggccggaaggccgagaattcctcgctgttgtattcgccggacatcatgccgattacggcatcgaacatgtcacgtggcagttcggcaaacggcgcagcacggagcaccgtggcataccagtcatcagcgttcaaatcgtgcatcgaggcagcggccacggtctgctgggcgagaatatcgagcggattgcgcggcacggccaatggttctatatcgccggcaatcatggcttccagacttgcggcccccgtgacgatttgctgacgggtgagcgggtagaacaatgcgtgagagacgccaccgacctgatgatcggcacgacctacacgctgcaatccggaggagaccgacaacggtgtatcgacttgaatcatcaggtcgaccgagcccatatcaatgcctagctccaaactggaggtggccaccacgcagcgcaattcaccacgcttgagccgttcctcaatcattttgcgacggtctttggagaccgacccatgatgagccatggcgatgacatcatcgccctcatgcgagccgacaagcatggtggtggaaccgaccacagcatcgtaatgtgtggagaacccttcgcggccttccggagagcccggatcccgcacagtgtcgggattggtgccatgccgggtctgcgcatagagatcattgaggcgcgcggtgagcttttcggccacaccacgcgaattgacgaacaccaatgtggtgcggtgcgcgagaatctcatccaaaatactgcgttccaccacgggccagatggaaccggaggtacggtcgcccgccgctccaaccaacgcggaggaatcgaacgcatcactcgcatcagaatcgtccccagaagtggaagaaacatctctatcatccaccggcacgatgcccctgcgttcggcaagtcgctgcatggccggcgtgacaccgctgatatgcggagcggaccgttcggcctccacgccaccgacacgctgcttggcattcacggactgcaaatcacgcatgttttccaacggctcaatcatgcgcagatccattgcaggctgcccaccgggattcacgatggtaaccggttgtccgccgcccaggaatcgcgccgcctcttcaggcggattcaccgtagcggatagaccaatgcgctgcatatgaaggtcactgaggccagcatcgatggcggtatcactgccctcatcagcatccgcatcgattgcatctcgcttgcgcgattccgcgacaaggttctccagccgttccagacttaccgccagatgtgcgccgcgcttggtgcccgccactgcatgaatctcatcgacgatcaccgtatcgacagtgccgagaatccgccctgccttcgaagtgagcaacagatacaacgattctggcgtggtaacgaggatatccggtggatgggaggctatgcgccgccgctcctgtgcggtggtgtcgcctgaacgagtggcgaccgcgatcttcggcacgggcagcccttgcgcctcgcattgtgcggcaatgccctccaaaggctgttctaggttcttggccacatcggccgcgagcgcctttaacggcgagatatacagcacacgcacaccggcacgccgcgtgcgtggcacggtcatcagccggtcaatggccgagagaaacgcagccaatgttttgccggagccggtaggtgcgatgaccaagacattacgaccggaatggattgccggccatgcctgagcctgtgcctcggtcggctgaccgacggcatgctcgaaccacaccttggtgggttcggaaaacaggctcagggtttcgtacatatgtacgattataggtcagctgaagtaggcgatgacttcttcggcggtgccgtaggcgctttgggcaccaagcttggtggccgcataggcggagacataggagccgatttgcgcggattgcagcagcgtatggccagcggccaagccagccagcacagttcccatgaacgagtcgccgcaaccggtggtgtccaccgcattgacttgcgcggcggatacgcgatgccaacgtccgttctcgatcaccaccgaccccgacgcaccaagcgtcactatcgcccggtcgaatccgtaatcggtgaatcgttcggcgacctcataccagtcgagtgattccacatcgccgtccggcagacccagtaactgagccacttcatgctggttgaccagcagaatatccgtggcttccaccagttcgtgaggcagctcgtccataaatggcgagtcgttgagcagcacggtcacgccagcgtcatgcgcggtctgtgcggcggcgataacggtggagatcgggctctccaaacacagtcccaataccgcgcattcggcgatggtcgtgcgatgtgattgcacatagccggcacttgccttggcattggaacccggcgaatagacgatggtattctcgccctcagcgctcacggtgattaccgtggtgccgctggggccttcaacgtgcaggatatcggcggtgtcgacgccggcctcatccagcttgcctaataggaagtccgcgttggagtcctcgcccaccgcgcccagcaactggacattgacaccgaggcgagcagcggcagacgcctgattcgcgcctttgccgcccggcaacactttcatggcaccaccattgacggtttcgcctggcttgggcagtcgtttggtggtcacggtgtaatcggcgttcatcgagccgaccacgattaccgagcccggcgcatccttcagcgcttccaatcgttcccgtacgggctcgggcatctgtttatgttcttcttcacttatcaccatgggctccaagcatagtaggcggcgggcccaaatgcgcgcatgatcagccgcgcaacttacgaagacgctcgtgcatggccaccatcagcaccaagagcaccagcaaataccacgggtagagactgattgtcacatattgcgcgatgatgccgaacagtggcggcatgagcagtgagcccacataggcacaggccatctgcacgccgacgacggcctgcgatttgtcttcgccgaagtaggccggcgtcgagtggatgacgcatggataaatcggcgcgcacccgaagccgatgaccaccagcccaacgaccacgccaaggtggtgaggcaatggcacgaacatggtgaggatgccggcgagcaccagcacttggccgaggcgaatcatgaccgggtccttgaatcgcatggtcagaaagccggaaagcgcacgccccacggtgatgcctacatagaataggctggcccagctggcggcggtgatcttgtcgatgccgctgtgcatcaccatgtagctggaggcccacagacccgccgtggattcgatggcgcagtagcagaagaacatcacgaggatttccttggcaccgcgaatggcgagcacgccggccacgccgagcggtttgcgttcagcaacagacgccccttcagcattaccacatccctcggcattgccgtcagatgatgcggcaccatcggtcgattcgccgcccccagtcgtgccacgtttcttccacagcggcaggctcagcaccaggatgacggtcagcatcacctgcaggatcgcgatgtaccgatagccccacggccagccttgcccttgagacagcgcatagcccatgatgtaggggccgaccgatgcgccgacgccccacatgcagtgcagccagctcatatgccggctttcgtagtgaatggctacgtagttattgagcgccgcatccacgccacccgcgccaaggccgtacggtatggcgatggccaacagcacccagtaattcggggcaacggagaaacctgtcaaggccgccgcagtcaacgccaccgaaacggcggtgaccttgcctgccccgaatttcaatgtcattcggtccgaaagcagcgccgagacaatcgtgaacatggaaatcaccgcggagatgccgccagcccacgccaccggcacgttcagatcctggctcatggtgggccatgcggacccgagtagcgaatccggcaaccccagactgataaacgccacatagatgacggcaagcaacagactggccatgttccatctcccattcacagtacggcaccggttgtgataacgatgtcatcagtctatcgaatgactcatgggcaacacgcataaaacatatgacaacgtgctcacctcaaacgccaattacggaaattctcggtaagcacgatgtcattatcagcgacgtcttcgatcaggtatcgatcttggagcggtcgaaatcgtcggcgttgtcgacgatgaactgcttgcgcggcggcacgtcgtcgcccatcagcaggctgaagatctcggatgcctgggcggcgtcctccatgcggatgcggcgcagcatgcgcgtgcgcgggtccatggtggtgtccgccagctggtcggcgtccatctcgcccagacccttgtatcgctggatgtcgtcgttgtaaccgatgtgcttcttgtcgaggtcggccagtttgccggccagctcgtcatcggaatacgtgtagatgtattcgcccttgtgcgagccggtcaacgcgatgcggtgcagcggcggtactgcggcatacacgtagccgtgttcgataagcggccgcatgtaccggtagaacagcgtcagcaacaggatacggatgtgcgcgccgtccacatcggcatcggtcatcatgatgatcttgtggtagcgcgactgtccgatgtcaaagctctggccggagccggcgcccaccacctggatgatggccgcgcattccttgttggagagcatctgcgtaatcgacgccttctgcacgttcagaatcttgcctcgaatcggcagcagcgcttggaaaccggcgttgcgggcggccttggcggtaccgagtgcggaatcaccctcgacgatgaacagttcggccacgtcgtcattgcccggctggcagtcggagagtttggccggcatcgaggcggattcgagcgcgttcttgcggcgcgtgacctccttggccttgcgcgactggatgcgtgcgtgcatttcgccgacgatcttctccagcacgcggccggattgttccttgtatccgcgtttggagccggtgatcatctcgccgaattgcttgtcggtgagccgggtgacgatcggcttgacctgcgcggtgccaagcacgtccttggtctggccttggaactgaggttcggccacgcgtgcggtgaccacggccacgagtccggcttggatgtcgtcgcgctccaccttcatggcggagtccttcatgttcaccttgagcttgcgggcgttgtcttccaccgccttgcgaatctgcttggtgatggcgttcatgaaaccgtccacgtgagtaccgccgccgggcgtctccacgatgttcacgaagctcatgattgtggtgtcgtagccgttgacccatcgcagggcgatgtccacgccgcaggtgcgttcgatttcctgggcgtgcagttcaccgccttcgcccacggtctgggtctcctccttataggtgccctcgccttggatgcgccagatgtcggagatcggctcgcctttggataggaagtcgacgaagtccttgacgccgccggtgtgcaggaattccacgacgcgcgggtgcgcgggctgctcgccgaacgcgccatcgacgacctggtcgccggccgtcagcgagaagtcctcctcggacaggctctcggtactgtcggcttgagcctcggtggagtcgtcgaagagttcggcatcgttgaacgagacgtccaaagccggggcctggtcttgcgcaggttcgactgcgtcggcatcaatggcttcggcggtgtcagtcgccgtttccggtacgttttcgtcaacaatggtgattttgagtccgggcaccaggaagctggtctggcgcacgcggtcgatgagctgttcgtatgagaattcggcggttttgttgaaaatctccggatcataccagtagcgaatacgggtaccagtggttttgggagataccttgccgatgatttccagctcggtgggtcggttcttgcgagtgcgcttgaacggggaatcgggagacggattggccgggtcggcatccgtgtatacgccagggtgaccttggtggaaggtcatgtggtgcgtcttgccgtcacgatccacttcgacgtccagtcgggagctcagggcattgaccacggaggagcccacgccgtgcaggccaccgacggcgttataagacgagttgccgaacttggcaccggcatgcagtttggtcagtacgacctccacgccggacaggccggttttcggttccttatccaccggaatgcctcggccattgtccgcgacttccacggaaccgtcggtgtgcagggtgaccacgatatcgttgcagaagccggccaaggcctcatccacggagttatcgatgatctcccacaggcagtgcataagaccctgcgagtcggtggtgccgatgtacatgcccggacgcttgcgcaccgcatccaagccctcaagaacagctaggtccttggcgccgtattcttctttgggcatacagtcctattttctaataatttggctcccctcttcaggggagccttcaacggatggctccgtcgtttgacagcccactgggctgtcaaactcctcgcgcggtcggcctactaagcgggccgaccgtcattgatccaggaagtcgcgcagggtctgcgaacgggacgggtggcgcagcttggacatggtcttggactcgatctgacggatgcgttcacgggtcacgccatacacacggccgatgtcgtccagcgtcttcggctggccgtcttcaaggccatagcgcatcttgatgacgccggcctcacgcggagacagggtttccagcacctgcttgaactgttcctgcagcagggagaaggccacggcgtcggacggagcgatggcgtcggtatcctcaatgaggtcgccgaactcggaatcgccatcctcgccaagcggggtgtgcagggaaatcggttcgcggccgtacttctgcacttcctgcaccttctcaaccggcatgtccagctcgcgggccagctcgtccggcgtaggttcacgccccagatcctgcagcatctggcgctgtacacgggacagcttgttaatcacttcaaccatgtgcacaggcacgcgaatggtgcgggcctgatcagccatggcacgggtgatggcctgacgaatccaccacgtggcgtaggtggagaacttgaagcccttcttccaatcgaacttctcgacggcacgaatcagaccaaggttgccttcctggatcaaatcaaggaagagcatgccacgacccgtgtaacgcttggcgagcgagaccacaagtcgcaggttggcttccagcagatggtccttagccttcttgccgtcggcggcggcccacttgagttcacgcttgcgcttgaactccatgccttcactttcggtgtcgagcaggtgctgggcgtacaggccggcctcgatgcgctcggacaggtcaacttcctgttcggcgttcagcaggctcacacggccgatctgcttcaggtagtccttgaccgggtcggcggttgcgccggccgcgatcacacgacgcttcggattgcccgaagggatgatgttctcttcctcatcatccgtgtcggagaccacgtaggcacccttttccttgggctgctcgggtgccttggacttggcttcttcctcgtcctcgtcgtcttccacatcgtcgtcgtcggcatcgtcctcatcgaggtcttcgtcgtcggcatcgccttcgtcaacgtcgtcaagatcctcgccgaggtcgtcaacatccaaatcgtcgtcgttgacctcggcatcgtcatcaagctcgtcatcgacctgagtgtcctcgtctttgacgagctcatcgtccttggccttcttcgcggttttcttcgcggcggacttgcgcgtggtctttttcgagggctctgcggacttggacttcttggcagaagtcttgcgcgcggtggtcgtagagctggccttcttcttggtctcggtctcctcgctggactcggctgtctgcttggttgccgtcgtttccttcgtggccaaaactgctccttctgatctctcgccgtgaagtgcatataccacacgggcccacttctggcaagggcaaatcgtcaactatgtgagtaaaccaccctccacggacgattattcccacatcgttgcccgacgtgttgccgatcaccacacgctttccttccgcgcatcgcgcataaaacctcggaaatccgccgtttctgttcattcagcccgagcaccatgccggtgccacgcctcgatcggcggctgagaatatca

SEQ ID NO: 3406 - DNA, 7596 bp, Unknown
  R151_18m  MAG No. k141_35845
gggatacgaaccccgggaatacggttctggtgggttgtccggatatctgttttgcgacgcattcctgggaatgtgtttctagtgggttgcttgggggtctgttttgcgaaactttcctgggaatgtgtcgctagaaataaccgaaataaccgaggacggtcgggctccgcttgtggtaagcggagtcggaggtacgccattgtccgtccgcctccaaaccgccattttagcgggtgaacgagtgcggcacctcggggaaaggctaacaaacgaaagaagaatgtccactaagtgagacttttgcgtggtgttcgtgaatggtgattgaagattaaccggtttatgtcgcttgtccaatcgcttgcccatcgccttcctccccgcagtgtttgactgagatgggcggtacactagagagagaagaagagttccgaagggcgggcaaagatgagccatatcgctgggcaggggcaacatcgctccaactcgacacgaaccaaccgtgcggcgctgattatcgtgttcgtgatcacgctcgccgttacgctgggcatcggcgcatggttcgcaacccatcgcacggacggcaatggccccgcacgcgccggagtgtcggacgtcgcgttgaataaagcgaagaacacgcccaaaccggtgaccgaacatcacggcaattcaccggattgcccggatacggactgcatcgccatgctggtcaacggcgatttgttgttccatgagggattgtggagccatttccaaggcccgaaccccaacgccacggatggcaccgccttcaacttcgacccgctgttcgcgccgatgaagcagtacattcaggcttcggacatcgccgtgtgcgaattcgaaaccccgatcgcccagcgcggcggcccatatgccgcgtacccgatcttcaacattccgccggaagtggcggatgccgcccgcaacgtgggatacaacgcctgcacacacgccaccaaccattcctgggatcagggggcggatggcatcgcccgtctgtgggacacgcttgaggccgatggcatcgcccagaccggctcgtacaaaaccgaagccgactccaccaaaccgttagtcatcgattccccgaccggcggcggcaagctgggtctggtcaccggcacggtctccctcaacggcatgaccgccgacgaggactggcaggtggatcgtctgcgcgaagacggcgacccgaatcacggcagcgacatccagcgcgcggtagacaaggccaacaaggcccgcgagcaaggtgccgatgtggtggccatcgccatgcactcggtgcaggaataccttgattacgccgattcctggcagatttcggaagcccatgagcttgccgacactggtgccttcgacgttatctacggtgccggctgccattgtgcgcagcccatcgagaactataacggcacgtggattgtctacggtctgggcaacaccgtcaccgagtcggcgaacacgccggaaaccttggtcaacaaccagggtgtgaccgcacgcatccagttcgccggcaagaagggcgtcaaggggtcgtggcgcgtcaaccgcatcgactgggtgcctaccgccaacgtgcatcaaggcaactaccaatggtgcccgatatccagcgaccatcccataggcacatgttgggacgaagcctacgacgctcagatacgccaacgcatctgggatgtcatctattcgatgggcgcggaccagaacgtcgtcaaggaatggaacatcacgcaggagcaggcggcaaagcaatagttgctcggcttggtctcaaggaggggaagccgcaaggtgacgcttttcccgtcggcctcctaatgtggagcccatgaccgagatttacgaaacccaaagcgaacgcaccgatctgcccctcgtcgtgatgccgtccgtgctcgacgcgatgatcgagcccatcaaggcccagttccccgcgctccacgacgttgcccgcgtgcgtatgttcgaggaattcacgtccgacgaggcgaccatagccgagcgtctgaaggatgccgacgccctgctggtgggcggctaccacatttcggatgatctgctgcgcaccatcagcgagcaggggcacgtcaagtgcatcgtgttctgcggtaccggcgtcgccagctacatcaatctcgataaggcgcgcgagctgaagatccgcgtctgcaacgccgaacattatggcgatcacgccgtggccgagcacaccttcgccctcctgttcgagctcatccgccgcgttggccaactcgataaggatgtcaaggccggcaactgggcgtgggccggcggcgatggactgcaactcgccggccgtcgcatgggcatcatcggactgggcggcatcggcgccaccgtggccggcatcgcccgcgccttcggcatggaggtcgccgcatggaattcgcatgtgccgcccgagcatttcgaacgctccggcgccactccggtcgacgatctcaacgagctcatcgaaaccagcgacgtcatctccgtccatctgccgctcaacaacgccactcgcggcatcgtcaccgccgagaaccttgcgcatgtgaagcccggcaccctgttcatcaacaccgcccgctccgaagtcatcgaatccggtgcgctgcttgcccgactgcaaaagggcgatgttcccgccgcactcgacgtgttcgaccacgagccgctgaccgccgacgacgccatctgccatgtgcccggcatcgtcctgaccccgcacgtcggctggcgtaccgacggcgcgttcaaggagctcacccgccagatgatcgcctgcctgaccgcctacttcgccggcgaggactataacgtcgtcgtctccgaacactgatagtcctgtctagcctcgcgctcaatcgaacacccagtcagccgaccaccggaacacgcttatgcagacgattctcaacacgtccgacgatcccgcccacgattcgctcgtcgaaaaaaagtccgaattcatcggcgacgctgcccatgtcgatacgctcgacgaggcgctcgcgttcgtggccgcgatccgcgagcagcatccgaaagcccgacacgtggcgtatgccgccgtgtgcggaggcgcggatgggcgactgtccgaacgcatgagcgatgacggcgagccgtccggtaccgccggcaagccgattctcgacgtactcaagcagtccggcaccaccgattgcgtggttgccgtcaccagatatttcggtggtattctgctgggctccggtggtctggtccgcgcgtactcatccgctgcatcattggcgatgaaagccgcccgcgccgcccgcatcatgaccgccaagcgataccgggtccgtctcgaatacccgcagttggcccgattccagcagatcctggcgcagcttggtggcagtcaggaggatgaatcgtatgcggtgaacgtcgagttgaccgcggtggtgccgcaggatgattgcgcgcgattcgaggagcgtgtgcgggaagcgttcaatgccgcggtggtgccggatccgattgacgtggtcaacattccggttccgctcgcgtgacgcctgtatgactaagctgggcatcatgaccgacgagaacaccaccagccagcggacccagcccaccgaggccgcaactgaggctgcaatcgacacgggcgcccagcagcgggaccaaggcgcgcaggccgcagccgagtccgccgctccggtggatttcgaaccgctgaccgctacatacgaacgtctgcgtcattccaccgacccggccgaactgtccgaattcgcccgtcggccgttgcctgaccgtgccgatcaggcggcgttctcccgcgccaccgcacttttggaggctgtggccggcaacccgcacaccccggtggccgatcgcgtgttcctcgccgacaccatgccgttcccgaacgtattggtcaaactctccgaagaccccgaaccgtccgtgcgccaagccgtggccgccaacggggatgacaagaattggctggtcggccgcctgaccaaggatccggtacctgcggtccgggatacggcgttgaaaaacaagcgcaccagctggaagatgcggcttgagggtgcgcaggaccccactgcggatgcggagacattggatttcttgggcgtacttggcaccgaatccgaagagggagcaccggcagtgctttcctcgatggtccgccgtgccgtggcgctgaaccccaatacgtccgaagcgatgcttgccaaattggccaacgacccctcggccgaggtgcggcacgccgtggaaagccgccgctaagcacactattgctgtgttttgccgtgcaaatttggccggcaatcaccctctatccactattgtgagcgctcacatctcactatgtgagggtaaaaagtacataatttggcggaatcacggcattttgcttacggtgtggcgcaatcaaacggcgttagactggggctatgagtgagattaccgagagtgaagagcgtctggcccgtccgttgattcgactggccaagttggtcggtgtcggcacgagttatgtgggcatgagccatgactaccacgagatagacgatgacgtcctgatcgaggtgctggcagcgctgggcatcgacgcctccagcgagaacgcccaactcatcgccatccgacgcattctgaacgagcgttactcccgattggtggcacccaccgtgctgcatatcgccggtagcgaggaccgggtgctggtgaacaccggcattctggacgtgccttcggcgagcatcacgctggagaacggcgagccatatcagggcaccgttgaagttggtcctggagatggatcccaggcctacgacttggatggcacgttcatttcgaatgcggctgtggtcattcccgccgatctgccgattggctaccatacgctgcacgtcaaggtcgccgaccgtgtgcaagacgccactttgatcagtgcacctgatcgcgtcgatctgcttgacccgatgaagggcggcagtctgtggggctggatggcccagctgtactcgattcgctcctccaactcctggggcgtgggcgattacgaggatctgaagaccatgctggtggacgccaagcagaagaccggtgccgacttcgtgctcatcaatccggtacatgccgccgagccggtgtccccgctcaccccgtcgccgtatctgccggtaagccgtcgcctgatcaacttcacgtacatccgccccgaggcgatcgccgaatatgccacgctcagcgcgggcgacaagaacgccgtcgacggactgcatgccgacaccgaaccgctgaacggtgattcccagctcatcgaccgtgacgccatgtggcgcagcaagatgcacgccctgtggattatcttcaaggccggccgtaccgccgaacgccaaagcgcgttcgaccaattcaaggcggactgcggttccgacttggaggcgtatgccacgtggtgcctgtgctacgacaagtggggagcacccaacggcgaggagagcaactgggagcgcaagttcaaccgcaactccccggaaatcgccaatctgcgcaagcagtacccggacactttggacttctaccgctggctggaatggattgccgccgagcagctgtcctccgcccagcaggcagccaaggacgccggcatgcatatcggcatcatgtccgatatggccgtcggcgtgcacccctccggcgctgacgtgtggtggaatcccgagcgcttcgccaagggagccacggtcggtgcaccgccggacatgttcaaccagcaaggccagaactggagccagccgccgctgagcccgatcaatctggaggccaccggctacgagacctaccgcaatatggtgcatggcatgttcgcccgtgccggtgcggtgcgcatcgaccacattctcggcctgttccgcctgtggtggattcccgagaaccggtcggctatggatggcgcttatgtgtactacgactcagacatcatgctgggcgttctggccatcgaggcctctcgcgccggcggcgtggtcgtaggtgaggacctcggcgtggtgccggaccatgtggccgattccctgtcgagccacggtattctcggttgcgccgttgaatggttcgaacagtgcgacggcgtgttccgcgccccctcccagtggcgtccgtacgcattggcctccgtgaatacgcacgatttgccgccgaccgccggttacctggaatacgagcacgtcaagattcgtgagcgtctgggcttgctgaccggcccggctgaggaattcgaagcctccgcaaaggccgagcaggatgcgatgctggccatgctggtcgagcagggctatcttgatgccgacttcgccgaacatcgtgaggatcacgaggcggatatcatcgacgcgctgtaccgcgcactgaagggttcgccgtgcaagctgctcgccgcctcgatcaccgacgcggtgggggagaagcgcgcgcagaaccagccgggcaccaacaacgaatacccgaactggcgcatcccgctggccgacgccaagggcaacatggtaccgctcgaaaccctcttcgacacccccggcgtccaacgcttcgcccaaatcttcaattcctgacccactttacctccctctgacgagccgagtcgttaagcggacagtccagtgggctgtccgtagacgaggcctgaacgaagcgatagctgagagaaggcagggaattgcctcaccgtaggcgagtcggttagccgaagtgggtggaagagaaaccataaataggggaagagaagccataaacccaatggagtgtccccagttgccctatgtcaagcccggcgatatactagtggattgttgtgtttccctaaggggtccttcaaagcgctatcccactcgccatcgaggactttcagggagcccacggataatgaggttcgatgcctcttggatgcggccctgaccaagccacgccaagcagctgagacccggaacacaatatagaaaaggtaatccagtgaaaactttcactccgaagccagctgatctgactcatgactggtatgtcatcgacgccaccgacgtggtgctcggccgtctcgccacccaggctgcaatcctgctgcgcggcaagaacaagccgacctacgctccgcacgccgattccggcaaccacgtgatcatcatcaatgccgacaagattgctctgactggcaacaagatgggcaaggaactctactcgcactccggtcgtcccggtggtctgcgtcgtgactcctacgccgagctgctcgagaagaaccccgagcgcatcatcaagaacgctgtcaagggcatgctgccgaagaaccgtctggccaaggtgcagctcgaccgtctgcgtgtcttccgcggcgccgagcacccgcacaccccgcagaagccccaggtcttcgagatcgcccaggtctcgcagcaggccaagtgaaacctgagaggagataagaatcatggctgaaaacaccaacgactcccaggttgtcgagaccgaagaggagctcaccaactacaccaccgagac

SEQ ID NO: 3407 - DNA, 13783 bp, Unknown
  R151_18m  MAG No. k141_36404
caatcggagagattccacgagcctaatgcgcgggcggcctcacgcatggcgatgatttcggcatgtgccaatggatcgccatcggcctcgcgtgtgttgtatcctcgcccgatactctggccgtcggcgttcaccaccactgcgccaaccggcacatcgccggctgccgcggcccttttggcgagctccagcgcgccgtgcatcgcctcgtcatattccatatgccccataccaacgagtgtatgcctttttctcatatcgtctcatgatgtgcataatcggccgcaatcttaacgttttcttcatggttcccatatacttttggtggagaaaaaatacgagaaggcggcaacatggcggtatttgagctcatcctatgcatcattgcggcggtggtggtgagctcgtttgccagtcgcttcgtaccgaaggtttccacaccgctggtccagattgtgctgggcgtgctggttacgtatctgccgtttttcccggatgcaaagctcgacccggaactgttcatggtgctgtttatcgcgccgctgctgtatctggaagcgcacgaaatcgataagtcggcgttgctgaaaacgctggatctgagcctatcgctggctatcggactggctatcgtcacgatggcggcggtcggattcactttgcatgccgtctggccgtccatcaccttagcctcagccttagcactcggcgcggcactcggcccgaccgatgcggtggccgtcagctccctaggtaaagaagcctcgctgacgcagcgtcagcgcagcgtgctgaaaggcgaatcactcttcaatgacgcttccggcatcgtcggcttccagttcgctctggccgccgccttcactggcgaattcgccgtggggcaggccgccggcgaattcgtgatctccttctttggcggcaccttatttggcctggtgatagcagcagcggccaactggctattcgagaccgtgcgatccctcggttgggaaaccaccaccacacgtattctgatggaactgttcctgcccttcctgctgtatttgggcgcggaggaattcaatgtgtccggcattctgtcggtggtggccgctggcctgttcatccgattcgaccgtaccggcgtggggccgaatgtggcacgtacgaatatcgtttccacttcagtatggggtgtgctgagtttctcgctcaacggtgcggtgttcattcttctgggcatgcagctgccgcgcgccatgagggccagctggtctgacccgtatatcagcaataccgtgctgatcggcattattctgctggtcactctggtggtaatcgcgcttcgattcttctggattgcggccatgctgcgcgttgcgcgagatacaatcaccggccagcgccgcaaaatgacacccgaacgctggcgctcggccgcagtgatgacctttggcggccccaagggaaccatcacgctgtcattgatgtttaccatcccgtattacattgccggcggtgcgccgttcccgatgcgtgacgagctgattttcattgcgtcaggcgtgattatcgtgaccttgctgctggccaacttcctgttaccgctattggccccgaaccgtggcaaggatcccagcgcggaaatgattccggtgaccatcgatgtgttacgcgccacggtggaggaattgaccggacgcatcacgccagagaatcgccgtgcgattctgatggtaatcgaccaatacaccaagcgcatcggacgattgcagcagcgcatcggcgataccgatcctcagggattcgagcaattgcagatcgaagcgctgcattgggaaaaggaattcgtgcgcgaccgacttgccgacaccaaggcgcatccggcggcggatacggccacgcaagagctgaacgtcgaagcctgcgagcgcatgcttgaccagattatgaatacgctgcgtcacacttccactgatccgacttcggggcatgcggtatcgcagattcgcggtcgcttacgcatgttccagcggcagatgagcaattacgccaaacgcacggtgtccaagattcgccataccacaccattggtgagcgaggatcagattttcgcgcgcacccgcgaactgcaggtcgaggcgattcatcatgttatcggccggcttattgacgagatgggccaggatacgtacaacaccgagcattgttcggcgctgttgctggattatcgtcgcgctgaggcttcattgcaggcacgtccgaatatgagcggcactacggaaaccatcacgcaggtcgaggacgtaaagcgcgagagctacggtatcgaactcggtgtgattcaggacatgtacgaagccggcgacatcaaccgagcccaagcccgctccctgaggcgcaacatctacgttatgcaggtcgatgccgattccggcatctagtttccttggctcccttctctgaggggagccaagttggggattgctatttccgtgtgattctcttcagtatgtgcagtagtgcttgcagtgctcacttcgcccatgggagaacagtctatgaccgagtcagccacaagcgccctcgatgtccgattgctgcgacggccgcgccaattccagtgatggcggctgactacagcacgccagaagtaatgtcgttgtcaagtagccactggcgcaaatcggcgaactcctcaagactcacattgtgatccagaccgtggtagctcttggttttcagccacgtatgctcttccagccaagcggcggtggcgaacagttcgtatttcgggattacgccatcgttcttgccgtacgtatagaacacggggatatcgtaatcggccaggcgagagtcggcgggggccgtgccgggcacctgaccgggtgtgttgaagccggacagggagacgacggcccggtaccgctcggggttgatgcgcaacaaatgcacggcgaccagtccaccttgcgaaaacccaagcggcaccacgtcacggtcggcgggaatgttgtcggccacccatcggtcgactgctgtggcggcggcatacgcgtcgtagtcacgatcatcgccgataggcagggcatcgtggaaccacgcgtagttgccggggtcgggactgccttcacgggccggcgcaagtgtcagcggcccgcgcaatgccacgaagtcgttatatggagcgatgaggcgcatgatggccgccatgtcttcttcgctggatccccatccatgcaggcacaggaacagcggatgcgtggcatgctggtcgaagccgccgcgcgaggtgacgctgtgttccacggtgagtggctcgccaaaacgtccaggcacagtggtggattcgcggccgatcagaggctggctggcattcgcttctttgctcataccaatccaatatagaggtcttgcgcgctgtgcggaaaacgatggaccatgatttcagtcacattgggtaatccgcgccgaatcgccttgggactttccaggggataccggcaatctgtcaggcattaccgctgtttgcggctgcggtgtctgcggctgcggtgattgtctcaagttcaccgccccactgctgctgcagtgcggtcatcttgctgccctcgccgaacaccatccagcgtttgccgttcagcaatcgccaatcacctttcgtttgctcattatcagcgtattggctcagcagttcggaaatcttgctttcgataggtgcccggctgatggctgcggacgattccgattcaaaggacacgaaggccactctcggatcagtgcacatctgtacggtggtgatgcctggcaaaccgcccgcatcaagcccctgccatccttctttgcacgcgccggcagcttgttctatgccttgctccatctgtgcggtatcttcgacgggtgccttgtcgttcgactgctgaatcagtccttccgggaacaatacgcccatggccacgccgataaccaagcaaactatggcgcacaccagtgcgatgatgccgcccgcgcccactcccccgtgagtggcgtaccgaggcatggtgactcgcgcagcgatgaccagaatcagggtgatgctgataagcaccgccgccgtcaacgcaatgtatcgtcctggcactgccgtcataaaggaaatggcgtaaggcgcgatttcatgaaccgccgaggtggccgataccacgacggctagcagtccgctgacaacggcaagtctgcggcacaacatcgacgttgggctgctggcttttgtagcggcgaatcgccggccggcattccgcctggatgggcgtcgattctgtgcacgacgtgagctgcgcgaatcgtcatactgaccatcgccgaagaaatcgtagtcctcatcgttgcgggccatcggtgcccccttcctgccgattacacagccagtgtaccgctatggcttgggaatggcggtcattcgggggaatgattcagggcaaaaaagaaccccggcggttgcccgccggggagagaaaggagagagaagaagaaagggggttcaattgtcgggaactgctgcggctcctgatcagctttccgctgacatcatttatataaccactgctttctgggtctacctctaagtttctctgagaaaaacctgagaatacttgcgattgatggaccgcggaagcgtgaggagcctctcacgtttccgcccaaggcgctagacttgaaggcagtatttatttgcccaaggagtttttcacatgctgctgtccgatcgcgacattctcgccgcacagtccgcaggtcatatctcacttgatccgtggacccccgaaatggtgcagcccgcttccatcgacgtgcgattggatcggtacttccgtttgttcaataaccacgcctacacctatgtcgatccggcggaaaaccagggcgcgctcaccgaacagttcgaggtggatcccgacgaaccgtggattttgcaccccggcgagttcgcactgggttccacgtgggaatacgtcaagttggacccgtccattgccgcccgcctggaaggcaagagctcactgggtcgattgggtattctgacccattcgactgcgggcttcattgaccccggtttcgaggggcatattacgcttgagttgtctaatgtgtcgacgctgccggtcaaactatggcctggcatgaagatcggccagatgtgcttcttccagctgagctcgcccgctgagcacccttatggctccaagggcaccggctcgcattatcagggccaacggggcccgacgccgagccgttcctacgagaatttctaccgcgcgcacatcgacgactgagcgttgcgacgtaccattcggccggcggatgccggccatttgcttaatcccaaggagatgtcatgaccaacagcgatggtgggttccagttcgacttccagcagcacgaaaagccggtcaagccaacggttcctccgattcccgggcaagagacggcagcatatggcgcgcagccagcgacgcaagccacaccggctctgcagttcccgcaatctgtgcaggcagcacagccgacgcagtttgcacagcccacacagcccatcgatccggccatgacgcaaccgttctcgccgcaattcccggctgcggttgccgcacaagcaccacagccggcggcagccacgcagccagtagtatccgaaacaccaatcgccgctgcgcccggccagcagcaatacgtttgggatcagacgacgcaaagcttccgcccggtggaaccgacagcgccggtgacgccagccgcaccagcggcaccggcgacatcgcctgtttcggcagcttcaaacgccgcgacacaagcgttccagcccagtcaggccgagcagcctgcggtagatgccgaggcaacacaagcattccggcctgatcaggtcatggcaacacagcttttcgaagctcaggccatgccgaatgccgaaaccgcggccacacaggcattccagcctaattcagctgcggccacacaggcatacggcgcatcatccaccgtatccggtgagaccgttgccatgccggcaacgcaagtagcgtctgccgatgatgctgcagccacacaggtgttccaaccggccgccctggctgcttcggcacaggctcagcctgctgtgatgcctccctccattccgttgaatcaggtctccgatgaggacgattccgctggcgccgagcctcgtcacggcggtagcggcaaaaagaacacccgcaaaatcgtcggcattgccgtagcagtagtcgccgtgatagcgctggttgtcgctggcctgctctggtggcattccaacagcagcaaggcgagccaagccgtggcactggccgagtgcaaggtagcggccaagcagtacacgaatgcgcagaagaagctcaccaccgccatatccaatggccaaaccagcgcgcaaacatccaccagtgatgtggccgatgccaatacgctcaccacgctgaatcaggcgttgcaagacgccgacaatccgaccgacaccgccaagtgcgattccagcctcaacgccactgagctgaagtctcacactaaagagctgcagaatgacgccagcgacatggctgacaagacggatgccatcaacaatgcgatcaaggccgttaatacttcaaaggcgacggccgataccgacacactgaaatcgaacctgagctcggctatttcgcaggcgcagggcacgctggataattccgcgggcagtgtggccgatgaaaacacccgcaccgcgctgcaaaacgccatcaccgaggccaatacggtgatgaacgggaccagtccgtccgaatccgacgtcaacaatgcgatttctaaactgcagaaggccgagtccgacatcaccgcctcgatgcaggccaagcagcaggcagatgccgccaagcaagctcaggaagaggctcagcggaaggccgaccaagaggcacagcagaaggccaagcagcaggcacagcagaagtctcaagacgggtccacctctactgacggccccgacggcagccacaactgaggtctgcagcgttctcccatttcccatggggcggtaacttccccatggggcggttagcgcattttcctttttcgcggaataatgccgttttcagcgaccgccccatgaggaaattaccgccccatgggataattaccgccccatgaggagccgtttggatatagcagtgggccgggccctgaataccagagcccggcccactgctatatgcccacaatcagggctattgcgatggcttaacgcttggctatcgcgcgtagcacaatcttgcgtagctcggaggcaatcagcacgattgcggccaggcagatgcattccacccaagccatcgggctcaatgccacggtgccgaacggaccgttaaggaacggcacgtaaatcaccacgagctgcagcgccacggacaaaccaatcgcgccccatagccacttgttggagaacagacccacgaatgcggactgcagatgcgaacgggaggccagcgcgttgaacagctgggcaaacaccagaatcgtgaagcccatcgtacgggcctcggtcatctgcgcttcatggccgatggcatccaccgagcggtcggtgaacaagccgccggataggtgcatgtccataccaatcagcgtgacgatggccataatgacgccgacgaagatgatgtcgccccacatggaggcgtcaatcacgcggtccgtcaccttacgcggtttacgacccatcacatcgtcggtctgcgggtccacgcccatagccaacgccggcgcggcatcggtcagcaggttgatccacagcaactgtgtggcgagcagcggcacggtgacgcccacggtttccggctggcggatgccgaggaagccagcaaacaccacaccgaggaacacggtgaacacctcacccacattggaactcagcaggtagcgcaggaacttgcggatgttgtcgaagatcacgcgaccctcgcgtacggcggccacaatggtggagaagttgtcgtccgccagaatcatcttggcgctctgcttggtcacttcggtgccggtgatgcccatggccacgccgatgtccgcggacttgactgccggggcgtcgttcacaccgtcgccggtcatggccacgatgttgccttgacgctgcaaggattcgacgatcttgagcttgtgctcgggggccacgcgcgcgtacacggacacttcggacgtggccttgtcgagtgcggcctcatcgggcagctggtcgagctggtcgccggtcagggccttgccgtccttggcgatgatgccaaggtcggaggcgatgcgggcggcggtcagcgggtggtcgccggtgatcatcaccgtgcggatgccggcacgatgggcctcggtcacggagtcgcgcacctcagtacgcggcggatcgataatgccgaccatgccattccagatgagatcggtttcgatggcttcggcctgatcggcgatgtcggacacctggcctgcggcgttgacgcttacaccgggcacatcagccaaagaactggtttccagcggacggcaggcctcgccaagcgtacggtaggcctcggaggagagacgttcgacggtggcgagaatcgactggcgatcgccttcggtgagcttacggacctgaccacccacgcggatgcgcgtgcagtagctcaacagcacgtcgggcgcgcccttggcgaacacggtgagcttgtctgaatcggtgctgtccttggcgatgatggacatgcgcttgcgttcggaggtgaacggaatctcgccaacgcgcgtgtatcgcgtgatcttgcgatcggccttgaccttgcgtgcggccacgatcagcgagacttcggtggggtcgcccacgatctcccagcggccgttctcctcgcgtagttcgccgtcgttcgcgagcgtgccggccacaagcgtggcgacgacttcatcggccacaatctgggcctgctcggattcaggactgacgccaccggtcataaccatgcggccttccggcgcgtaaccggtgccggtgatctgcactgcgccggacggggtgaccacgcgctccacggtcatctcgttgcgggtcagcgtaccggtcttatccgagcagatcacggaagcggagcccaaggtctccaccgaatgcagtttcttgacgatggcgttgtgcgcggccatacgctgcacaccaagcgccagcaccacggtcaggatggcggccaagccttccggcacggcggccacagccagcgagacggccaacagcaaggaatcaatcacgtcatggacgtcgtcgaagccttccagcacggcgagcgccaccagcaccacgacagcgatgacgcacaccgcgatgccgaggatcttggagacgtaatccatctccttttgcagcggggttttctcatcttcggtggcggagagcatgtcggcgatcttgccgacctgcgtgttcataccggtgccggtcacgattgcgcggccggtgccttgcgtcacggaagtgccgttgaagatcatgttggcacggtcgcccagcgccttggcttcggtgagtgtgtccggcttcttaccgaccggcacggattcgccggtcagggaggcctcggcgatgcgcaggctggccgcgttgaccagtcggccatcggcggagactgagtcgccttccgcaaggacgatgatgtcgccggggaccacgtcggcggtgttgatgcgcatgactttgccgccgcgcagcaccgaggtctgcggggccgtcatttgggcgagcgcctcgaccgcggcctccgccttggcctcctgcatgtagccgagcacggcattgacgatcagaatcaaaatgatcacgatggcgtcgaacggcagcacttcaccgccttccgcgccgggctgcgcattggccttttcgatgaaccatgcgatcaccgagatgatggtggccgcgatcagcaggtagaccagcgggtcctggaactgggccaggaatttcttccatttcggtacgggcggggcggtggcgagctcattcgggccgaatttggccagtcgacgcttggcttcttcctcgctcaggccctgggatgggtcgacattcagggctttggccacgtcgtcggcactggtcagacttggatcagcttcccccaatagcgcttcctgcgcgcgcacttcttccgattccacgacctcgttcgttgcggtcgcggacactgcggattgatctttgagatcatccataatgttctccttggtattgccgcggagtagtcagccttgcggccgctgccgggttttctctcccggctggacgcacaggactgcgcggttatggacatcggcgcaactgctgccgatgcatacgattgctattattccataactgcgtggcgcacttggcgcacagcgtaatagcgttttgcctagaacaggcgacgcaaccaggcttcagccaaatcaggccaacactgcacgcattcgacgatgtgcgcatagaagccgttgccagcggtttccacattggccagggacaggccgtggctgccttcggggaacaggtgtgcttcgatgctcacgccggcggcccggcaggcctggatagcattagcgtattctccacgggctcggcttcgcggtcggaggtcatggcgtagccgccaccaggcaaaatcaggatggccgggcgtatgcggtccggttccatctcctcgctgttgtcggccacatagccaaagaatcgcgcctcgttatataacttaagaatcgtgagaatcaaagcaattcataacctaggaatagtgagttttacggcattatataacttaggaatcgtgatataatagctcataaatccttgaaaatactaggaatatgagcttaacatgtataagagaaaagtatacgaccatctacggcgatggaaagcagcgagcaagggtactactgcgttaatgattgaaggagcccgccgcgtcggcaaaagcaccgtcgccgaggaattcgcgaagaacgaataccgctcatacatccttatcgactggcagaaggctccgcaggcggtacgagactcgttccgcaacaatctggatcatttggacacgctgttcatggacctttccgtctattacggcgtacgcctgcatgagcgtgacaccctctttattttcgacgaagtacagctcttcccctttgcccgcagcgcggttaaacaactcgttgcggatggtcgatatgacttcatggagactggctccctgatctccattaagaagaatgtcgaaaacatcttgattccctccgaggaagaatcggtgagcatgtttcccatggattttgaggaatttctatgggccagaggagaagaactactcgccgatgcgatacggcaatcttttgcggacaggcgagcaatgtctccgctgctggacaacaaggcggaacgcctgttccgtgaatacatgctggtgggaggtatgccgcaggccgtagagcgttatctgggaacatccgatatgggcaatgtcgatcgagtgaaacgccaaattttgcacctgtacgctcaggacataaagaaatacggcggagattcgaaagaacgggtcaaacgtatcttcgatgaaattccagggcaactttccaagcatgaaaagaagttcacactgtcgtctttaggcgaaaacgcacgcgaacgtgaatatggcaatgctttcttctggttggatgaatcgttcctgatcaaccgctgcatgaatgccacggatccgcatgtgggcctgcgcctacaccaagaggactccacgatgaaatgctatatgggagacaccggcttgttagtaacgcaagtgtttgccgaccgcgcatacacgtcgaatgagttgtaccgcgatatcctgttcggcaagctggaagtgaatgaaggcatgctggtggagaatgtcgttgcgcagcagctccgggcctcaggccatcgcctgttcttctattcccgatattcccgtcaggcgaaggaccgcatggaaattgattttctccttatcggggagtattcaaatgccgccatgaaggccagggtctgccccgtggaggtcaaatcgacaaagagatacaaaacctcatcgctcgataagttcaagaataaattcgacagccgggtcggcatgcaatatgtgctgcatcctagaccaatgcgcgttgaaggagaccgcctatatctgccgttgtatatggcgcattgcttgtgatgattctagaacgtatcgcagagaatgattctcaataagaaaagcgtgaggattacgatgcctcaatcgcacatgcagagcgtcatatcagtgagatcccgccgttgcggaccatgtttgactgtgcggaaaagttcggatgcctcacacttttcttgacgggaattatttactgtgaggcattgcgcaggttggcggccatggcgcggtcgcgcaagcctttggtgagcttgagaccgagggttacggcgatcaggactatcgtgcaggcgatccacagcgttcgaccgccgaagttgctgatggtccagccgccaatcagcggcgccagcgcaatcgataccgaccacactacgttgtagacgccctggtacgtgccgcgtgccgacgcgggtgccatggcggcaaccgtagtggtggcgatagggaatgtgcccagctcacccagcgtccacagcactacggcaagcgcgaatccgccccaggaatgggccgcggcctgcaccgcatagccgatgacggttacggcgaggcccatcaccagcacgcgtgaattgcccatgcgcgagaacagtttcatcgcgggaatctgcagcaggcacaacataccgccattgatggtgagcagcaccgaatactcgcccagccctagaccaaggtccgtcatggcaatgggcaggccggaggtgctttggaagtacacaaggaagtagccgaacatcagcagggagaagccgaggaatggcgtatcagtgagcacgcgccgccaattgcgagacatggagcccttggcactggcagccggtgcggcatccgagtgattcggcccctcgacgccggcgaattccgcatgcgtaacactgcgttcgtcttcatggcgcaccgcacttggcaccgatacagtaatccccaaatgccgcacctcgcggaagaacgcaatcagcaatatcgcgacggctatcatcaccgccgcttcaacgtagaacatcagcgaatacgagatcttgaccagctggttggccacaatcggcccaatcgcgtacccaaaattaatcgcccacgattgcagtacgtacgcacgttgctgacgttcggcgggcaccacatccgcgatatacgcggcgatgaccgggctgggcagtgaggcgaacgcaccatagacaaacagggccgcgcctaaagccacggggtcagtgagcacggaaacgaccagcagggcagccgctgcgccgatttcgccgatgataatcatggattggcggccgaatctgtcggacaaggtaccgccgaacaggcagccgatgattgcgccgaagccgtacatggccacgactgtgcccaccacaccctcatcgaggcgcagcgcggaaaccaaatatatcgacaagaatgaggtcacgaagcgacccatccacagaatcagaatcgccaaccataatccccaatacagcagggacagtccgaatatcatgcgctgcttcttcactctcaataccttaccggctaccgacggcggaatagccgcgttttggcgc

SEQ ID NO: 3408 - DNA, 5284 bp, Unknown
  R151_18m  MAG No. k141_36570
ccgttcgggttggcgttgagcagatcgagcgccttcttggtcatgtccttgagcgaggcgccacggttgccgagccaggcgtcattcggggtgcacacggtcgggttggcgtccttggccggatccttggcggtggccttggacgggttgaacttggtcggcatgttgccgtcgctcatcagggcgagcaccggctggccatccttgtactgcagggcgttcatcgcggccgggtcgttctcaacggtctggaagcccatgtccttggcctgctcccacacggtcttgcccttgtattcgccgccctgcacggtctggcggaagtacttggagccaccgccgatggtcacatcggcgcgggtgtcgagcagctgctcggagatggagccgatgccgccgttctccttgagctggttggcgaggcactgtttggaggcgttgttggaggtgccgtcggtcttgccctgcgggccgtagcaggcacgctcggtggagtgcgattccagcacggccggggtggcgtcctggatttccgcggtggacacgttgccggtggccttgccggcggccttggcaagctcgaagagattcagctgcgggttgccgtagatgtcgacatccacggcgttgttgtaggtcttggtgccggtcgcccatgcggaaccggacgcggaggaatcggtgacgggggtgagcttgcccgggttggggttggcgaccagcttgccggcgccatccttgccgacggcgctgtccttgctgccgtcgccgagcgagaaggtcgtgtactggccggtgcccgcctgcacgtcgtcaagcgcgccgggcgtcgcgatggaggcgaccgccgcgacggcgctcgtcaaagccttgtgattgcccattgttcttccttcttccatgcagtgtcatctgcgccgtccggcccgcacttctccggccgcacccgtttggccacgtccgtcgtcgtcatgccttccagcttcgcggaaccgttccgcacctgcattgcttggatctttcgattccggatttcacggtaggcctcacaagccaacgtccggataccgccggaagaacgccgggtgaacattcttcgtcgaatcggccgaggcatcatcgccgcatgaaccggcaagccatacacgatccgcacctgacagtacatgttctcgaaaatccgccccgaattccccgaggcggcgttcgtcgccgaatgtgggccgaccgaacgaatcgatgcaggccggattcgacatggacttctacctcgactggcgccgggacggccacccgacgctctccccgcagtcgttcgtcgtgctcggatagcccgccggccacccaactcaccgaccatattgcaatcgttgtcaatatgagttacggtaaagacagaacagctcgaacattggtctgtcagattgccggaacctcaacgcagagcggccctcgaacagcaatgcaaacgactagcagtacccgatctgcaagcaaggagtcatcatgaccgacgcgcacggcaacgacgcagcgaccagcaccggcaccatcgcagacgccaccaacgacgccgcttccggtgccccgcagcgcgcggaaagcgcggaacgactcgcccgtccgctggtcaagctggccaaagcatgcgggctttccacctcgttcatcgaccagctcggcacctacaccgaaatcagcgacgaggccttggtcgccgtgctcaaggccctcgatgtggacgcctccagcgacgaggccataaaacgttccatgaccgaacttgaggccgaaaacagcaaacgtttgctaccacccaccatcgtggccaccaccggcaagccgacaagcctgaccctgaattgcccgtcggacgcggacatcaccgcctccatcgagctggaggacagcaccgcgtttggccactttgccctgctgccgaacctcaattccggcaagccagacttgaccatcgcccccgatctgccgatgggctaccacacactgaccgtcacggtggacgggcgcgagggcaaggcggccatcatcgccgcccccgcgcgcattcccgtgccggaggcggtcgccgagcaccagcggtggggctggatgacgcagatgtattccgtgcggtcccgcgaatcgtggggcatcggcgattacggcgatctgaagctgctgctggcggacgcggccgacaagtccaaggccgacttcatgctcatcaacccgattcacgccggcgcgccgattccgccgcttgagccatcgccgtatctaccggaatcgcgccgattcctcaacgtgacgtacatccgcccgcaggacatccccgaatacggcacgctgccggccgatatccgagcgcaggtggatgcgctgcatgattcagtggccgcacgcaacgacgaatcgaacccgatggacatcaacgcggcgtgggcggccaaacgcccggcgctgcgcctgatcttcgacgcgggccgcaacaacaagcgcgagctcgaattcgagcatttcaagaccaccgccggcccagacctcgattccttcgccacctggtgcctgtgcttcgaggtatggggcgcgccgtggggcgagaaccgttggttcttcgagaagaccatcgacgacccggccgtgcgccagctcgtcgaggagcaccacgacctgttcgagttcaaccgctggctgcagtggattgccgccgagcaggtgaacgccgcgcagcaggaggcgctggaccacggcatgacactgggtctgatgcaagacatggccgtgggcgtgcacgggctcggcgcggatgcctgggccaatccggaacgcttcgcctccggcggcgtcacggtcggctgcccgccggacttctataaccagcagggccaggattggggccagccgccgttcaacccacgctatctggaggccaccggctaccaggtgtaccgcgagatggtgcattcgatgtacgagcacgcgggcgcggtgcgcatcgaccatgtgctgggcctgttccgcctgtggtggattccgcaggggctcggcgccctcaacggcgcatacgtgacgtacaaccacgaggcgatgctgggagtactggccatcgaggccacgcgcgccggaggcatggtggttggcgaggatctgggcaccgtaccggattacgtgcgccgcattctgtccgatcacggcgtgctcggcactgacgtggaatggttcaaccgcgtggacgattcgccgaacgccggcgacccgtaccgtgcacccaaggactatcgcaaacaggcattggcctcggtgaccacgcacgatctgccacccaccgccggctacctgaacttcgaacacgtcaagctgcgcgaggagctgcatctcctgagcgagccggtggaggcgttcgccgcctcggcgatggccgaacgcacggccatgatgaaccgtctggtggagaacggctatatctcacagaccgtggcggatgatgtggaaggccatgtgcaggagatcgtggaagcgatgcacgccatgctcaccgatacgccgtcgctgctgctgcaggcagcgctggtggacggcgtgggcgaatgccgctcccagaatcagccgggcacttccagagaatattcgaactggcgcgtgccgctggcggacagctcaggccacgtggtacataccgacgaggtcttcgacctgccacgtgtgcagtccctagccgccgtgatgcgccgagagaagcggtgatcgattccggcaatgggaaattggtctaaatcggcttcgaggggctgatttggcctttcccggacatccacttccgcttcaaggggctggcgcccaagtagacccagcgcgagaacggcggaatgacgttggcacaaagtcgtttgcacttgtggtttcaccggcaaggagccccttgaaacggaagtggatgtccggaatgccctaaatcagcccctcgtaatcgagatagccgaagacggcgacttgttatgggcatgttatcgttgtcatgacaatgattgttcgcgacggtaaaggagcgacggcatatgaccaaggcaagcattcaggcagtggcccgcgaggccggcgtttccgtatccacggtgtcccggaccttcgccaagccggatctggtgcttcccgagactcgagaccgagtgatggccgcggccgaaaagctcgactactcagtctcacgctcggccgccgccctaaaatccggccaatcgttccgtatcgcactacttgccagcgagaccatcgccagttggttcaattcgaacatcttcgccggtcttgactcggcgctgcgcccctccggctacgacactgtgccctaccccatgcgcaacgccgccgagcgccacgacttctttgcggatttgcccgtgcggcgcaatgcggatgcggtgattgtcagctccttcgacatcgaaccggctgaagtggagcgactgaagcatatgcacgtgccgattgtcggcatcaacatcccctccaccgatgggttcgacgcaggcgtgagcattgatgattacgccgccacacgttcggctatcgagcacctgattgcactcggccaccggcatatcgcgttcgtcggcagcgcaccgaccgaaaccaatatgcgctacagtgccgaggctcgtttgcagggcgtcattgatgccgctgccgcccatccggggatcgagctaacgcccctgagcattcaacgcggtcttggcgaaagcaacgcggcattgaacgccgtactgaacgcctcccccagcatcaccgccttctgttttgaggatgatgaaatggccgcgcccgtgctgtatcgcctgcgtcaatacgggcggcgggtacctcaggacatttccatcatcggcttcgacgattccaccctgtccgccgccgtgggactgaccacgctgcatcaggacccgttcgcaatgggcgcgactgccgggcacatggtattggatgccattgccggcaagtcaatcgaaccggcattcgtacggccgggcactccgctaatactgcgcgaaaccaccgcgccgcctgcctcgacagcagcgcccgcgcagtcgtgaccacgttaccaccgcaaaacgccgataaatcgatttttgcatgcgtaattcatatgatatcgttgtcatcatcaatacaacggttgggccttcacacagcagttcgggcgcgaccggaacaacccaaccacaacgcacccggaacaggagggaatcggcatgaccgcaaataacctcaatgacgactggtggaa

SEQ ID NO: 3409 - DNA, 6553 bp, Unknown
  R151_18m  MAG No. k141_36878
aagcgactcatcacgcaaccctcgcacatatgcggcgaaccgttcacgattcatgccggccgctgggttctcgaatcccgtctcctccgccgggaatttcgcgaacaagtcaaacgcgcgttcctggtccgccagccatgtctcaatcagccgcattggtcacactcctcctgttgacacagcagaccacactactactgtgctcgaccaacggccgcaagccttactagggtgtgtttacagataggcagcaagtgtctgccaatgcgtttatcgcaggatataccaggttactttccccgatacacggcagcgacgccgaagacaaattgtatgatgaacaatcccagcaggaagatcagagctcctggccggtacgtgcggtagaagtcgaccatatctggctgcgccaaaggcgctgccatgatatacaccagcgcagcgaacacggcgccgagcgcggaaacaaccaagaacgcgcctacggcaaaacgcagcaggccacgatccgaggtcctccggcgcagaccacggcatcccacgaagacgaataccgagatcagcaggtagaacagcagcccgtacgtgggcagcatgtcgataatcagcagatcgttcatggcatatcctttcgtggcgcaatcccattcaacctgcgcatggccaaaagcgcaacatcgtgtcaagtaatcgcatgatagcaggtttcgtccggctgcgaccgtggccacgatgagcggcatgggacatgatgacatgaccggggctgcggcgcggtcgatccgtatcgcccgtattggacaatgatccgttcgccctggatgcgatgtgcgcgatgatctcggccgtttccaaggacttttatgtaatgcgggggcacgggttcgcccgcggtggcgatcgagcattgccataacccgcataccaggccggatgcgccggtgttggatatggcgttggggaaaaaaatcacgggcgctgacgtgtgccggcgcatccgtcgcaggagcggcgggacgggcagcgtgttcacgtacgtgcaccgcgtggccgacaagctgggagtcgccagccgcaaggaggtgctggacgcatgcgccagatacgatctgctctgccccggctttccgaccggcttggcctgcggcatgccgggcatccggtgatcgcggcgtcctgcgccgtattgtccgtggcggtgctcgcggagtacgtgttctcgatggcggcacgggtccccggcaccgcgaccgtgcgcgatatcatgttggctctggctgtgcttgccggcctggtcggcggcatgttccgcccggaccggttcctgtggccggcgcttgtcacgggcgtaatcctcatgctggatgtcccgatggtcacgccgggaccgacggcatgcccgccgacgaacacgaataccagcaacagctcgacgaattgcgcgacgccgccagccgggccatgggccacacgcacgaggtcatcgactcgctcgaagaacacacaccagcgcaagccagccggacaccgaacaagcccactggcagcttgaggccgtcattccctttaccggcgtgttacagacaatggaatggtgatgttcgcgttccagttgtcggaatcatcggtgatgtcgaacgtcccggacatggattcgataacggttcggtatctcttgaggccgctgccgagtccgagccgtaccgcttcgtcctttagtacgtcgcttgccgaaatgatgacgtgccgccggtcgaaggagatcgtgacggcgtaccattcgtgcggggcggcgtgcttggcgatgttcgcgtacagttcgttgagcagtccttcgagaaggtcgaggatgtcgtccgccagtggatggtcgaacgtcccgaggatgtcgtcaccttggaatccgaggccgccaaggcgacgtcgttgcgattgaatgatgccgtcaagccgttcacgctgctgttcgattttcctgtcggttttgtcgtcgttatttgttttgacgatgcggctgcgatcgtctggtttgtcggtgcgttcaagttgtcgtatcacctggtgggtgtggtcgagcgccgtttcggcgatggcgcgcagatcggtgagttggcgctgatattgctcccgatcggcggggcaatcactgcggcttgcctggtcgatgcgcaggatcatgtaggcgaggtcgttgctgatggtgtcgtgcaggtgacgcgccgtgtgttcgcggtcgagtcgttgcctgagtgtcgcggtcgcctgccgttgggcgaacagcaggttgagactgaaccccagcgacaatgggcataggcacatgatgatcatgcctacgatgttcgacgaggtgaggttgttctgcatgttgttcgcggcgagggcggcgagggccgccagtgcggaagcggctccaaggcggggtttgacgaacgagaggaccgctatggaggtcagtgcggcgatcatgatggtcgtcaacggcgagaacagccacagcaacgcgtatcctgagaccgcgaacagcagacaggcggcccataccggtgccgctccgagcatggcgcacaggacggcgacgagcagcgatatgcgtatggtcgaccatgacagcaggttctgggatgagtacacgcccatctctacggggatcgccactgcgaggaccagccccgcggccagtatggctgggtggtgtatacggttcagagcagatcgtatcgggcgcatatggcgagggcctccttgcggtcggcggcatggagcttgcggcatgccctgttgacgtaggtgaagacgctgcccttgctgacattcaggagcgcggctatctcgtcggtggatgatccatgcgcgtagaggcgcagtacgtcccgttccctggaggacagcgatggcttgtcgttttccggcagccggccctcggtcgcgtgtccttcgttgagtttgcgattggcttcccgtgcggtggagaatccggtgccggggacgggctcgccctgtgccgcgcatcgtatggcctgcgggagctctttgacgatgtcatctttggctatcaggcattgtgcgcccgcctcgaccgcgtcttgccgatatggatcaaggtcataggaggtgacgcacaccaagccgatcgtcggagtgcgccgacggattctggcgcatatgtccgcgccggtgatgcctcccaaggccatgtcgacgaccagcacgtcgggtcgcgcgccgtgggtcatgcagcgctgcaatgccatcgccggggacgtggtgctccagatgatgtggaaccgcggggagagacggctcgtcatcacggctatggcgttgagggcgagcgaatcgttgtccagcaccccgatggagatggtatgcgagtccgataggtctgtcatgccacccatcgtatgcgcatcccatgctcctcgacgtatcgttgtcatgcgcgcgcatgacagtcttttgctcccggatcgccgtctgtgggctaatggttggcgacagttgtgcaatcgtccgaaggagcatgatgatgaaatcgggaacacgacgcagggccgccattctgaccgcagtgatgctgctgtccggttgcgggacgactccgaacggcggcacctcgggaagtggcggcatgctgacctggcagcaagcgaacgaggaatacaaggcgaccgtcgaggatttcccctttgaactgatgaacggcgatgcgtttccagcgaatatacccaaggcgcaggccgcgtcctcgctgtatgccaagggaagtggggaaggacaggcgtatgtctactggcagtgctcggtggaacgcgacattctcgacaacagccagaccaacgcggaagcagcccgaggcgccctccagcagctgcgcaagctgctggataccgactggttcaagaactactacgaggacaaggatggcatatacgagaacgatgtgatcggcaaatccgaactcggcgactattcgaccatgcgggacttctacaccacggactgcacatggtaccggcatgagaacggactgacgaaatgaatgcgatcgcaccgttcaaatgcctgttggcgtgcgtgacggccacgacgatgtgcgcgatgatgacggcttgctcgccgtcgcggacgccatcgtccgacgcctcctccacggcgaagcggccagcatccacggtcgaggtgcgtaggggcggcatcacgccgttgtcctcttcctccaccggcgtgcaggtggctcctgtgttctcgcttacgactccggcgaaaggctggttccactccacgactgatcaaggagcatacgtgcatgcgggcgacgtgttgggtaccgtcggcgatcagcaggtcacggctccggtcgacggcgtgatcgaaacggtcgcgcaggacaacgacatggccgcggactatccgctgttctcgatacggtatggcggcatgagcgccagcgtggacgcgaccgcgctgctggcgaccatagacccggaccagccgttgacgggccgattccagatcaccgacgcgcaggggcccacggactgtgccgcggtagtgaatgacggcgtcgccactccgccctcatcagcggaagatacggccggatcggcgacgactgcgcatgggacggaatcgactcgcacactgcaatgcctgttcccaaaggacgtgcaggcgcgtcccgggcagaacgccaccgtggtactgaccgcgacggcggtcgaggacgccttgatcctgcctgtcaccgcagtcgccggcaggctcgcctccggccaggtcagcaggcgtgacggagattcgttcgccaccgtgaacgtgaagttgggggcatcggacggcacgtcgatcatcatcctcgacggtctcgaggaaggtgacatggtgtccgcgacagctccgaatctcacaccgggagcgcaatcatgagcacactcatccggttggaacatctgagcgccgaagtccggctgcccgacggcgaacgcctgacgacggtggacgatgtcagcgcatcgttcgagaggggaacgtccaccgccatcatcgggaaatcaggatccggcaaaaccagtctcgcctccatcgtcgggctgctcaacaacgactatgacggaacgctctcctatgacgggcgggactgcgccgcgtggaacgacgccgaccgggcgcgcttccgctgccggcatgtcggcttcgtgttccagaactactccctcataccgcatctgagcgcatgggagaacgtggcactcccattgcaataccggggaggcatccccctgcgggtcatcagaagacgagcctcgcgcatgctgcacaccgtcgggctcgggagccggacggtgtgcagcatgccgtcgcgcctgtcgggaggcgaacagcagcgcgtggccatcgcccgagcgctggtgggcgatcccgatctgctgatctgcgacgagccaaccggcgcgctcgacaccgaaaccggcgacatggtcgccgacatactgttccgacatgttcgtgaactcggggtcacactcatcctcgtcacgcacgacccgcagctcgccgcccgatgcgaacgccgactgacgatcgacagggggcgactgtcgtgatccgcatgatcgccaaggatctgcgcatcaacccgttgcgtaccagcctcaccgccctgtcgatgttcatcggcatcatcgccctcatcgccggcgttctcgtcggcacgctcggacgcgactatctggaagcggtcaacgcgcgactgggaggcaagtcacccacctatagcgccatcgtcgacgtgccatcatcggtgaacatacaagtcgtcacggctttgcaggaacgcctcgcgcatttccgtccgggaatcgcatcggcgcaatatcacctcaacgacctcgccatatgggcgtcgtccggtgacggcaacacggagatacgccgcgtcaccatcatcatcaccgacgccgaacggacaagaatcatgcccgcccccatcatcgagggcacatggctgaccggagcggacgaacccgccacgctggaaaccgcagtcaacgaaagcgcccgccaatacgtgcacgatggcaccgtggcactcgcccggacaggaaatccgcaacaggtgccggcacgggtgaacggtgtcatcgccgacgggacggacacacccaccatctacgtcaacgcgaccacactgcaacgctactggccgcaagcctgggaaccggatgggctgaccatcctcgtccatcccaatgaaggcgtggacgatcaacacgccaaaaccgtgttggacgatctgttgttcgacgtcggaaccggcagcatatcgtcatggaaccgttccgacaacgccgatgattacgagcaggtcatcggttttctccaactcggcgtcaccgtcaccgcgatattactgttgtcggtatccgccatcggcatgatcaacatcggattggccggcatcgagcaacgctcgcacgagctgctcatccgccgcgcactgggcgcgaccagagccagcatagccatacaggtcatcggctcgtccgtgctg

SEQ ID NO: 3410 - DNA, 12133 bp, Unknown
  R151_18m  MAG No. k141_37652
aaaactgatgaagtacgccgatgccaccaagaagtacgatgtggtcttcggtctggaaacccacgtggagctgtccacgaacaccaagctgttctgcccggcccacatcgagttcggtggcgagccgaacaccgagctgaccccggtgagccttggcctgccgggctctctgccggtgatcaacaagaccgccgtcgattacgccatcaagctgggtctggccctgcactgcgaaatcgccgagtggagccagttcgcccgtaagaactacttctacccggacatgccgcgcgactaccagatctcgcagtacgacaagcccaccaacggcaatggctacctggacgtcgaactggaagacggcaccgtgttccgtgtgccgatcgagcgcgcccacatcgaggacgacgccggcaagaacacccacgtgggtggcgccgacggccgtatcgagggcgctgaccactcgctggtcgactacaaccgtgccggtgtgccgctgattgagatcgtcaccaagccgatcgagggggcgggcgaccgcgctcccgaaatcgccggtgcctatgtgcgcgccatccgcgacatcgtgcgcgcgttgaacatctcccacgctcgtatggagcagggcaacatgcgcgctgacgtgaacgtctcgttgcgcccgagcccggacgctccgtacggcacccgttccgagaccaagaatgtgaactcgttccgcggcatcgagaagaccatccagtacgagattcgccgtcaggccgctcgtctggacgacggcaaggagattctgcaggagacccgccactgggatgaggctacgcagaccaccgctggcggccgtctgaagtccgatgccgacgactaccgctacttcccggaccccgacctcgtcatgctccacatcaccaaggagcacatcgaagagatgaaggcccagatgccggaaatgccgcgtgagcgccgcaaccgcctcaagtctgagtggggcctgagtgatctgcagatgcgcgacatcctcaacgccgacgccctcgacctgattgaggaaaccgtcaaggccggtgccaaggccgccggtgcccgcaagtggtggctgggcgagctttcccgcgaagccaacgccaagggtatgtccctcgaagagctgccgatcaccccggccgatgtggccgaggtcgagaagctcatcgcctccggcaagctcaacgacaagctcgccaagcagaccgtcgaaggcgtgcttaagggcgaaggcactccggatgaagtcgtcaagaagcacgactacaagatcgtcgaagacaacggtgccatcgaggcggccgtcgacgcggcgttcgaatccaacccggatgtcgtcgagaagctcaagagcggcaacatgaagccgatgggcgtgatcatcggtgccgtgatgaaggccacgcgcggtcaggccgacgccaaggccgtcaccaaggtcgtcatgggcaagatcaagggctgattagattcactggctcccgctggcgggagctgtcgaacggagtgagactgagggtggtcgccatgtacggatgaccaccctcagtccgcttcgtggacagctcccgccagcgggagcacttatttgtagggaaatcctccagttcaaattcgttggacagctcccgccagcgggagcctttattgattctgtaagaaagtcgtctcagagcatttccagcgttcacccagtcgagtaagatatgttcggcactggaccgtgagccgaaacaagccgaaccgggggatgtataccgatgaccgcaaccaacgagacgctgagcatggctaccgaagcgcaactgaagcgcgatctgccacagagcatcgtcattccgccaatccgtggcgaaatggtgcacctgcgccccgccaccgtcgaggacctggctcgtttggatgaacttgatgccttctatggcgcatccaagatcaccggcaaggatgcggtcaccgaacgcgccatcgtacacacatgggtccgccgctcccaagcctgggaagccggtcaggcacccgccgaatccggcgtgggcgacccggaatcccgccgcaccatcgcatgggccgtattgactgacgccgaccatgacgatgacggtcagctcgatgcggccagcaccgataatgtcatcggcatgattttcctcatcgacatcgacggctggtccaagtccgcccgcatccagatcatcttgggccgtgagtaccgtggccgcggctactcccgtgacgccatgccgcgtgtgatgacttacggctttgcgcccgaaccggccggcctgggcatgcaccgcatctgggtgagcgtaccggaaaagaacagccgttcgatttcggtctaccagtcgctcggcttcgtgccgtccggcacctcgcgcgacgcgttgtgggatgtcgaaaacaacaaataccaggaccttatcgtcatggacacgttggtcgacgagtacgatccgattcgttcgcttgacgcttttggtatgcacttgattgaggacaacccgggtgtcaaggaagcgctgtccgcgcgtgagcattccatcgccatccagcagaacaagccggaacccgagccggcacagcgtggtgaggcagccgccgtcacgacgagtgacgtgcagtcccaggcccagacgccggcggccgcacagccagtcgagccacaggccgggcaccacgacgatacgcagaagaacacgcgccacagtctcgaagaggaaagcaactggccgtacggccaggcggaacgcaagccctcaaaggaagcatggtggcgtacgctgggccgcggccgcaaacgcgatacggaaagtgagtgagtaaacaagcatgagtgccgaggatctcgacaattacgaaaccgacgccgaactcgcgctgtatagggaatatcgtgacgtcatcaagctgttcacctatgtggtggagactgagcgtcgcttctacttggcgaataaggtcgatttcaacgtgcgttccgctggccaggacgtgtatttcgatgtgcagctgactgacgcatgggtatgggatgtctaccgttccagccgtttcgtcaagtccgtgcgcatcgtgaccttcaaggacgtgaacgtcgaggaagtccagaaaaccgatatcgacattcccgacgatattcactgacaggcaatcgtctgatacagcctgtattgacaatgcgcggcattccgtcatcttacggcggggcgtcgcgcattgttcatacaacgcatagcaaaagttcaaactcgtaaccttgccatcgtgtgtcttgtttgcttgcggttgatagaagatgatgctgtttgcacttgcaggaatctcgctgaatctatggaaggttcgtcgctgacgaattagcccaagaccaaaccgattcgccgcgctgtgcgtgacgcagcgttgccgaatacccctacctcacgattggatgcgtcgcctttctgctgatggaagacggcgcatcggtcgtatatcgggagaattctgtaagcattcgctcatctttcggtgtgcgattccggggcttctagtaaactgtctctgattttgcgtttataaggagcataatgaccgacaagcaatccgtagtgattatcggcggcggtccggctggacttaccgccgcatgggaactcgtcaaggatggcggcgcggaaaactatgacgtgaccgtgctggaggggacccgcgaattcggcggtatctcgcgcaccgtgaagcacaacggcaaccgcatggatatcggcggccaccgtttcttctccaaagacgaacgcatcatggattggtggaagaccgttctgccgttgcagggcgcaccctcctatgatgacaagaagctcggccgcgaccacgacatggagccgggcggccccgatccggagacggaggacaaggtgatgctcaagcgccaccgcgtgtcccgtatcttctggaaccgccacttcttcgattacccgatttcgctgagccccaacacgttgaaggccatgggcttcaagctcaccatggtggccggcttcagctacctgaagtccatgttccacaagctgccggaagacaacctggagaacttctacatcaatcgtttcggccgcaagctgtattcgatgttcttcgagggctacacggagaagctgtggggccgccacccctcccagatctccgccgactggggcgcccagcgcgtcaagggcctgtccatcatgggcgtgctcaagaacgccttccagaagcttagccccaggaagcgctccaacgcggaggtcgagacctcgctgatcgaggagttctggtatccgaagtacggtcccggccagctgtgggagaccgtcgagtccaattgcgaggccgccggcgtcaaggtgctgaccgacgccagggtggtcgaggtccgccagaccgatggcgccgtgtcttccgtggtgtacgaggattccgagggcaaccgcaccgagctttccggcgaccagttcatctcctcgatgccggtcaaggacctggtcaacgccatcgacgcggccggcgacgatcccgaggccgctgattccaagcccgccccggccgatatgaccgaggtggccaacggcctgccgtaccgcgacttcgtgaccgtgggcctgctggtcaagcacctgaagctcaagaacaccaccaacatccccaccctcggcaatccgccgatcgtgccggactgctggatctacgtgcaggacccgggctacaaggtcggccgtctgcagatcttcaacaactggagcccgtacctggtcaagaacgtggacgacaccgtgtgggtcggcctcgagtacttctgcgaggagggcgactcgttctggaacatgagcgaggaggacgtcaccaagttcgcgatctccgagctcacccgcatgcgtgtgatcaacggcccggacgaggtcatcgactcccatcgtgagcgcgtcaagaaggcgtaccccgcctacttcgacacctacgagcacatggacgagctcatcgagtacctcgacggcttcggcaacctctactgcgtgggccgcaacggccagcaccgctacaacaacatggaccactccatggccaccgccatggaggccgtcggcaacatcaagaccggcaagacgtccaagaagaacgtgtggtccgtcaacaccgaaaagtcctaccacgaagaaaagtgaataaaccttgttgagctccctcgtcacagagggagcttttttggttttcggcgggccgttttgcgttggtcgagttggcgttgtacagtaaacgaagttcgtgaaaactcagagacgcagcgaacattcatgagcggtgcaaccgcaataatcactcttaacgcctggataggcatgggtctgttcggtatggaaagggcaaccagtggcaaatagccagaatcttgaggatatgaagctgcctgagctcaaagagctcgctaaacagatgggcctgcgcggcacgtcgaccatgcgcaagcccgagctgctcgccaccctgcaggcggcgcgcaatggtggagagccgccggccggtgtgaccgtgcgcgctcccaaggccgccaaaaccgccaaggtcgtcaaggctccgcagtccgatgccgctgaggccaataccacagacaatgctgacgtggccacccagtcgccggctccggctccggcctccacggaaccgcagctcgatttgccgcttcccgtggccgacgatgccaagaaggacgagaccgaaccgcgacgcacccgtcgtaaggccgccgatgatgccgcatccgaaccgcgtgcggcccgccatcgtcgcgatgacgaccagtccgatttcgctcgccgcaagccgcgcaagaaggccgatgaggccggcgatctgctggccacgctcgatttgggagatgcagcgcctaccgagcgtcgccgcgagcgccatgaggacgtggaagttccgctgattcgccgagtccgtgatgatgaggacgagcagcctcgccgccgtcgtcgcactgcggaaaacagcgaagaaaccgtgcgtgacctcgacgatatcctggccacgctgcccacgcagaagcacgaggaaacgtccgaagacggcgagcagaacgacgatcacgagtttgtgcgtcgtaaccgccgcgaccgtagcgatcgcaacgatcgcgataaccgtaatgatcgcaacgatcgccgtaaccgccgcatgcgtggccgtgatcgcgacaacgccgatgatgatcgtcgctatgatgatcgcgataatcgtagcgatcgcaatgaccgtgatagccgccgcgaagagccgcaggaggatctggtgccggtggccggcatcgtcgacgtgctcgactcctacgcttttgtgcgcacttccggctacctgcccggcccgaacgacgtgtacgtttccatgggccaggtcaagaagtacggcctgcgcaagggcgatgccgtccatggttcgattcgcgccccgcgcgaaggcgatcgtcgcaaccaacgccagaagttcgtgccactgcaggccatcgattccatcaacggccaaagcgttgaagaagcgctcaaccgtccgcagttctccaagctcacgccgctgtacccgcaggagcgtttgaagcaggagaccgccccgaacaagctcaccggccgtatcatggacatcgtttccccgatcggcaagggccagcgtggtctgattgtctccccgccgaaggccggtaagaccatcaccctgcagaacatcgccaactccatcgccgccaacaaccccgaggtccaccttatggtggtgctcgtggacgagcgccccgaagaggtcaccgatatggagcgcacggtccagggcgaggtcatctcctccaccttcgaccgtccggcctccgatcacaccacggttgccgaactggccatcgaacgcgccaagcgtcttgtggagctcggccaggacgtggtcgtactgctcgattccatgacccgactggctcgcgcttacaacatcgccgcccccgcctccggccgcatcctgtccggtggtgtggacgcgcaggccctctacccgccgaagaagttcttcggcgcggcccgcaacatcgaaaacggcggctccctgaccatcatctcctctgcgctggtggaaaccggctccaagatggacgaggtgattttcgaggagttcaagggcaccggcaacatggaactgcgcctgtcccgcgagctggcggacaagcgactgttcccggccatcgacatcaacgcttccggcacccgccgcgaggagctcatcaccaacccgcaggaactgccgattatctaccgtctgcgtcgactgctgggcggcatggagcccgagcaggcctaccagacgttggtgccgcgcctcaagaagaccgccaccaaccgcgacttcctcgccgccatcgtgcagcaggccaacaccggcaacgcggtcaacggcaactgaccagaccgctgaacaatagtgtaagggctgcaccccgattgatacggggcgcagcccttgccgtatatgatgcaaatacatcaactatcacattgcagttgtagtattgccgtcaacgttcacatgcacgctgacgatatatgagatgaaagatgtatcaatgggttcgattgttttgggagtgggcaatggtgcggccatgttcggcgatgcggatgccagccatatcccctacggcgactatgacatctgagatatctgactttgcgcatcgtgcaaagccgcaatcgggagtatcctcgaatctatgagcgaaacgagcagcggctggcaaaggaccaccatcgactccgcccaggcggcggcccacccggaaaccgcacaagcggtggcgcgcatcaaagcgctgcgccaaaccatcgataacatcgattcggcggccatcgcattactggccgagcggttcaaggccacctcgcaggtcggcgtgctcaaagccaacgccggattcgcgcccgaagacaccaagcgtgaggactatcagatcgaacgcctccaccgcatcgccatcgatgccgggcttgatccggaaattgccgaaatgtaccgtgaattcgtggttaccgaagccaagaagcgccaccagcgcatcgccgatgccggtggcgacccgggcgtactcgacgtattcgcctgattcgcccgtagcgaatgggcacctttcggatattcgtctatagggcaagttgccggcagcgactacattaatacgggaatggaatgcccatagtggccgactgtatgaatgggatacgtagatgagatgtggtgccgcactggtcagttgcgcattgtgcgtggcttcgattctcggcggtgcttggatgtctcgtccgactccggttgattacggtccggtgctcgctacggcaagtgatatgtacgccgtcgctgatgccgaaggggagccggtccgttggtatgtggtagggaagggcggcgccggcaatggcgccagtgccgattccggcaatagcggttccactgataccgattccgccaatagtaattccggcacgtccaaggtttctcgtatccccgcttccgccgccaccctgccatggaaagttagcgtcacctactcgcttgacggtccaaacgtcgaggcaaacgaggttgccggcgcatctggactgatcggcgtgtatatcgatattaagccgcaaaccaaggaggccaaccgtacgatcccggttgtcgcctttaccgtgcctacgcaggtagccgatgatgtttccgctgacaactccattacggtaaccacgcaaggttccaataccgtagtcgccgcagctggaaaagccgcaaccggcttggaattcagctgctatatgaacgccaaagacttctccatgagttccgtggcgctcgccgtattgccttccaattccagcagtccggtagttggtgctaatcccgatgccgcgaatgccgccgcacagcctgctgccgatacggatgtcgcccaactcgtcgcctctgccgccatactggtcgattcactgaccgacgccggttccggggagcatcaacagctcatcgagcagcttcaaaccctgcgcgataatgagcgtgcgctggacaagtccgtagtggccgaacgcgaaaccgcccataagcggacgtttgaagactatatggccgcgtatgtgggctcatataccacgcacctgtctggatcgattggtacctccacccagttgccggcgttgatgggcacggccggcgaactgtccggggatacgcctttggcgcaagccgtactcgacttggccaacgcggtgaacaacgtcagtgccgcacatcagcatgccggtgcggtcgatgcattggatgaggtgattcgccgcatccagcagcaaggcaccaccggactggtggatgatctgaccgccgaggcttcggaggaagccactcgaggctccaagcaatacgccgatggccagagccagctctccgccgcaatgattccgtattcgatgaaatacacggacgtctacacggccaatttgagcgccctgaccggcggcacgtcttcgggcgccaccgcttacgagagccaagccatcgccgaaaccaacggtagcgatgaactcgccgacgctcaatccaaggtcgatgccgcgatgagcacgcttgccaccgcctccgagcatacgggcaaagccacggccttgcgccagattgtattgcgattctccgatcagttcgaaggattcgcgtcctcggcttccggcagcgatggcgatggctcgtccggtgatgtctcttccggtccggtgaccgaggctcaggcactgactggcctggtcgattcgcaatcgcaatcgttctacggcaagacccgggccgcccaagccaagcgtaaggccgatgccgcccgtaagcaggccaaagccgcgcaacagcagcagtcgcagcattccaaggcctcactggtcgatgacaccatgtccatgtctgctggcgatgtgatgaactatgcgggtggtcttacttcggccatcggtggtggaggtaagttcgattcgtccaagagcgatggttcgggaacgaacgactcagccaagtcgagcgatactggcgattccggcaacaatcttgacaccgctccagtactgttcggctttggcactggcggcacgctgctcaagcatgacatgagcgcgctgatcaatgagaccgtggagatcagcgatgctggcacgctcttggcgcaggccgtcgcgcagctcgatagccccaatacgcaacaaaaaaccgccgaaacccgatacctcatcgtgattccgacggtgtgatggtgtatgcgggaaaatccgcatgcgacaggtgcccaatatgcgtaaagtgcgttatcggtgtgggacgccgcatcaaaaactggctttttcgatgcggcgtcccacaccctcttgtaagtcagagctaactatagtttgaagaatggctaaattccaaggatttgttgattcggtctgtgggacgccgcgtatataaaacgtttgacacgcgtggtggcccacgctattgtgggccgccagcttacaatgcgggatatttgcgtgccgtcccacagtcgtgtcatccgaacgtcaaaaaacaaaagaggggaacctcaataggaggttcccctcttttgttgttgtgcgcaacgctcagtgctttggcttcttggctggccgagccgttaagcgggaagcccggtgggcttcccgtaggctcggaacgagcggcattgccgtgagacctactgttgttgtgcgcaacgctcagtgctttggcttcttggctggcggctcaccgagctcgctggcttcgacggcgacctcggtttcgggcgcgtcttcggcggcggattcctcggcgtgcttggccaccaagtcgaacttgccgaccacgcgaccggcctgcgcgatatcgcccaaggcggcgtgaatcgcgttcacaccttccgaagcagcggacagtgccacagacaggattggggtcttcatggagaccttggcctcggacttgatcttacgcagctgctccacggccttgccggcccaagtcagcagctcgggggaagcaccggtggcggcctcgacatacgggtccacgaccggccaggcggcgcgatgcacggaaccggaaccggcgtgcatccagctccacacttcctcggtggcgtacggcaggtacggggccagcagacgtgcgaaggcgtccaagcccagacccagagcggtgcgggcggacttcacagccttctcggacggcacattgccgtgctcgtccggagtgccataggcgcggttcttgaccagctcgatgtagtcgtcgcagaactgccagaagtaggattcgatgacttccagcgccttggaatgctcgtaggattccagcgcctcggtggcctgacgcaccaccaaagccagcttggccatagcggcgcgatccagcggttcggtcacatcggccgggttccacgaggtctcggcggcagcgcccacgtgatggttctcgtcctcacggccgatggccagcgcgaacttggtggcgttcagcagcttgatggccagtcgacggccaatcttcatctggccgatgtcgtacgtggcatcgaggcccaggcgagcggcggcggcccagtaacgcacggcgtccgcgccgaacttctcgatcggctcgttcggcaccacgacgttgcccttggacttcgacatcttcttgtggtcggggtccagaatccagccggacagcgtggcatgggcccacggcagacacttgttctccaagtgcgcgcggtccacagtcgagaacagccaggtgcggatgatgtcctgaccctgcgggcgaaggtccatcgggaaggtggaagcgaacagggccttggaggcctcgtccggctcggcccagtgggtcacgatctgcggggtcaccgaagaggtggcccaggtgtccatgatgtccttttcggcggtgaaaccgccgggcccatcacgctgggactcgtcgtagccttccggcacatcgatggccgggtcgatcggcagacgatcctcgctcggggtgatcgggtgatcgtaatccggct

SEQ ID NO: 3411 - DNA, 12380 bp, Unknown
  R151_18m  MAG No. k141_37752
cataggcctgtgccttggtgacggcaacgattccgatggccacgccgacgccgacccagaagatgcgtttgaacatcactcccccttctcggcggtgtcgttgacggtggttttcgcggcgttcttcgcaaggaaggactgacccgtggttttcagcgcgtagaaggtggaagcgatcttgatgatgggcttaccgaggaaagagccatacagatcagtcaacgcaccaacgttgttggcggtggtggaagccgcggcggaaatcttgttcacgtcttcaagcgacttgttgacctgcttgacggtggtcacgccttcgtccagcgcggggatggcgtgttcgccggactcccggaccgtctgcgatatctgatcaaacatcttgcccagcctgatcagcggatagatcatgaaaccggccaatactgcgaacgcgatggccgcgatcaggccagcgatctctccgactcccattgtttcctccttgcggtcacacttactcgcctaagggtagcactccttccctatttcttggcataccattgcacgcgcagggcgaaaaccgtgcgcgtggatgcatgcgactataggcgaaaggtgtcctgctgacgctttcgtttgcggcgtgccgccgtggaccgtacgtgctattcgatatgtattgcttgctatttgctacttgccgtacgaaacgatggtcacggcctcgccgaacggcttgtcggtgtcgaagtcgagcacggttaccgaaccattggccgggcgttcgttcagatcgaggtcagggccgccgaaccggtggccgaggctaagcagtgtgttgccatgcgaaatctgcagcacatcgtcgccatccttgagattcgggttgtcggcgataagacggaacgcgccttcgacgcgcgtccaatattcctcatcggattccgcatcgtggaagggatcggcttccttgagaaaatcacgcgaggcccccaacccgaacttctcgacgatttggttgtaggttttggcgccgtgaggcgctcccgcggcgtaccaggccatggccatgtcaagtccctcgtagtagccgtagaactgctcgcggaagtgcatgtccgtcacgagtgcggggcgcgggttacccgcggcttcgttgatgtcgagaattttctcggccgtctgccgggcacgcgtggtgtccgaacagtaggcggcggtgaacgtcaatcctttcagtcgctcaccggccttgacggcatcagcgacgcccgactcggtcagcggcgaattcgaccatccctgcagacggttgtatcggttgaaataggtctgtccgtgacggaccaaatgcagatgaagaatcatggttccgattatgtcaccattccggcggtttcggtgcgggctgccggaagtcataagtcataacggcataggtcactacctgagatatgcgtaatccgggtagtatacctgacgattcctgagagtacacttagggtactatgagcataacctcgaaacctgcaccatctcaatcgtctgagcctgcccatttcaggggtatcgatggactgcgcgctctggcgattcttggagtcatagcattccacacccgcccgtcgctattgcagggcggattcattggcgtgacgatgtttttcgttatcaccggttttcttgccacacgttcagtactgaacatggtggaccgcaccgggtcctttggatatggccgatatctgatccgccgcattactcgtttatggccggtgatgctggcgaccattgccgtggtgccttggctcacttggatgttcgctcccagcctgttgcagaaagtggtttccgattcgctgccgagcgccttgttcgccagcaattgggtgtacatcttccgcaaggtgccgtatttcgaggcggccggattgccttctcctctgacccatctgtggttcttgggcgtgacgatgcagttctatctgatttggccgttgctgatggtggtgctcggcaaaatcaccaagtccaaatgggtgcgctccatggcgattcttgtcatcatggctgcttccaccgccgccatggtgctgctgtttgacccggccaatacctcccgcgtgtattacggtaccgatactcgtctcgccgagctggccgccggcgcgctgttggctatctggattgcgccttcctcgcgaggtacggaagttgcggaagctggagcggcttcgcaaacagtgcagatcggacgtcaggccggcgacaagacgggcgcccgtctcactatcgtctgcaatgttcttggcaccgcggctttggcggcactgctggccggattctggttcgccaacgggtatctgtcgtacatgtaccaaggcgggtacctgattaccgcgttcatatcgttgtgcgccttggcctgtgccgtgaacaatgactcaatctggtcgcgcgtgctgggttgcgctcccctacgctatatcgggtcgcgatcgttctcgctgtacgtcatgcattatccgctgctgcagttcatgaacccggcgacacgaacgcaggcgttgccgtggtggggttgggttcttgaggccatcgtggtgttggcggcgtcggaagccttctaccagctggtcgaggcggcccgtaaatcggtgcagatgcctcgcagccaacatgccaagccgctgccgaaagccggctaccagctgcgcccgggcgcgtgggtcatgtcggttatcggattggtgaccgttgtggtgctgacgtgggcaccggtggattggaatggcatcgctcaagcgcgagccattcagctgcgccccgaactcgcggcacccgccaagccggtcaagaaaccggcgaagcccgagcccgagtcttctgccacgaatgccgcgaacggcgaaaccaataccgctgacgcgaataagaacggttcggattctcagccgcccaccatcaaaccgattgcggaaaaggtgccaaacaatcttgacatttcgaagtacgcctatgatccggcaacggaaagctgcaacgcggatatgatgatggtcggcgattcagtgacgtcgggtacttcggacgccatccaggccgcattcccgaacgcttttatcgatggcctgccgaaccgtcagatgccgcaggcggtggatgtgtatcagcaggacaccgctgccggccacagtggcagtgtggtggtgtttggcctcggcacgaacggcgtgatttcgaatgagcaggaagtgcaacagctcattgacctgaccggcggcaagccgacatacttcatcaccatccgtatgccatacccgtggcaggagaacaacaacaatacgatgctgcgtgaggccgccaagaagaacaagaacgtgggcatcatcgattggcatgggtatagcgaaggtcatagcgaatacctcaacgatgacggcattcatccgaatatgaccggtgcctatgcgtacgcgacgatgattcgtcaggcggtgtgcggccagtaatcgccctacaacgcaggaaccccgcggcttctcgaaagaagcgcggggttcgagcggtatgtcctggatttgttgaccagagggcccggatcagcgggcgtagaattcgaccacgtactggatgttgacctgcaccgggatctcttcgacctccggcttacgggtcacagtggccttcagggacggcaggttcacgtcgaggtagccggggaccgcaggcagcacgtcacggtgcacgccttcggcggcgatctggaacggaaccatggtctggctcttggccttcacctgaatggtctggccgggcttgacgcggtaggacgggcggtccacgatgttgccgtcaacgaggatgtgacggtgcaccacgaactgacgggcctgggcggtggtgcgggcgaagccggcacgcagcaccaggttgtcgagacgggtctcgaggtcggtcagcatggcgttaccggtctggccggcagtacgggtggccttctcgtaagcggcgcgaagctgcttctcggagatgccgtactgagcgcgcagacgctgcttttcgcgcatacgcaccgcgtaatcggactcggtgcggcggcggtcacggccgtgctcgccaggagcgtacggacgcttttcgaagatgcgctgagccttgggggtcagtgcgatgccgagggcgcgagacagacgcacctgacggcgagaacgctgaacgttcgtcattggattaatccttctgtcgttatctgaacggaacgcttgccttgcatatgcctggcaagcgctgagccgggcctccccagcgcttcgtcgtgaacgaacacgaacgggttggttttcttgcgatcacctaccgccgacccgctgatgggctatgactccagacggtatctacctgttggcagacaccagcagaccatattacaccgaggctatggacagcactccggcgtccatgcgatacacccggtctgcgtattcgagtgcatcgggatcatgggtgaccatgagaatcgccgtgccgttgttggcttggtctctgagcagacgcattacgatgtcggtgctctcctggtcgaggtcgccggtcggctcgtcggcgatgagcaggctcggctggttcatcagcgcgcgggcgatggagacgcgccgcatttcaccgccggacagctcgcgcgggtagctgtctgccagatcggcgacaccaagctgggtgagcagcatgcgagctcgggtggcgaacaggtccggacggctcgcagccgtgtttgacggcgtgttttcccggtctgtgattggcgcaatgacatccggcatgaacaggtcggcggctgcttcatcattggcggcagcggcttgtgccacggcatcggtcgacgcaacagcgtccacctgagcaacggcatccgttgcttctgcgttttgggcgaacggcagcggctccggaaacatcgttgcgggcagaatcacgttgtcgagcacggtcaggttgccgagcagggtctggctttgggtcacgaatccgatggtgcgattcctcagcacggacagtgctttatcgcccaagtcggccacattgcgtccagccacgctcacggttcccgaggtcgggcgaatcagcccggcgaccatgttgatcagcgtgcttttgccgttgcccgaccggccgacgatggcgatgaattcgccggcatcgacggtgaggttcacgtggctgacggcgtcgaacggcgtgccgcggcggacgaactggcgggtcaggtccgtcaaggtcagcagatggtccggggagggcgtctcggttacgtgcggcgaatccggcgcagtcggcgcgttcggctgagctggcgtggtcggctggagcttggtcggctcaaccgtggtcagccgagtcggcgtagttgtctcagtcatatcactccccctctcgcagggtcaggtaggcttcgggccggccgagacgccacatggtggccagcgaaccgatgatgccgatgaccgtagagcacacaatggtcacggcaatgaatccgatcaccgcaaccgggctggcttgcagatacggcaattgaagttgtttgccgatcagcgaactgaatgggaaaatcaccaggctggccgcgccgacgccgattacgccaccgatcagaccgatgatggcggattccttcagaatgatggcattcaacatgccgcgcgtggcgcccatgatgcgcagggacgcgaattcgcgtttgcgttcgttcaccgacgaggcgaatacggcgagcagcacaatcacgcccattacccagatcaccgccacgaaaatcttgaggtaggtgacaagcgcggtcagcgaagttctggtgttggcggtgatgccgccggggtatacgtaccccaaatcggcgaaccgggagtcaagacgcttgatgttttcagccacggtctgcgcttcgtaaccccgctgcgtcttgatcatcacggtggagacggcttcgcctgcatattcggcgggcatgacctgcttggagaccttggccgaggcggcgaccatatcaggcacggtgttttggttgatgaacaccgaattgtcgaggctggtgccggtgttggcgagctgggcgacgaccggccacttatggccgtagagttcgatggtgccgtcggtggacacgttgacgtttgcgccggcaatcatctgaccgtcttcaagggggccttcgaactgggatgcgacccatggttcgatgacgaagtcagtgtccgggtcgtaaccgatgatctgcagcttttcggcacagcaggcggcggccagcgacgatatataggtctgttcggtggcctgtgcgatgccgtcggcctgcatgacctcgtcggcgatgtctttggtgaaatagaaagtgctgggattgccgctggtgagcagcgcttcagccttctgcgcggtgttttgcggcacgaccataaggtcggcgcccaggcgcttctccatactggtcatgccggtgttgaggttcatggtcagcatggtgccgccgaagaacgtcagcgcgaggatggtgacgacggcgagcagtgcgccggtgcggaacggcttgcgtttgaggttttcaatcggaaggccgcgcaatgcgatatgggatggcacgatgagtccttatgttgcttatagtgcggttgcaataagcgagaccggagtccagcgttcggaatggctgggctccggccgtctgctcgatcagttgcgcttggcggcgcgagagtcgagccagatggcgatggccgcgaacacgatggtgagcacgccgagcacgatgagcgtgggcagcataaccatgcggcagtgcatcatcgcgcccttgcagatgccgatcaggaaggtgggtacggcgagtagtagcagggcgttggctgcggcggcgatattgaggccgatgcgaatctgcggggcgacgaacaaagccacgacgccaaacacgaggatgacgacgccgatgccggtggccgcctgctgcgagtagtggcaggcacccggcatgtcatggccggtgcaggcgtgcgcaaaggtctggagcgcgatggtgatcagcgcgccgaacagaatattgggcacggatgcaaacagcttgttcttcataactactttttcctctcccctgttcccagggctcgtaggcgcaacctccgcattatgcccagatagtgatgaagaacacaagtcttgttttttgtgaatttatttggtatataactcagcccctcgtcagaggggccaatctatctacaacttctcaataggtgctacgcggagcatgaggcgtttgacgccggcggagccgaagtccacggtgattaccgaattgcggcccttgtcttgcgcgtcggtgaccttgccgagaccgtactggtcgtggctgatcatgtcgcccacggcgaagtcggcgatattcaggccattgtccttggtgagcttcgagctgggcacggcagagccggtcgaaccggatttcggtgtggtgcggcgcgtggtgaccttgccgccacgggtgccgccatatgaaccggatgaagaaccggaacgggaacgcgacccgtaagacgaccccgaacgggagcgagacccgtaggaggacgagccggagcgggaatcatatgatgatgaacgggaaccgtacgaagaacctgaacgggaaccatacgacgaggagccggaacccgagccatacgacgacccataccgcgaccgcgacccataggacgaacccgaaccggacgaaccacgcgagccgaacgtcgacgacccgccaaacgtggcaccgccgaaatcgtcatcatcccagccgcccaaatcgtcggcgaatccatcggtctcccagttggcgcgcatacgctccacgccggcttcacggcgtttccaatcaatcagcgaatccggaatttcgtcgaggaattgactgggcatcatatcggcggcctggccccactgggagcggacggcggcgcgcgtgacatacagtctctgcttggcacgcgtgatgcccacataggcgagtcggcgttcctcctgcagttcagtggtgtcttccatcgaacgcgaatgcgggaaggtgccctgttccatgccggtcaggaacaccaccgggtattcgaggcccttggcggtgtgcaaggtcatgagcgtcaccttgccggagtcctccgcctcaccgggcagctggtcggagtcggccacgagcgcagtggtctccagaaatgcggacaacgtggcgtcaggcgtgttctgttcgaattcggctgcggtggactgcagctgggagaggttctccagacgggaggcgtcctgcggatccacggatttctcaagttcggcccttaagcccgacttctccaatacttcggccacgatctcgctgggcttggagtcgtgcgcgtgcgtgaactgcgagagcgcgcccatcagatcgcggaatgctcgtagcgaggtggcggtgcgggtcggcacctcgatctcatccaagtgcatgagtgcgtagaagaagctggtgccatgctcgcgcgcgtaggcgagcagcacgccttcggcgcggtcgccaagcccgcgcttgggcacgttgagaatacgacgtagattcacatcgtcgtccggattgacgagcgcctgcaaataggccagcgcatccttgatttcgcgacgttcgtagaacttggtgccgccgacgagctgatacggctgattcgtgttgatcagcgcctcttcgagcgagcgggattgggcgttggcgcggtacatgatcgccatgtcggagtaggagatgccctcttcggcgtgcaggcgcgcgatttcggtggccacccactgggcctcctgctgggcgttgtccgccgcgtagccgacgatcggctcgcccttgccgagcgcggtccacagtttcttgggcttgcggccctcgttgttgctgatcaccgcgttggccgcgtccagaatggtctgcgtcgaacgatagttctgttcgagcatgatggtcttggcgttcgggaagtcctgctcgaagtcctggatgttgcggatgtcggcgccacggaacgcgtagatggactggtcggaatcgcccaccacggtgatccaggcggggccggacttgccggcgttcggcgcgcccgggatggccttctcccccgtgtccacgccggccagctcgcgcacaagcacgtactgggcgtggttggtgtcctgatactcgtcgacgagaatgtaacggaagcggtgatggtagtactcggcgacggccgggtcggtgcgcagcaactcgaccgtgcggccgatcagatcgtcgaagtcgacggcgttggccagggccaagcgatgctcgtattcggcgtagatcaccgcatagatggcttcaaggtcgcccaccgtgccgaactggtagccgcgctggccaggcgtgaagtcgggcgcgtgaacggcgaggttttccttccaaccggtcagattgttcttgaggtcggagatatggccgaggatcgagcgtggagtgtagcgcttgatgtcgaggttgaattcggtggcgatgattttgacgagtcgctcggagtcggcggaatcataaatggagaagccggacttgagcccgatggacttgccgtcgcgcctcagaatgcgcacgcaggcggaatggaaggtggagacccacatgcgctgggccaccgggccgatcagcgagccgagtcgttcgcgcatttcggcggcggccttgttggtgaaggtgatggccagaatctggctcggccatgcgccgaactggctcaagatccaggcgatgcggcgggtcagcacacgggttttgccggagccggcaccggcgccgatcagtagcgcctgaccgcggtattgcacggcttccgcctgctgcgggttcagatcgcctacgagttcctgcgcgctgcgtgcgatgacttccggctcgtcgtacactgttgcctccctttgaatcgcgacattcatgtttaccacatgcacgggtcagcgcaggacaacgtacacttacaagtatccatatcattcactgacatacagcaatgggaggtctaatgcaggaacttgaggagcgaatccagagcgagggaacggtgaaggcgggtgatgtgctcaaggtggacgcgtttctgaaccaccagtgcgacgtgcgcctgttcgaccgcatgggttcggcatgggccgctcatttcgccggcaagcacatcaccaagattctgaccatcgaggcgtccggcatcggcattgcgtgtgtggcggcccagcatttcggcaatgtgccggtggtgttcgccaagaaggcgcagtccatcaaccttgacggcgaccagtacaccaccacggtctattccttcaccaagcagaaggagttcccggtgatcgtggccaagaagtatctgaacgccggcgaccatgtgctgcttattgacgattttctggccaacggcaaggcgttgcgcggtctgattgacctgtgcgaggcggccggtgtcacggtcgagggcattggcatcgccgtggagaagggcttccagggcggcggtgacgcgctgcgtgccgaaggctacgatgtggattcgctggccatcgtcgagtccatgaatcccgagaccggcgaaatcacatttaggcactgagcacattgactgctcccgccagcgggagcaacagagagaagaaaagaatcatgtcagagaagaaaaccaagaattccgtatcctttgaggcgctgtcttcgctgaacgcgccagtatccttctggaagggcattccgttcggcctgcagcatgtgatggccatgttcgtggcgaacctcgccccgatcttcatcgtcgcctcggccgcgaaaatgaccccggcccaatcggccaccatcatccaggccggccttctggtggcgggcctgggcacctgcctgcaactgtacggcgcgtggctcatcggctcgcgtctgccgatggtcaccggcatctccttcacctacgtggcggccgccgtggcgatctgcgcagacaagggctatggcgcagtggccggcgcggtaatggtcggtggcctgctggaactcgtgctgggtttgacggccaagtattggcgtcggttcgtgccgcccatcgtctccgccatcgtggtcacgtcgatcggcttctcgctgctcaacgtgggtgccacgagcttcggcggcggcagcggagccaaggacttcggaagctggcagaacctgacgctcgggcttatatctttggtcgcctgcctggcgttccagctgttgatgaagggcacggccaagcagctgtccgtgctgttcggcctggtggtcggctatgtggcggccatctgcatgggcaaggtcgatttctccggtttccagaacctcgccatcgtgtccgtgccgcagttcatgccgttcaagcctgagttcgactggggttcgatcatctccatcggcctgctctacgtcgtctcctcggtcgaggtgctgggtgacaccgccgcgctgaccaaggtgggcctgaaccgtacgcccaccgaacgcgagaccgcgggcgccatcgccggcgacggcctgatctccaccgtatccggcctgttcggatgcctgccgctgacctcgttcgcacagaacatcggattggtggccatgaccaaggtcgtcaaccgcaaggtgattctctccggcggactgattctggtgctggcgagcttcgtgccggccatcgccgaggtgttcaactcgctgccgcaggcggtgctcggcggctgcacgatcatgatgttcggcaacatcattctttcgggcttccagatgatcgccgaagcgggcttcacgcagcgcaacatcacgattgcggcgctttcgctgaccatcggcatcggcttcacccaggtgagcgacatcttcgcgcagttcccggcactgttccaacaaatcttcgcctcgaactgcatcgccgtgtcgttcgtggtggccgtaatcctgaacgccgtgctgcccagcgaggagcacttcctctccgcgcccaaggaggcaccggccgcggacgccgagtgataacaacgcgacatatcagctgcgcataatcacatgctgatgccctatcgtcttgcaggatgatagggcatcattgattttgagagagactacaagttgaaccatgagttcgagccggtggcgtgtcgatcaatcgacatcttcccattcgaggatgtctccgggttggcagtcgagtgccttgcagatggcgtccaatgtggtgaagcggacggctttggcacgtccgttcttcagaatggacacgttggcgggcgtgatgccaatttgttcggcgagctcgccgacgccaatcttgcgtttggccatcatgacgtcg

SEQ ID NO: 3412 - DNA, 18998 bp, Unknown
  R151_18m  MAG No. k141_38278
caagggcccgggttccggtcgtgagaccgccatccgttccctgcagtctgcgggcctcgaggttggttccatcaccgacgtcaccccgcaagcccacaacggcgttcgtcctccgaagcgtcgtcgcgtctgagcactcagcaataccaaatccatccaaaaccgcctgaccggtgagtgcaccaccgagttcaagctgaaaggataaccacagtgcttattgcacagcgtccgactcttaccgaggaatctctgaatccgcagcgctcccgcttcaccatcgagccgctcgagcctggcttcggctacacgctcggcaactcgctgcgtcgcacgctgctgagctccatcccgggtgctgccgtgacctccgtgcgtatttccggtgccctgcatgagttcaccactctgccgggcgtccaggaagacgtcaccgagatcctgctgaacatcaagggcatcgtgctcaccagcgaatatgacgagcctgtggtcatgtatctgcgcaagagcggcaagggcgaagccgtggctggggacatcaccccgcctgccggcgtcactattgccaacccggagcagcacatcgctaccctcgccgacgatggcgaactcgagatcgagttcactgtcgagcgtggccgtggctatgttcctgcccagatgaacaagcaggacaacgatgagatcggccgtattccggttgattccatctactccccggtactcaaggtgagctacaaggtcgaggccacccgtgtggaacagcgcacggacttcgacaagctcattctggacgtggagaccaagcccgccatctccccgcgtgacgcggtggcttccgccggttccaccttggtggagctcttgggcctgtgccgtgcgctcaacgcccaggctgaaggcgtcgaggtcggtccggccccggtggccgaggagaccaaccccgagatggccgttccgatcgaggacctcaacctgacgcagcgttcttacaactgcctcaagcgcgagggcatccacaccatcggtgagcttgtctcccacaccgagcaggacctgctcgacatccgcaatttcggtatgaagtcaatcgatgaggtcaaggagaagctgcagaccctgggcctgagcctcaagtcctcgccgatggccttcgataccaataatctcgaaggtggtacgttcttctcgccggaagacgagtgatctgcctctttgaccaatcgttcgttcactaggcaagcggatgttcgggcatatgcccacctgcttgcctgaagaacggacatataaggagtaaacccaatgcctacacccaagaagggcccgcgtctggcttccagccccgcacacgagcgcctcatgctggcaaacatggcgaccagcctgttccagaacggccgcatcaccaccacgctgccgaaggccaagcgccttcgtccgctggccgagcgcctgatcaccttcgccaagcgcggtgatctgcactcccgtcgtcgcgtgatgcgcgtcatccgcaacaagtccgtggtgcacattctgttcacccagattgccgagcagatggagcagcgtgaaggtggctacacccgtatcgtcaagatcgccccgcgcgttggcgatgccgctccggccgctgtgatcgagctcgtcaccgagccggttgccaagaaggctgttgtgaaggaagctgaagccgccgccaaggttgccgaagaagaggctccggccgttgaggctgaggccgctgaggctccggtcgaggagaccgccgccgctgaggctgaggctcccgctgaggaagccgctgacgccgagaaggccgagtgagctgaatagcgtttcgccaagctagctgaaagggctggaatccgtttgggttccagcccttttgcgttgtttcatagaaactacaacgtacgtacggctcgaatggcctcggctcttgcggccagctgatcatcgacggggtatgcgatatgctccaaagtcaggccctgcggcgcaatcggcccgcttgagccttcacgcactggctcggccattttgccggcaaaccattccagagatttgcgtcccgaaccaactttgatgcatgagccgaccaaggagcgcaccatattgcgggcaaaggcgtccgccacaatcgtgaacaccgccagtccggactccagcgacggagtccgatatgcttcatgcgatgccatcgcatccggcaccaggggagtgatcggcacccgccgccaataggcggtcttgacttcgcggatcgtagtgcctcccggattcggagtggcgaaggaaccaaaatcgtgcaggccgatggtcaatgaggctgcgcggttcataagctccagatccagcgattcatccacggtaagcacgcatccacgcaggcgcgggtcgatctcggacgaacgatcggcgacccgatacacataagtgcgctccaatgcggagaacctggcatcgaaaccggccggtgccacggcaatgccatgaatgacgatgtccgaaggcagcacggccttgagtctgcgagtcagcgcctcggtgaccggaatggtcatgtgacctacgcagcgattcagtacctcatcggatacatccaaatgcgccacttggtgggaggcgtgcacaccggtgtcggtgcgcccagccaccgtcagacgcaacggttcggccgcatcatcggccggcacccgcagcaccttgtgcagcgcatcttcaatggtgccttgcaccgtacgcagattgggctgtttggcccagccatagaatccgccgccgtcgtaggccaagtcaatgcgcagtcgtgtcatagccattcattgtaacgagtgcggtcggcgagatgcgcgcggtcggcgagacgagtgcggtcggcgaagtgacctgcctgtaacattctcgcgcgtttgctgaaacggggccgccttaggttgtaaccatcaaacccggttacggcttgcggcgtcagcgtgcgctcgaaacgcctaaccgcttgaggccacagaagccgccacagcaaggagcaggcacgatgatcgaatccgcagcacgcagactggcccatgaactggtaaaccgtcgcgaggcgatcaaccgcgagctgtcccgcaacggcgtacgcttcggcatctacaagaacggcgaataccatgaccggctcttcccgtacgatcccgtgccgcgcattatcgaatccgacgaatacgacgaattggagaagggcctgaagcagcgcgtcaacgccctgaacgcctatctgaaggacatctactccgacaaggccatcatccatgacggcgtcgtgccggaggaatacgtatacacctcggccggctacttcccgcaggtcaacggcgtgacccctcccggcggcatcttcgcgcacatcgccggcgaagacctggtccagggtgaagatggccgctggtgggtgctggaagacaacctgcgcatcccctcgggcgccagctacccgctgttcgtgcgcgacatcgagcgccgcatctccccgcgcctgttccgcgacgtgcacatccgcgacaatcgcgaatacccgcgcctactgcgcaaggccatggactttgtgtccactgagggcatcgccgtggtactgacccccggccgctacaattccgcgttcttcgagcacgcctatctggcggagaaaaccggcgccgcactggccttccccgaagacctcgaagtggtggacaacaaggtctacttcctcgactacgccggcaaacgccaccgtgtgggcgtggtctaccgccgtctgtccgacgaattcctcgatccgtttgccttcaatcctgattcggtgatcggtgtgcccggtatcctgtccgcctaccgcgcgggcaacgtggccatcgtcaacgcgccgggcaacggcgcggccgatgacaaggccatctactacttcgtgccgcagatgatcaagtactatctcggcgaggaaccgattctcaacaacgcgcccacgtatatgccgatgttcgaggccgaccgtaaggaagtcctgaatcgtatgggcgagctggtcatcaaggatgtggccgaagccggtggttacggcgtggtgttcggttcgtcgctggatgctgccgcacgtgaggagcttgccaaccggatcaaggaggagcctcgtcgattcatcgcccaagaggtgattcagttccgcgatatcgatgtggtggacccgaagaccggtgagatgtcgccgcgcaaatgcgatttgcgtgcctttgtggtcaccggcaaaaacacgcacgtgtggtattcgggcttgactcgatactcgtcggtgcccggccagatgatcgtcaactcgtcgcagggtggcggattcaaggatacgtgggtgttggcacccgaatccggcgtggagcatgaatacggtgctgaagtgcaggtggcgaacctgctgagccagtcccgccgccactcgttgtctctggtcaccgcttccaaggcagacaacctgtattggctgggtcggtacaccgagcgcgccttcaccacgctgaaccagttcttcccgttctacgatcgtgtgatggacaccgatgtggacgccttccgtccgttcgctcacgcactcgacctgcccgaagatttcgaggacttcgacgggttcgtgaacagcttcctgtacgacgggtccaaccctgattcggtgcggtcggccgtaacctccgcattcaacaacgccgtgattctgcgcccggaattgagctcgcgtctgttgcagtacgtggagttggcgatgaccaatatcaccgatgccgccaaatacgcggccgacgccgaggacatctacaagcagcgcgatattaccgatgacatgctcgccttctggggcggcatcgagaattcgccggtcgaccccacgctgaaggcgttcatcttcatcggcaagtatcttgagcgcatcgacctgtacacgcgcttcggcctgacgatggaggagatggaagccccgcttaggaagctcgcctcctactcgatgatcctcgacggcatgccgttgcctagttgcttcgccgatgggctgagctggctggtcggtcagctgccgtctcgcgggtatcaggaagtcgccgacctgctgaagaagtaccttgacgattattccggccgtgtcagcgccctggccatcaaagacatgggctcactgagctccatgaacatggatgccaagcgcccctaacccgacgttcgccctgacgggttcaaatgctatggtggtatggcgaaaaaccgtgcgcccgagtgccggccgatgcgtatcggcgaattgccggaatatatgcgtggactgtgagcgcgcggaccatacctcagccatggctgtagtgtcgttatcccgagaatgtgccggttgccggctcgtgtgtaagtgcaggagacgttgtgaaaaaactcgtgttcgactatgagatgaagctgtccttcagcgcaccggtcaccgatcacaggttccagcttcgctgtattcccgccactggccctcgccaacaggtgattgacgtggaagtgaagattcagcccgaaaccgaactcgaaaccaccatcgactcctttggctccgtggtgatgaccggattcatccccgagccgcacgacatattcagctattcggtgaccggcatcgccttcgtggacaatgcgcatatccataaggaagcctataaaccgctgtaccgattcaattcagcgctcaccattcccggcccgaacgtggaggcgatgatcgacgtatgccgcgaacgcttggctgcgttgcctgccgacgccactccggtgcagcaggccgccgaagtgatggatgaggtctacaaggcgtttgtgtatacgcccggttccaccacgattcgcaccaccgccgaacaggccttggcccagcgcaagggcgtatgccaggattatgcccatgtaatgctgtccgtgtgccggcatgtgggattgaccgcgcgctacattgccggtttgcttgggggagagggcgcgacccacgcttgggtcgaggtgtatcaggatggccgatgggtcggactggatcccacgcataaccgattggtggacgacagctacatcaccatcgcccacggccgcgattaccgcgactgcatgctcgacatcggcatcttctccggctacaacgtccagcagacccaatgggtcaatgcctccgtccacgaacaggtggcgtaaacaaaatttcaagccccctctgatgagctgagccgtgaagaaaacgccggaggcgtttttaggcgaaggcgaatgacagtgagcaaataaaatggcagctggaaagctgtccttaaattgcgttcgagctgtcgagcgtagcgagactgagagagaccgctcaatgcagagtggtcccgtcaccgcttctaccaccaccaatattcggattttcgtcgttgcaacattcggattttggtagttgagaaattcggattattgcgatggcggacgtgaaacaacgggaggtgcgcggaatggccgattctctggcgagcgacatcaagccgaaagcctatcgccctcgtatcgtggatgagtggcaactcgctccagctatatgggatgaagtccgtcatcgcgtcgacgatgattccgcgaataaaggtcagtggattctgaccggttcatccactcctctcaatgagaatcggccgaaccatagtggtgcgggacgaatcggacgtatccgtatgaatcctctgactttatatgagtccggactctcgacaggtgcggtaagtctcagtggactgtttgaacataagttcgccgctgcaaaatcagagataagtacacaaatgttgttggatgccgtatgccgaggtggatggccggaggcggtggctctgcctgtatctgacgcacagattctgattcgggaatacatgcgactcacgctgactgagagtgtgcccaggcaaggcaaggatcctgatgtggctcgtcgtctgctggattcgcttgcgcgcaatatcagtcaagctgtgacattcaaaaccttacgtaaggatatgtacggtactgaagaaaaccttgacgatttcatttcggagagaacggtatccgggtatacggccatgttcgagaacatgttcgtcatcgatccgataaagggctgggtcccgccggcacgggatccaaagcgactccagaccaaggcgcgtcggtattttgccgatccttccattgcggccgcaatgttgggcatgagtcctgccgctcttatcggcgattggcagacttttgggtttctgtttgagaatctatgcatccgtgatctgttggtgtatgcgagatctctcctcgatattgggatagaaccggttcggtattatcgtgacgattccggtctggagtgtgatgccattattgaattgtccgatggacggtggggcggcatcgaaattaagtccagtgaggataaagtccctgaggcatcggcaaatctatgcagactgaaagataagctgctgagaaatccgagtgcgcgaacccgtgaaccggagttcttggcggtgttggtgggggtcggcgagttcgcgtatcaacgcgatgatggagtgtatgtaattcctgtcggagtgcttggcgcgtaaacgcaatgccagcgcttcgggcgaattccgggattgtgatctgacatgtctcaagcggcatacactcgagacttgctcagcgaaactccgatttgccaggtcggcagaatgtggcataatgaacaagttgccattttggcagcatggataagtgtccgagcggtctaaggagcacgcctcgaaagcgtgtgaggtgaaagcctccgcgagttcgaatctcgccttatccgcctttagggttccggggtttgtcccggaaccctttttgtttttgatgcgaacgtccgtattcggggttataggccaaaatgtatgtccggcggtctagtcgttcgactgccattcgaccctggtgtggaactcgttccagtcgatgccggtgccgtgtctcatgggaatgccgaacgtctcgtgcatgctctgcgggcttctctcccatgcccgccggtagaggcgctcgagtcgttcgtcggtcatcgcgttggccgcgagccacgcgtcgctttcgggccgttccgtgtgctggtggcaccaccagcagatcgccttcagccgtctgaccagccgcagtccgcggtggcggcgcggcatgtcgcgcaggcgcgcgttccatgattcgacgaggttgttcgtggacggcactgggccggctgccgcgagcccctcgtcgaggaacatgaacggttggccctcccggatgcgcctgcggatcatgcgccgcgccttgacgagcctttggtgcatgtcgttcacgccatgaccgacgtgcaacgaatgtccggcacgttcgacccgcctacggacgacggcgaatacgccgtcatcgcaggcggggcaccggtgagcgagatgcgcgactacgcgatggacgtgaacgcgtatacgcacggccgtgggcgcttctccgcctcgttcggcggctaccggccctgccacgacgaacggcgcgtgatcgaggaggccgcgtacgatccggaagccaatctggagaacacgtccgattctgtgttctgcgcctacggcgccggctacccggtcaagtggtacaaagtccccgaattcgcgcacgtggagtacgtgacggcgtgaggggccatctgactgtcgcggatatgcgtccggcatatcgggaccgtgccggtggatgtcgattgtaatcgacacctcatcccgatgggatacgaagtgtccgggtatgcctgatacctcgtgcctcatcggaatgagacagaatgaggcaagtgacggattcgggatatccgtccgagttcattgtgaaccattggaataaactcgttttgagtccgtctgcatgtcctgtgttgacaacgtcttgggtcgtgtgtattatgaatacatcagaacataaacgtttaggacttcaatgatgaaacgacacgacgttactatcaccgatatcgcaaagcggatgggactgtccgtttatacggtttctcgcgctcttaacggtctcagcggtgtatccgagagcacccgtgcatcggtgcgcgaaacagccaacgaggtgggctacatccccaacgtcaatgcgcgtgacctgcgcacgggcacgcaccggttcatcaccctgctcaccgcgggaatgtcgaactcctattatctcgatctgatcgacggcatcgagagcgtcctgcaggacaagaaggagagcctgttcattgccgatatggccgtcaacggccggtacagcaaggagaacgaggcgtatctgttgcgtcaggtcgtggagaaccgtcctggcggcatcatctccaccttgggactcagcgaatacagcaggaaccagctgaagaactggaacattcccgtcgtattcgtcgattccactcccggatacggtgatgatgaggaaataaaagatggtttctcgtatgtagccaccgacaacgtggatgccgccgccaagcttgggcgtcatctgaaactccatcatttccatcgttggctgcttgccatctatccggacacctggaacagcaggttcgctcgcgagagcggcctgagggccgccgccgaggagtgtggggcggagattcgcgtgctggaatgcggtaacaacgatgtggaagcgtgcaccgaagtcatccgttttcttgaccagaacgattattatccggatgtgatcatcgccggcaacaatcccatcctgttgggcgtcatgtcggctcttaatcggaaatccgtcgacattcccggggatatggcgctggtcgcgttcgatgacttcgcctggtcggacctggtatcgccgaagataacacttgtcgccgaagacagccgattcatcggtgccaaggcggcgaactacctgcttggacagatggaaggaaaggaggaggtgaataaaaacccggatggggcgacgatgaggccgaatcccatccacgacatgatcgagacatccctgaagatcagggagtcatgcggatgcggtgggcaataggccgcatccgaacgcaagacagctatttccaatggagaaaacaaccatgaacatcaagaagatcgcttccgccgcttccaccctgctcgcagcgtcgctgctgctgtccggctgcagcgcggtgagtaatggcgacaacgatgccgccgaggtctccaagcccacggaaatcaagagcatcggcctgatggtgcaggatatgtccaacccgttcttcaccgccatggacaaagaagccaaggctcaagccaagaagatcggtgcaacgctcaatgtccaggacgcccagctcgatttggccacccaggacaaccagatctcctcgttcattcagcagaaggtcgatctgatcatcgtctccgccgtcgatgagagtggtttgaagcccgcaatcgagcgtgccaaggccgccggcatcatcgtggtcgccgtggacactcctgcgaagggcgctgatgcggtcgtaacgaccgatggcgtgcaggcgggtgaactgtcgtgctcttacctggccgagcagctcggcggcaagggcaacatccttatcgtggacggaaccccgatccagaccatcaccgaccgtatcaagggttgcaaggcggccctggagaaggactatcccgacatcaaggtcgtcggacagcaatcctccaagaacgatcgtgccaccggcctgtccgtgaccaccgacatgctcaccgccaataaggacgtgcagggcatcttcggtatgaacgatccgtccgctctgggcgccgcgctcgccgtcgagcaggccggcaggaccgatgaaatcatcgtgaccggcatcgacggaagtcccgaaggcgtcgacgagctgaagcgcgccggctccccgttcgtggggacctccacgcagaaccccggcgagatggtcaagcaggccgtcgcctacgcccagaaggtcgccaagggcgatacccccaagaagtccacgattctcattccgagtgtcatggtcactcgtgagaacgtcaacgattacaagggatggtgagcatgcctcagttgctgcccctattgcagctcgagaacattgtcaagagcttttccggagtggtcgtactcgacaacattaacctaaacctttatgaacatgaggtgcttgccctcatgggtgagaacggtgccggaaaatcgacgatgatgaacatcctttcgggcaatctgaaaagggactccggacgcattctcattgatggcaaagaggtagacgtctccacgccgaagcaggccgacgacctcggcatcgccatcatccatcaggaactcaatgtggtgcccaccatgacggtggcgcagaacctcgcactcggcaacgaaccgttgcagaagtcggggctgctggacaagaagcgcatgcgggaggacgccgtacgtaaactcgatgtcatcaaggcggacatcgacccggacacattcctcggtgatctgggcaccggtgagcagcagatggtcgaaatcgccaaggccatcgcgcaggacgcgaggatcctcatcctcgacgaacccacggcatcgctgtcccgagccgaatcggagcacctcttcacgctggtgaacatgctgcgggagaagggcacgggcctgatttacatctcccaccgcatggaggaggtgtggcggctcgccgacagaatcaccgtgctcagggacgggcatacggtgatgaccaccgacatcgagcatgccgaccagaatgacatcgtcgccaagatggtgggacgcaaagtcgagaaactttacgaccatggcaagcgtcatccgggggagggcgtgctcgagatcaagaatctcaggctttcgccggactctccgccggtatccttcaccgtgcatgcgggcgaggtgctgggcatgtccgggctggtgggcgccggcagaaccgaaatcgccagagcgatcatcggagcagacaagcatgattccggtgagatccggctccgtggcaaggcggtgtcgttcaaatccccgaaggccgccatcggtcatggggtcgcgtatcttcccgaaagcaggaaaacgcagagcatcttccctgtcagaagcgtcgaagacaacatctccgtctcttcgctgggcgaatacgagaggctgggtctgcttcagaagcaccgcatccgcaaggatgtgcaggaatcgatgaaactggtcaacatcgcgcaacgtctgttgaccacttccatcatcaacctgtccggcggcaaccaacagaaggccgtgttcgcccgatggatgatgaagaactccgacgtgctgattcttgacgagccgacccgtggcgtcgacgttggcgcgaagcaggagatctacgagctgatcagttcccaggcagcgcaaggcaaggcgattctcgtaatctcctccgatctgcccgaggtgctgggcatcagcgacagaatcctcgttgtcaggcaggggggcatcgctgcctgtatccccgaggatgaagctaccgaggagaaagtcatggggtacgcaacgggcgtgctgaaggcgcaatccgaggattccgaaacgcgcgacggagcgcaacgataaagaggagcttccaatgaaagaaaagaaaaagatgaacctggcggcgacctgggagaaggtcggcatgccgttcgtattgctggtgctggtcgtattcatgctgatcaaggccccgaacttcggcacggtgagcaacctgttcaacgtggcgaggtccatctccatcagcgcgattcttgccgcgggcatgacattcgtcatcattaccaccggcatcgatctgtccgttggttcgaccatcgccgtcagcggttgcatcgccgttctggccgcccagcaggggctcaaccccctgctcgccatccttctcggcatggtgatcggtgcgctcatcggcttgatcaacggattcctgatcgcctactgcaatctcgccgcgttcatcgtcaccctcggcaccatgaccttcatgcgaggattggcatacaccatcaccggcggtctgccgatcgtagacaacggtttgaacttccgcgccctcggcaacggatacctgttccatgtgccgattccgttcatcgtgatgataatcgtttatgtagtcatgtggatcgttctcgacaaaaccaagtatggctcgcatgtctacgccgtgggcggcaatgccgaagccgcaaggcttgccggcatcaatgtcaagggcgtactgctatccgtctatgtgattgcaggactgtgcgccggtctcgccggctgcatcttcgcggcgcgtgtggtctccgcgcagccgactgccggcgacggttatgagatggatgccatcgcagcggccgtcctgggcggtacctccctgatgggcggcaagggcaagatcccgggcactctgatcggtgccatcatcttcggcgtgctcaccaccggcctcgtgctcatgaatgtcccgttcttcacccagcagcttgtcaagggcatcgtcatcatcatcgccgtgctcatcgatggtctcaaggagaactcgttctcgttcgggttcctcaaaggcataggtgccacacaagccaaggctgcgaactgaaacaggagaacgacaatgacgcacgaatatccacgattcaccatcaccaatagccaccaccatcctacaaagccacagccggtcacggtgaccgtgccggaaaaagttgaggccgatctgattctcggtaccaccgatttgggacagtcttcgccgttccagaaggtgctgggggattccgacggttcctcgacgacgttcatcggcattctggtgccgcatgacggagaggtcctgtccctacatgacccggacccgggggagacgtttgaaggaggcatcgtcgccgacgacaacacgctcgaaagcgatgcggtctgccaccttgatacgggatatttcgacattgaactatgtcgtggcaccggcaagggcgagggcgcctccaaatggggcatccgccatttcctcaccaaggacgagggattcgatctgctcaagagcgggaacaacgccattggcgggttctacggccctttcttcactccggaaaacggtctgatcaacccgcccgaacatgccatcgccgatgtccgtcttatcgagttcggccccgtcatgcgccgttacctgcttgaggggcgcatccctgatggtcttcgacctgaactgcagggcaagatcttctccatcgagttcacgttctactggaacgtcgatttcttcgatcgtgtctaccatgtggattcgtttgtgacggaggtcgatggcagaagcgtcgtgaaccgtatcacggtcggtgacgagttcgaaagcggcgaaggaaaccttgtcttcaaccgattcgacacctaccagcctgttcctttccgcggaggggacccctacgccggcttcctcaaggatgaagtgcggaacgtgctatcggagcggacggaaacgacatcaaggttcgcctatttctccactctgcttgacagggatctggagaacgctcactgggatctctactggcgtttgttctcgcgatgggaaaatgcccttacccccaaggggctcgatgagaggctcgggcatgtgcgggcgcttgcccaccgcgcagctgatgagacctcccgtccttggcagttccccgagggggcggtcgatgtgtcggcacaggaggaggagaccatcttccccgggccgtctgcctgcagcgccgaatacgacaccaataccaaccggtgcatgatctggatcacctcggaggcgtcctcggcgttccagatcgtgcagaggcctcaatccggctgggtcaactggggtacgaacggcgaaaacgaatgcccggcattgcctgtcggagtcaacatcaggacgatttatggtccgtatgggaacgggtggcgtgatcgcgccgatgagtcccgattcggtgtcgtgaacgttgaacgataggctctgagcacccgtatgccggtggttccgacggttttcctcctctttcccgtcggggccaccggcatcgtcattattcggctcctgattcccgctcctcatcgaactgcaagatatccaatgtaccgacgacgattatgccaagcatgccgttgacatacttatcgaccgcatcgaaggatactcaggcccggcccgtacgtacaccaccgatttcacattggtggaacgtgcctcaactcgacttgcccactagcctccaacaagttcgcatcggcttcgtgaggagtgtgtgtctactcgaacaatgcggcgtcagtcgctgggtagccaagttggaacgcggtgtaggcgtgcttggcggccagtgcggcgaggatgagcagcgtatcgctctcggtggaagatttcgattcggtcacggccttgatctgcgcgcgggcgcagtccatttcgatggcggcggcggtcggtacggtctggccgcttgccttgtcggcgatggtggtggggttggccagtagttggtcgatggcatagaccttttggcgggggtcgctctggccggaagaactggactgtgcgccggaatcatcaaaattgccgttcgccagcgacaccagctgctgcccggcggtcttatgcatatcgctcaatgccaacgtagccccagcggtctgtcctcgtgcggccaagacctcgatagcgaatccggcgcgatcctcggccacggccatcgcatccaataccggtcggtcaacgttggcggacgtgacgccatcaagacgcgccggcgtcacctcaggcgcggactgcccgaatttatcggccagaaaagccagccattgcttggtctgcgcgtcacgtaacgttccctcggcaaaacgacccgaacaatacccggcaacgtcaatccaagtcaggggagcggccaggccggtggcatactgctctaataacggcgtgccttcagccggatgggtggcgtagtccgccaacgtcatcgctttctcgcaagggctcatttgagcttccgcctcggcccgtccggccagtcgcggcatcgaacacgccgaaagcgaacacagcatcgcgctcgcgcatagtgcggatgccaagcgccgggtaaaccgtcctgaagagaagcgtgtctgcatggaaacctacactaatagctaactgtgaccactcataggccatgcgccacataacttcataggaggtacggatcgatggaactggacctgacaggaatacacaagctcgccgccgagcaaggaatcgaccccggaaccctggatgatgcgctggcagaggccctgcgcctcgcctacctcaagactccgcacgccgccaggcacgcgcgtgtggagcttgacgaacgttccggcaacttcaccgtctgggccgccgacgaaatcccggtcgagcccaccgaggacgaccctcaccccgctcccaagctgggcgaggaatacgacgacaccccgcgtgacttcggccgtctcgccgccgccactgcacgccaggtcatcacccagctgttccgccgcgccgaagatgagaaggtgttcggcgcgttctccggtcagaagggcaagctcatcaccggcatcatccaacaggatgcttccgacccctccaacgtgcatgtcgcgatgggcgatgtcgaagccattctgcctcgccgtgagcaggtgcccggcgaacgttaccgccacggcgaacgcatccgcgtgtacgtggtgaacgtggcccgtggcatcaagggcccggaaatcgtggtgtcccgctcccacccggagctggtccgcaagctgttcgagcgtgaagtgccggaactggtctccggtgccgtgtccatcatggccatcgctcgtgaggccggcgcccgcaccaagatcgcggtcaaggccaacaccgatggcgtgaacccgaagggtgcgctgatcggccccggcggcgctcgcgtgcgtgccgttatggagaaccttggcccggagaagatcgacatcgtcgactactccgacgatccggccaagttcgtggcagccgcgctgtccccggctgtggccaccggcgtacaggtgatcagcgagaagaacaagaccgccatcgccttcatccacgacgaccagctatccctggccatcggcaaggaaggccagaacgcacgactggcagccaagctgaccggctggaagatcggcatcgaatccgccgaggcccatgccaagaaggtcgccgccgaaaaggccgcccaggctgcggccgaggctgctgctccggaagccgaataggccgccgggctcgaaggcgaatgatcttcagggcgcattatttcctgatacgagccgcgtcagcaatggcgcggctcgctgcgtctacgctatccagcgctatgagtatgcttgattggcgtatgtgggctggtgcagtgtgcgcgaaatcgcccacaccagagacgaggtaacacgatcatggtcgcacgatgagacagggtaggcttgccgtcatcaccaactgaccacgcccatgcacgcgcgtggtcacagaataggagtaattagtggcgaaaccacgcgtatacgaactggctaaggttttgaatgtcgatagcaaaaccgtgcttgagaagcttaaggacatgggagaattcgtcaagtccgcttcttctacgattgaaccgccggtagcccggcgtctgaaggcagagttcgccaaggacaacgccaagggcgattccaagcccgcatcttccgtacaaaagcctgctgccaagcccgtgcagcagcgtcgcccggccgcaccttcggccccggcttccacttcatcttccgcaccgactccggccgctcccgcacgtcaggcatcgcccgcctcggcacatcagcaggctccgactccgggcgcaccgacaccgcgtccgcagggcggcgcacgccccggcatgccgacccccggccgccacggtcagcacgacaaccgtgagaatggtcgcgataatcgcgaaggccgcgagaacggtcgtcagagtcgcccgaacgatcgccgtaacaacgatcgtcgtaacaaccagggccgtccgaacaatggccagccggggcagcatcagaacaaccgcgacaatgcttcggctccgcgcccgcacgctcagggcggcgccggtgccaatggcggcaatgccgcttcaaacgcgattccgcgcccgcacgctcagggcccgcgcccgggcaacaacccgttctcccgcaagcagggtatgcacaccccgacgccgggtgatattccgcgtccgcatccgatggctcgtccgactgctgatagcggtcgtggcggtcgtccgggccgtcccggccaaggccaggggcaaggccgcggcttccgtggcggtcgtccaggccaaggtggtcagggcggtcctcgtcccggccagtggggccacaaccgtccgggtcagggcggcggctcccagggtgccggtcagggcggcgcacgcggcggcttccgtgggggccaaggcggcggcaataacttccagggcggcggcgcaccgagcaacggtcccgcacgtggcggcggtcgcggcggtcgcggcggtgccgcaggtgcattcggacgtcagggcggtaagtcctcgaaggcccgtaagaaccgcctggcaaagcgccatgagtatgaggagctgaaggcaccgaccatcggcggcgttcgcatccccaacggcaacggtcagaccatccgtctgcgtcagggcgcttccctggccgatctggcggagaagatcaacgtcaaccaggccgcgctggtcaccgtgctcttccacctgggtcagatggctaccgccacccagtccttggatgaggagaccttccagattctgggcgaagagatcggctggaacatccagctcgtctccgcagaagag

SEQ ID NO: 3413 - DNA, 10654 bp, Unknown
  R151_18m  MAG No. k141_38489
aacatggcatcgcactccaagaagaccaaggccccgacgacgtgcgcccgacgcccgacctgcccgaccgcgacccgcgcaacggtctgacggacacttggcgcgtggtgccgggcgaccgtctcgtgacgttcgagcccggcggtctgccgaagtcatggcgaatctccgccgtgaggcgcaacgctgccgacctgagtctggtcatcaacgaccctgtgaccggcgaccccgtcgaacccgatctcatggcccttctgagggatggctgcttcgacttcgacaggagccgcgagacgccggaatggcagggcttctggaggtcggagcacggcatggtggaccgcgacgcatcggggctcgtccgcagatggacgccggggcacgggttgggcgcggagctggtgtcgcccgccaaacgcggggcgtggttcgatgtgcccgacgccagcttggcgaaactcgccgggcaggagtgccgggtatgatgaaaccgacccgcggcaaagggcaatgcaagctgaggccgtgggtcgctccacccccatagccaattgtcatatacgggtttggctacctttggcaggctccggtccaaaccgctgattagcatggcttcaaaccgttgaaataaagccattcctgaagtccggtcaaatcactgtcgcacagcgtacattatcggttaatagtatgtggtgattttagccgaaccagtagtatctagctgcggattagcctcgccgcagagaatcggctacttcgcaacatcatccttattccggtgagaagcaacgcccaaacgcttgtccatcgcggattccgaagcgttgcgcgcctgcagatacatggcgacaagttccaacagcaccagcacgaatatgatgattgcaccgggcaattgcgcgtggtcgtagaacgcgagcatgcgagcatccatcaaatccgctgtaaacgtcaacacgggaaacggaatcagcgccgccgcaaacgacatgaaatgcgttttcaccatcgaccagtcgaccggatcgaccggcggtcgccggcgtttcggcgtgaacagatggcctcggctgaccgttatagtgatgatggacacagcaaagatgacggcgaccatccacagaacgcccggcaacaatccgacaacaatcccgttcacccggtcctccaatcagtcataataatcaccgcaacatataaaaacataagatggcaggcaacaaaagcaacacatacaacaaagcgacctgccgaccaaagccggcaagtcgccaacaaccatacatgtatcaggcggttgcgcgttgcaagcgctgtgcctcgagcttcttgcgcatcctcatggcagtcagttcatcaatcggacggcccgtggcaatcgtcagcggcttagcctcaagatcaatatattcttcctgttccaaggccgtctcaatctggtgccacaacgaacccaccgacacggcgaacactgccttaccgctttgcaacagttcgagcatctgttcgctggttgtgcattcatgtacgttttgaccatcgcacatgatggtcacattggccagctgatcggtgctgcgttgagtcaagaatccgatagccgccgtcacgttctgcagattcacaccggcatcaagcagcttcttggatacagcgagaatcaccacatccttaaacgagtataatcgtcgtgaaccagagccatgagacggtgtgatggacggctcaacaatctgcttgcgtgcccaataatcgagctgtcggtacgtgatgccggccaccttggaggccacagtgccacggtagccgcgcttgatctcctcagtatcgacgttggagaacaactccccctgaatcgcgtcagcgttcagattctgacggtcctcaagcgaaacatgaagatgcagcccggtctgtcccatggcactcccctaactcatgcgtgtctcgcatatgactcacactggtgtaatcacatgattgcaatttctgcaatcagtctaaccccgtgctgggtgtggactattgggaaataatggcggatttcgtgaagaacacgaggcggaatttaccgatcatgatttcgtcgccgttcttcagcgtcgcctgatcaacacgctgacggttcacgtaggtgccgttcagacttcctgcgtcaaccacaaagaactgaccgttgaccctgcggaacacggcatgctgacgggatacggtggagtcgtcgagcagaatatcagctcgcggatcacggccgacggtgatttcatcctcgtcaagcaagtaacgagaacctgagaccgctcccctggcggaaatcagcaatgccgttccctcggacaatctggtgatggtgtccagatcctcttgagtcagcggtcgatcgccggtggtggtaatgggcagtacattaatcgcgggcaggccgataatggtggtttcgcctgcgctaggaatcgggttggtcataatcccctattctaccgtctttgcatactggttttgcgtagcttcgcgtacttcgtcgataatgatgctgtcagaaggctgcacgttgacgttggatccgtatttcacctggagctgagcgcccacaccgccggcgatatcgactgcgttggacagctcctgcggattgccgatggccttcaccgtgtatgtgggcttgatggtggtgccatccacgatcaagccttcctcggcgtcctgaatgtaggtggaggtgatgacgcgcacgttattgatggcgattacctcggcgccggcattgcggagttcctcgatgaggttgaacatgattgaggcgtccactttagtcgtcgagcctcgtccgatccggatggtcacgccttggcccttcgccgggagtctgccggagatcaagccgctggtctcttcgttttgcttggcgatcttacgcgcctgctcctgctcgttagccgccgatttcagtgagttgagctggctgttcaactgggttttacgctgctcgagattcgagatttgcgtattcgactcgttcagcagccttaccagttcgctctcgtccatcgtttcgtacgtggatttagtgttattgatctggctcatgtaggcgaaacccagcagcgcgcacatcagagcaatgagaatcgaggatagtagccgtgatttgttgctggcccggttgagatccttccggggcttcttgcgcaccgtggggaacgacccggtttccatccggtcgttgaccttgtcttgtgcatgctggtcgcgcattttctccagcatgttgtctgattgtgctttacgtgccatacgtcagtacccttgtcagcctcggaagatgaagcgtctgatcgcagacacgttggagaagatgcggatgccgagtacgacgatgacggccgtctgcagctgcgaaccgacgccgagctggttgccgaggaacacgagcagtgttgccgtcaccacgttggcgaggaaggagatcacgaacacgcggtcggagaagctgcgctcgaaataggctcgcgcggcacccagcagggcgtcaagagcagcgaccaccataatcggcagatatggctgcacgatgatcggaatgtccggcttgacgaacacgccgatgacgacgccgatgatcagtcccagaacggctgccattattcattcctttccgcgtacttcacttcgccagtgactgctgcctcaagtgtaatcgaattggatttgctcacctgcgggtagataccggcttccttgaaggaatcgtaaagacttgcaagtctcttcccccccatcgcttcggccaaggcgctcttatcgcctatggcttcaatggtataggggctttgtatcgcggtcatgccgatgagaatatgcccgccggccttgcgtatcgaggtttgcgcgccgagcctattaccgttgatggcaatggcttcggctccgttttgaaacatcagggagaccagttgttgcagatccagatcggtgatgactcggatgttcgtggaggtgccgattctcgtcgaggaggattgatccgactggcttgccgcgattggatcggccagcgtcatggtgattccttcgccttcgaccaccgtggcaccattgaccatttcgtcttggataagcgtgtcgcttttcacgctgccggagattttcttggactgttcgtcaacttgggatcgcaaattattgacgtccgtggtgagttcgtctatctgcgagttgcgattctccaattgcgtggccaaagtctgccgtacctgcttacgcggatcggattgcaactgttgcacgaataggctgcaggcaaagccaacgccgacgcagatgatgaatacgacgatgcgattaaaccagatggagaaggtcgaacgatgctcatggaccagtcgtgagtcggagaacatcggatccatcggacgattgacaagatcatcgatgagctgaagcgaatcgtcgttggttttacggcgacgtctggtgcggatggcggcggcgtcatccggggaaagcgcatgatgcgattccgcgcctcggactgagtgggagaacacggcgcggcgtcgtaccggctcattctccttgggtatggggaacgagaccggggccatggcctcaagcgccatacttctcccccagttccttgcgtagcaatccgacgccctgcttggtatagatatatccggcgagccaatacatggcgatgccccagatgccggcggccagcgcggcgatgtagagcaagtggaagaacgtactggtgcccaaatcggcgaaaataagactgacgatggaaatcatcagcagcgcggtaccagccttgcccacgaaatgcacgggcagcggaccataaccgtactgggcaagccatagcacctgaatcgccatccacagatccctcagtcccacgataatcagcatccaccatgggatgatgccggcgacgctgagggccagaatcgagcagaaaatgagcagtcggtcggcgatcggatcaagaatctgaccgatcttgctcacttggttgaatctgcgcgcgatgatgccgtcgagtccgtccgaagccgaggaaatggcgatcagggctagcgccgcaatcacctcatgcttggagatcagcacgctgatgaaaggaatcgagatgattcgcagcgcgctgatcaaattgggcacggtgaaatagatgtcacgtgcttccggactgtatctggtgttgactttctggttggtcatatcgactaacagtctacatgcgggaggcttgtagagcggtaacgatgatgccgcgtgcgccgacttcgtacaaatcatccatcagctggttgaccttggccttgggaaccatgactcgcacggcgttccactgtttgtcgtgcagcggggagatcgtcgggctttcaaagccgggggtcacggccacggcggcggcgaccttgctgatcggaatgtcatagtccatgagcacatactgatgtgcggtgagcacgccttgcagacggcgggtcagcacggccagacgcggatcctgctcgttcagacgcggcgagcgaatcaggcaggcttcggagtgcatgagcggttcggcaaacacgcgcaggccggcgttgcgcagggtggtaccggtggagaccacgtcggcgatgaggtcggccacgcccagctgcacggaggattcgaccgcaccgtccagatggatggtctcggcctggatgccgtgctcgaccagatagtcgtgtacgagcttatcgaatgtggtggccacgcgcttgccctgaatatcctccagggtggtgatcggggattcgttcggtgcggcgaaacggaaggtcgaggtaccaaagccgagcggcatgtgctcgagcgcggcggtaccggagttcttgagcagatcctggccggtgatgccgacgtcgatggcgccgcggcccacgtatacggcgatatcgagcggacgcaggtagaacaactcgatgccattgtcgggatcttgcacgaccagctggcgagggttagtgcgcagacggtagccggcctcggccagcatgttccacgcgggttcagacagcatgcccttgttgggcactgcgattctcagcatttgcgttcctctcacaggtgcttatagacgtcctcaagcgtcaggccgtgcttgatcatcatgacctggacgtggtagagcagctgactcatttcctcggcggtgcggtccgcaccctcgtattcggcggccatccaggtctcgccggcctcttcgatgatcttcttgccgatgaagtgggtgcccttgtcgagctcgtcgacggtcagagagccttcggggcgggtctgggccttttcggacagttcggcgaacagggattcaaacgtcttcatgtgattcagattcttttcttgcggttatggatgaaaggtggattgcggttcaggcttggagctcaggccttgaacgcggcctcggccttggcgcggatgtcgtcgatggcttgggcaggattctcagcgccgtacacggcggaaccggcaacgagcacgtcggcgccggcctcggccacaatgtgcgcggtcttggggctcacaccgccatcgacttggatgcgggtcttcaagccacggcgggtaatctcatcgcgcaggcggcggaccttggccatctggttgtcgaggaacttctggccgccgaagccaggctcaacggtcatgatgaggaccatgtcgaactcgtcgaggatatcgaagatcggctcgaccggttcagccggacgcacggcgaagcaggccttgcagcccatctcgcgcagctgtcgggccagacgcacgggggcgtgggtggcacccatgtggaaggagatggaggcggcgccgagcttggcgtattcgggagcccaacggtccgggtcctcgatcatgaggtgcacgtcgaccggcagatcggtgacctgacagatgcggccgacgatcggctcgcccagggtcaggttcggcacgaaatgatggtccatgacatcgacgtggaccaggtcggcgttggcgatggccttgagatcacgttcgaggttgcagaagtcagcggacaggatgctgggtgcgattgcgatattgctcatggtttcctaccttatctgtgcaatgggacttggggtcccgtgtttcgcgctgtttcggcgctgtttattgtggtgtcacttagtgcgcttggcctgcttcttctggcgaagctgttcctcttcgatgctctggcgttcgagctcgtcggcggtgaccgccgcaagcccgcgcgcctgcgccttggggtccggaccgtactggtagagcacgacgaacaggatgcagccgagcacgaagacgatgatcgcggtccacacgttggtcctcaggcccaggatcaccgtggagtagttgatgcgcacgttctcgatccaggtgcggcccaggccgtaccacatcaggtacatggcgaactgctggccggccttgagccggtcggcgagcttgtggccgaggtagatgatgagcgcggcgccgatgaggttccagatcatctcgtagaggaacgtggggtggaacagcgtggttctgtagtccgggcattgcgcgccggaatagcagatttcggatttgccgatggcgtccgcgtcgttgagcttcaggccccacggcaacgtggtgggccagccgtagagttcctggttgaaccagttgccgagtcggccgatggcctgggccacgggcagcgcgggggcgatggcatcggcgaagatcgcgaacggatagtgcttgtggcggcaccacaggaacgccaccaaggtgccgacggagatgccgccgaagatggccatgccgccttcccacaccttgaggatgttgaccaagttgccggtgggcgggaagtagtcggccggcgtggtgatgcagtggtagaggcgcgcgcccaccagcgcgcagggcacggtgatgagcgtggtgtcgagaatctggtcgaaggtgccgccgtaccgcttccaacgtgtggtgaggatccatacggccacgcagatgccgatcaggatgcagatcgcgtacatgtggatagtgaacgggccgatctcgaacttggagaaggtcggcgagggaatataagccagattcatcgtgcctctacttgctggtgctcatggtgtgtccacgcgcgggttgtgcttgatgctctgtgactaccctaccgtgtcacggcacaatccgcgtgaggcgcaccgggtgttcaccgggcgttgtggatgccttcggccagttcctcgctcttggcggcgagcagcttcaagccttccttcgggtcgcgtgcggtcttgttgtcgtccgcgagcagggtgtgcacgagcgcggagccgacgatgacgccgtccgcgtaggagccgaccttggcgccctgttcggcggtggacacgccgatgcccacgcacacgttctcggcaccggcctgacgggtgcgctccacgagcagttcgggcgaggcgtcgatggtggcgcgttcgccggtgacgcccatgcgggcggccgcgtacacgaagccgcgcgcgttgcgggccacggtttcgaggcgctcggtggacgagtccggggagaccaggaagatgcggtcgagtccgtgacggtcggaggcttcgatccactcccccgcctcgtccgggatgaggtccggggtgatgaggccggcgccgccggcgttctcgaagtcgcgggcgaaacgctcgacgccgtagtggtacacgaggttccagtagctcatgatgagcggcacgccgccggtgttggccacggtttcgacggcctcgaacacgcgcttgatggtctcgccgttgttcagggcgatggaggcggcagcctggatgaccgggccgtccatgaccgggtcggagtacggcaggccgatttccacggcgtcgacgccgtgctcgaccatcgttttgaaggcgtcaagcgagacgtctgggttggggaagccatagggcaggtagccgatgaaggcgggcttgttctcggccttgaacttggtgaacatagcgcccgacttgctgggcttgtggctgatgcccagcggctggccggacggcgtggttgcttcgttggtcataatcaaaaatctcctcttcttgttcaggcgacggtgtcgccgtgggcaccggccacatcaagcgcggcggcctgatcgtcggtcaggtagccaaaccacttgccggcggtggccatgtccttgtcgcctcggccggagatgttcacgatcatcacggccttgttatagcccttggccttcagatccgcggcggccttgtacgcgccggccacggcgtgcgagctttcgatggcggggatgatgccctcgctctggcttaggtcgcggaaggcgttcatggcctcctcatcggtggcccagctgtagttcacgcggccgatgtccttgagccatgcgtgctctggccccacggaagcgtagtcaaggcctgcagagatcgagtaggtatcgagcgtctggccttcatcggtttccagcaggtagctcttggcaccctggaacatgccgagctggccggtgccgggggcgaagcggatagcgtgctggccggattcggggccgttgccgccggcttcgtagccgtagaggttcacgcggtcatcgtccaggaaggcgttcatcacgccgatggcgttggagccgccgcccacgcaagcgcaaatcgcgtccggatggtcgatgccgtaccagtcctgaagctgctgcttggcttcctcgccgatgatcttctggaagtcgcgcaccatggccgggaacgggtgcgggcccgcgacggtgccgagcaggtagtgcgtgtccttgacgttggtgacccagtcacgcagggcctcgttgatggcgtccttcagaatcttgtcgccgagggtcacctcgaccacttcggcgccgagcatacgcatgcgggccacgttcagggcctggcggcgggcgtcgatctggcccatgtagatgcggcacttgaggccaagcatggcgcacacggtggcggtggccacgccgtgctggccggcaccggtttcggcgatcacgcgtgtcttgcccatgcgcttgacgagcaaggcctgtccgagcgcgttgttgatcttgtgcgcaccggtgtggttcaaatcctctcgcttgaggaagatacgggcgtcgaggccggtcttctccttgacgagtgcggcaaagcgcggggcttcggtcagcgggctcgggcggcccacgtaacgctgctggagcgtcatgaattccttgtggaattcggggtcggccttggcttgcgtgtagacgcgctcaagctcgtcgagggcggtgatgagggcctcgggcacatagcggccgccgaactgaccccaatacggtccctgatgttcgctgagcggggttgtttcggatgctttcacttgtgctcctgcctttactagtcgttccactgcaagttcatgatcgtcggcggtggccacgccctcgccgaccagtaccgcgtccgctcccgcgcgggcgtagtcttcgacctcgaccgcgccgaatacgccggattccgccaccttgatgacgtcatcgggcagatcggccgcgagttcgttgtatttgttcacgtccaccttgaggttcttcaggttgcgc

SEQ ID NO: 3414 - DNA, 20826 bp, Unknown
  R151_18m  MAG No. k141_38764
tacgccgaccgccatcgccgtgaacgccgggcgcgctgccttccacgcgcccacaggaggcgtcgcaggcgtggcggcaggaggacgtcgcgtttcccgagtcccggacgggatcccatctccgagcgtccgccggaggccggcgaccgcagcggtttcggccattgggaggccgacagcgtgatcggcgccggatgcaacctgcacaccgaggtcgagagaaagaccaggttcctcatggccaggatcgtccccggcaagaccgccggggaaagcgtcggggcgcggccggcgatgtcctcgccgctgccggccggcgcgcgcgccggcgtcacgcacgacaacggcaccgagttcgcccgccacacgcgcctgcgcgacgagccgggcatggacacgtacttcgccgacccctacggttcccggcggcggggcggcaacgagaaccgcaacggcatcatccgccgctgcctgcccaaacgcacgatcatcgaacccggtatggcaagagagctccaggagatcgtcgacgaggccgacaaccgtcccatgcgcgtgctgggctaccggacgcccgccgaggcattcgccgacgaactgctagaattgcaggaccaacaggggtgttgcacctctaaatagacatcgggggcctcggacgcatagaccccgcgtgacaagctgcgatagtcctagacaaagggacattgcatcgcagtcgcccgccaccgttcacggtcggcgggcgactgtcgtttaaggtcactctttgtgacccatctgctcgacggcatcgagatatgcgcggatcgcctcatgcgtgccgtattcgcgaagcagacattcgtatgcgttgttatgcctatcgtcgccatcggaaagccggggcctggccatgagctggttgaggatctcctgcaacagttccttcagaaaggcgtcgatttcgtcgtcttgtcctgtctccgagagcatccagcgcagccggtccacgtagcgcgcgtcctcggcaagcttgccccgggcgatgtagatggcatagagccgtgccagcttctcgaagtcatgggatttctcgtacatggcctccagcagagtgaactatccgtggggcaggtccgcggtcaggtccggcgccttggggtcgggccaatggtccgtgtccatgccgatttcctcttcgacggagggaatgcagttgccgagtatttctccgaaatgcgtgccgtccagccaacgctggtacctgtactcttcatccaagccgatgaggtgctccaatccgagtgctgtctcccgcgcggcatcctcgccatacacccacgcgcccaatcgcctggcgccacaacggtcgaccatttccgacacctcgcacgggatgacgattttgccattgagcttcgatgaataccggttgcggtagaacaggcggaagcacacggcgcacgcatgcacgcaacgcggtgcctcgccctgtgcacacgtgcaaccgatgccggtgatcgtccgttcctgcatcctgacggccacggatgcgaccagattgtcgccatcgaccacgtccgcatgacacgtgttgcccatctcatgccagttgcgtaggccgccgcgctcgtacaagcccctgccttggcggagcagccgagtctgggccgccacacgttcctggatctccgactccgggccgtcgaactggaacagcaggctgaactcattcaccttcgtgactggaactgcaaatggcttctcgccattatcccgacctggatgccacatgaccatgcgttctatcatcccctaagaagccaaagggctcgcctatggcggctctttccatgcagcagtccgaatggcggataagttgttcgcacgaatcatgatcccatctacaggactgagaacataagaaagcttcctttcgttaggtaccggaaggaagctaaacatcagaggggcatactctgtattgcataggaaacggttgtggcaccgcccttgggcagtgccacaaccatcattcgggattcgcgaagtcacatcatgccgggaacacaatctgcgagttgacgcaggtgatgaccatggccaggattgcgttgacgatgccgccgagatacgggttgcgggtcttcgcgtagatgcctcgcgccgtcagcggagtgacgaacaaaaggaagatcgtcaggaacaggttgtcgacgatgcgcgtgtaagcggcgccgaacatgtcgttgacacccgtgaccatgaaccacgtccagccggcgccggacaccagtgcaggcacggcggcggtcacggcggcgaggaccaggatgttgacgatcttgttccggccgtacgacgtgttgtagttcatgcagttcacgaagatcgacgagatcacatagccgatcaggaagatcggcaggaccttgagcatctcgatgatcttgtaggccgggaacgggacgatgcaccagtacaggaacgcaaagttcgtcttgaagaagtactgcgcgccccacaccagcagcagggttccgccggtgacagtcaacgccagcacgatcgtcttgaacaggtcgaagaccgtggtcttgatgtcgatctcatcaagatccatgccgttcttcttggcgaagcagtgataccagacgaacgtcaccagaccggtgaacacggacgaaatggcaagcatcgcggcggagaacaacggctgtccctggcggaagaacgagccgatgtgcgtgtcgacgcccagatagtagagcgacagagtgctgacggtcgcgaacagagtcgtgacgatgaggcagccccaagcccagcgtttgctgcccggatgggctgcggcgactcgcatgacggcttcgccgcgggacgtgccgcggaacaacggcatgcgggagagccacagggcaaagaacacgacgaacaggaacatgccgaggaagccgatcgtgcttccgatcatgcgcagcgggtagatgcggttggtgctcttgagcgtggtgtccacgttgagcgcgcgggtcatgaactcgactgcgttcgtggtggacctgggctggaacagctgcgaagtgtggaagccattctccatgtagatgacgcgggccgcttccttgccgtcgatggtcttcgtataccatttgccgctcacaccgtccggcgtggaggcatcgggcgtgatgccgaagttgaggaacgacttggcgttgttgtgcttgagataatcggggttaggcagcatcttgccggtcgtcttgtcggtttccttgaaggaatactggtcgaacttgccggcgatgatgccgacgtcacggttcccgtaatagttgaagtattcgccattgttcttggacgcggcctgcgcggacgtggtcttgccgggcacatagccgaacgcctgggtttcgttgtccttgtagacggcgtcacgactgacgtacaggattgccttgatcaacggagtcttggcctcgttgtcaaggaggatggtctcatggatggtgttaccgccgcgggattggccggacacgccgatcttgtccttgtcgacgaacggaagcgtggtcgcatacttgacggtgtcgtacaggccgcgcccgttgacaagccagtcggtgttgttgaggatctccgagtcacccatgccgtacaggtcgaaggacaggacgacgaaaccacgccgcgcccattcgatctgatagttgtcccacttttccttcatgccgttgccgccatgcgagaacacgatggtgggtgcgggtgtcttgtcggtggcggtgtcgggcttgagcatgttgatgcccagacggtgaccggaggatgattcgatgatcaggttttccttgtcgactttgccgaagtcggtttgtgcgaggttcgccaggcagctgccgatgatgcacagggccacggcgagtatggtcgccgccccgtacacgtgggttttgatgtaatgccaggttctggacatttctctcctctttccttgtcatgcgcgttgcgcgtgttcggaattccgccctcccatgggcgtcgccgttccgcttcgaaccggcgtactcatgatgttaaccgcgttaatactggctttccggcggcatgctgcacaaatgtgcacgtccaaaacgtttcacctcaatgtccgtctgcatccaacgggcgggttcatgcggattgccgtcggaagcacaggaacacgattcgcgctaacatgcacatatgtccaaggacctgacgacctcactcgcatcgacgcagacgcgacagcacatcgaaacgctcatcaaagtggcgcaactctactacgaggacgggctcaaccaggcacagatagccagacaagtaggattctcccgatcctccgtatcacgcatgctcaccgaagcacgggaggaaggcgtggtccacatctccataggccaccccttgcaacgactcgtatccatggaaaacgcactgaagaagaaatacgggctgaaatgcgtgcgcgtctccgcctcatacggcgacgacatcgactcgatgctggtcccccaatgcggcgccgccctgctcatggagaatctgaaacccgattccctgatcctcacctccaccggcacacccatggcatcgaccgtacgcgccctgccggtgctcgactacccgcatgcccatgtcacccaaatgctcggctccctgtcccccaacaatcccctgaccgactcacaggacatctgccgcatgctcgccgagaaactcggatgcccatactccactcttcccgttcccatggtcgtcagaaccgcacaaatggcagaagcattgcggggagaggacatgatcgccagcaccctcgccctgggcaaccgtgccgacatggccatcgtcggcgtaggcgccatccgagaaggccattccggtcgcattttcaactcgttcgaagacgcggccatcgcgcgtcagatggaacgcgacggcgtggtggggcacatctgcgggcatcacatcgacgctcaggggcgacatgtgcgcacttcgttgtgtgaccggaccatcagcgtggatttcgaccgtttccgtgaaatccctttggtgatcggcatcgtatgggagctatggcgcgcgaaggctttgcatgcctgtcttgtcggtcatctgatgagcgggctggcgacgaactgtggcatggccgagctactgctcgacatgccctgaacgacataggtgcagagcggcgatcaacgccgccgacgcaaccagataccacgccacgttccctgccaaggacaatgagtaggaaccggtggcatcgaacatcagcccatgcaccgtcgtggcaatcgccaccgtcgcctgtcccgtcgccgtgatcacggacaacggccgcgcataatcaccttcccccgccacctgccgtatcgtccaaggcaacgcggtgagcataatcgcctgtcctacgcctgcgcacaggcttgcgcccatggctatcgacgccgacgtggcaagccatattccgatccagccgatccacccgattacggaatacaggcccatgactagcgacgggcgccgtccgtccaacaaaagaccgagcgtgctcttgccgacggccgagccgatcatgcgtgcagacaccaccatcgacgcctgtcccaaggtaaggccgacggcaagctcatgggctgggacatgctggttgatgccggacgcgatctgcagcaacaccatggagagaagcagtaacccgaacgccagatgacgccgatatttcttctgactgtcagacaaagatgcatcaggaatgttggtttggctcttctgcacatcgggagcattgcgtggcgatggtcgttccatgaccgtcgccgcgaaaggcagcaacaacaacaggaccgtgacaccggtggcggcgtatgccgtgcgccacccataggcggtgatcatatgcgacaccaacgggttgaacaccgccccacccaacccggacaagcatccggcgatgcccatcaccgtgccgaaccgtgtcggaaaccacatggacagcaacacgggtggcgccaacgtcaccggaaccacataggaagcacccatgacggcgaaagccgcgtcgaactgccaggcactgtcgaaccatgcgcaggcgaggaacgccgtcgtacacacgatgacgcaaacggacaacgccaccctcagattcaaacgggagaacacgcgtccgaacagcagcatcgccaacgagctcacaatcaatcgcaccgacaccgggaacgccgctgccgtacggctgatgcccaggtcctggccgagtgcgtcgaagtacagtcccgccgtattgacaatcagaccggaaccgacgaacgacatgacgcaacagccggcgaacaccaaccaacgtcgagaaccctgcgaatatacagacagcatccctcaacaatagcggcggaagaaccggatgatgccattgaggacatccaacgcttccgtgttgtcgggcaagcctgtctccttgacactgaaatcatggtccaacggatgcgacaaacccctgggcaggacccgcacctcgtagtcatgatgacggtattggaggatacgcgcgaactccagcgtattgtccgcgagataatcctcggcgctggagaccatgagaatgggaggaaggttcccgtcgacgacgagacgatccatgtccaggtatggggtgatggcgatgcgatccttgggcgtggggaagaagccgctgccgtaataggccatggctgtgccatgggcgccgccttcgaaacggtacatgccgctcactcctgcaatgccgcgtatgcacaggccactggttccgggcgagacgcacagttgcgcggcgacgatcggagaatggagaacagcacacagataaaggtcaagcaacgtggccgcggaatccccggtaatgaatactcgcgtcgtgtcgaacccgtgttcctcgcaatgcttggcaatccagtccaatgcgcggaccgcatccgcaagctgatcacggaacgatacctggggtacgagccgatagttggcgttgacgaccgcgaacccatgcttggcgaacagcatgtcacgacaggtggtgttccgtttgtccccgtgatacagaccgccgccatggaaatccacgatgaccggcaacggtttcttcgtcgaaatgtcagcgggacgatggacgtccagcttgtgcagaacgtcatgtgatgggtcagactcaccgacataagggatgtccataacggaagccacgccctcaggcttatgttcaagccggagacgttccgcatccccgccatgccggaatgccgtattcgcttcgaacagacgaagcgtttcctcatcaatcatcatcatctcccatctccggccgcattgccgcggattcatcgtcaattccaatgtacggcgtattcgggccaacaaaggacgatgctccgcacaaatgtgcacgactaggccagatgcgaaaagggttcctcccgacaatcggaaggaccccttttcgcatggcaactaggctcagaccttgctccgacggcgcgaaagcaacccgacagccagaccagccaacaatcccgcaacacaagtcaggatgttaggcaagccggtctgcatatgaccggtcgccggcgtctgcaccacacaggcttgtttgacggtgatcgggatcgatactgtacgttagatggtttggatccggtatgcgataagggattgtcggaggcgctggaagagattaaccgtaagtttggcgcgatgcatgcgggtatcggctggggtgacattcgcggtgacggtcgtacgaacgaggagaccggtggtgagtggcggactcggcttaataggttgtcgtcgtgtgccacgaccagatgggatgagatcgctatcgcacatgcctgctagcaggttcatgtctacttagtggctccgtgcattgtttcctcgtggttaccggtttcggcaggatcgtaataacttgtgcgatgttctgtaagtcgccgtaacatgtgcccccttatggttaaagctataagtaaacaaagttttcctcgttttccttctaaaccaaaacgtgggccggaattggttccgtcctgcgtttcagggtgggatcacagcagatcacaagggaaggaaacgttatggctcatcacgatctcatcattaagaacgcggacatctgcacgatggacgcgaacatgacccgcatccaacacgggtatgtcgtcgtcgacggagaaaccatcacctctgtgaatgaaggttccgtgcccgcaggagtggaggcggatactgtcattgacgccgagggtcaggtgctgttccctgggttcatcgacactcatactcatatctttcagtcattcctcaagggtctgggagcggaccatcgtcttatcgaatggctgaaccgttccgccctaccgtacggcaagtacatgactccataccagcatcgtctcgccgcgcaactgacctgcatggaagccattaaaagcggttgcacgacgctctgcgagttcttctacactgaccaggatcctgagctggccgacgggtgcatcgccggcatggaagacacagggatccgcagcgtgttcatccgcaccttccaggactgcggcgaagactacggcatgcccgcatgcttcatccaaccggcagacaaagccatggaagaagtcagccgcctacgccacgattacgcggaccgtagcgacatgctctccatctggaccggtccagacgtgacatggtccaccaccaaagagggataccgtaccatgttggactactgcaagtccgagaacgtgcgctacgcgatgcacatcgacgaaaccgaagtcgatgacgacatgtgccagaagcattacgggcaagacatcgtaccaatgctggacgacatgggcttcctcacggatcatatgctcggcgtgcactgcgtgaacctcacccctgacgagatcaaacggttcgccgataacggtgtctccatcagctacaatccggtctccaacatgtacctggggtctggtgcggcgccgatccgcgaagcattggatgcgggagtgaacgtgtcgatcggcaccgatggcgcggcctccaataacaccaccaactatttggagagcatcaagttcgcggcgctcgtgcagaaagggttcacgcgtgacgccgcccgcatcaccgccccgcaaaccatccgcatggccaacggctcgttcggctacacggcgttcgccgccgacgtgtacgcccgtcggatcgtgggatgggcgtgcgccacgaccatgaacacgcaggagctgccgttgcaggcgttggagcaggcggtctcatgggccgcgtcccatggcggcacggatggtcttatccaccacagcgaccatggcacgcagtacaccggcacggtgtacaccaccagggttatggaatatgggatgctgccgtcgaccggcaccgtcggcgactcgtacgacaacgccatggccgaaagcgccgacggcgcgtacaagaccgagctggtatggcggcgcaagccattcctggatatcgatgatctggaattggcgacgttccggtgggtctcgtggtggaactcgaagcggctccaccagtccctgggctgcaggacacccgaagcggtggaaaccgagtattatcaacatcaagcggcacaagccgcctcactataagggcggaacaaaaatcaggccacttcaactggttcaaccctgccatgcgtcatcaggagttacgacgcaccaagcaagtcacgttcatctacatgaagacagatgaagaggctgactgaagtctggtcgattgcgtgatgattgagggaacgaaaaacaaggagtatcaatatgtatgagccatatacaagacaatcattgccagataaagagtatcgagaactgctcggctcggcgatttgtgttttcaattcaaatgttgcttttgttattgaaaacatccttaatgcagacgatgcggataattttaactggtatgatctcatcgatcttagtgctggagatctcagtagcccgataaaacaaaccattacaaagaaagctggctcaaaaattggatctctgtttaatacagtagttcaacagagaaacaggattttgcatagctttcaaattactgaaacagtctcttgcaaacagattctttgtacaaaggataagcgaaatcatcaatttctcatcacggaggattatcttctcagattcattgccgacaaccagaagttgtctgagttgctctatgctttccgtaagcagatgacttgctagtgccagaagcgatggcgtacactcgcagtctggtgatcagaacgtgggaggtcattgtttttcattaggtgtccggacatgcagcgttccttgaggtagatggcttcgtcgaaggtctgtacgcttgcacgctcacgccggccagtatatgcgtgtgagcggcagcagggcgctggtctccaggtcggtggtctcgtagttgtcgacgaacacgcgggcgaattggtcgaggttgagcagggtgacgggcacgcgggcgcgttccgcctcgtagagcgcctccttggtgaagccgccggtgctcacgtacaaacccttgtcggagtcatgcaggccgccgatgaacgagtgaaccgccggcgcgcccatgggattgccgcgatgcttgacttcgacgatgatgcgtggggaggtcagtcccagtccgtcgggggaggcgatgacgtcgcgcccttggtcgccgcctttggacgtcagggtggtgcggtagcccatggcgcgcaggaggccggcgacgagggattccatgtcttcccaggagagcgcgacgatgcggtccttgatcttctcgatgccctcgttcgcggtgatgcgacgggtctcatcgtcatccgtggtctcgttgtccgcggcctgagcgggcgccgagggtgaatcgtcgctggttcctgcggctgcggtcaggtcggcgaatacgtcatcgccgatctggctgagggtggcgatggtgcccagcgagttctttgaggtgtcggcgagtttgtcgcgcgacgcgaccgtccgccagatcaccgggcgtgagtaccggctgtcgtgctcgtcgtcaccggtggtgtcttcgatgatgcagccaccggtgacggagccgatgtgatagagacgttcttcgggagagtaggtgacgacgtcgtcaccggtctgcatcaccgagccgaaacggtgcacctgcccggtgatcattgcgcgtgcctgctgggaagagtcggcgtagatggcatcgaccatgtcacgcacctcctggcgtgctgcgccggcgatgtccaggtcgttcagctgccagtagattgcgatgtatcctggcgaaccagtccgaggcgtaccgtgcctcgcgtcctgcgcgaatcagccatgcggtcatgacggtctccttcccgttgcggcctcagtttggttgttgcagtaactcagtttggtgggggccgaggtagggtgcactgagccgaaaagaaagatgtcttggagtccaagcatggagcgccgctccgaatcggcggtcaagccggatatgacacggcctatagccgataaaacaagagcccccgggtttgagcactgtaaggaggcttgggggctactgttagcactgatattacgtcaattcatacgaaggcacaaacgggcttcccggctggacagaaagtagccctcatccttgcgccatgaccgtttgctgcaggggaaagagacttaggctgcatcccatcatgtctgtcctcacggtcatgactgcggcgatagctaagtgatggcatcaccacggatggccacgtaggcgtgtcgcttgggttccgggtctccgtgccggacatgtcctgtcttgccggcacaatggtcgaacagatgttcgagtcctatgggaggtgcggcatgtcacaggagacgcaggtcaaacgggtgtggcgttatcggcgcaacccccatgcgcgcaggctgccgctcatgatggagtccgtgcacgccggtttcccgtcggtcgcgcaggattacgcggcaggggacctgagtctggacgaccggctggtcgatcatcccgacacgacgtttctgatccgggtagcgggggactcgatgaccggggccggcatcttcgacggggacctgttgatcgtggaccggagcctggaacccgaggatggggacgtggtcatcgccgtgctggatggtgacatgacggtcaagcgtctcgcctgcgacgctcatggcaggtatctgcacgcggagaacccgaggtatccggacattcggcctgctccagatggggagaaccttatctggggagcggtcaccggcagcatccaccggcaggggcggcgccggtgaatgggttcgtgctggcggacgccgacagtttctatgcgagctgcgaacgcgtgttcgacccgaagctgatgggcaggccggtggtcgtgttgtcgaacaacgacgggtgcgtggtcgcccggtccagcaactacgagttgtatgcctcgttgagccggcggatgatgagcgtcatggaccggtatatggcgggtcggggggcgtacagcatcgacgagtgcttcctcatgccgctcgaccatgccgttgatacgacgtgccggctgatgaggaccgcggtgctgagaggtgtgggggttcccgtcaccgtgacgtgcgcacccacgcgcacgttggcgaagatcctgagccattgggccaagcacactcccgcgaccgggggagtggccgtctgggacggtctgccggccggcctgacggaggagatcatggctgcgacgccggtcggcgaggtatggggtgtgggccggctccttgagcccaagctcatgggcttgaacgccaccaccgcgctcaggctgcgaggcatggatccggcgtttgtccgtcgcaggttcggtctgaacctgatgcggaccgtgctcgaattgcagggcacgccgtgcatcagtctcgacgggttcgacgccatcaagggacgtcgggagcatcagatcatgtgcagtcgcatgttcgggcattccatcaccaagatggaggagctcgcgggagcggtcagcgtgtacgcgcagcaggcgaccgcaagattgcttcggcagcatgggctgacccggctcatcggcgtctggtgcgcgaccagccccttccgcgacgactatcggattgccggcgggtatggccgtccgctggatccgaccgacgacccgatcacggtctcgcgcatcgccgtcgacgtagcacgcgcccatgcgaggcctggctatcgttgggttcgagccggggtgatgctctccgacctggccgaccgggaccatttcgacacgttggacggcctggggccggtgcgcgacaggggactgtccgaggcgctcgatgcggtcaaccgcaagttcggcacgatgcacgccggcatcggctggggagacatacgcggacaaggacgagcggatgcggaaaccggcggaacatggcgaaccagacgcggcaggctgtcaccaagagccacgacacgatgggacgaaatcgccgtggcacacgcccgctgacccagacatgggtttggtgcctgtttcaaactaatggccgccaacttgcgatgcttgcatcttgcagtgcactcggcgacgttttaccggtatgagagatcaaggataagagagagaggagcttcgataatggatgtggaatataaggatgccaccgaatggctggaaggcctgcccgtcggggcacaagtgctgaccccggatgattgggtgttcgccaaacaagccggcggtacatgggtgttccgtttctgccccgggcatgtgacgactgccggcatgattgccgcgcatggcatgcccgagctcattgatccggccgtgtggaatgaggaggctggatgcagacagatcgcggcgccctcgcgtacttcgacccgttcaaacgcattgagcgcagggtgggagaggatccggaggcgttccagcatgcacgggaagctgatccggacgtattcgtcgctggtctacaagacaagcccgtgcgatccggccatgaatggggcatcgaatggtcggtctatgcgggcccggcttcccactgctggaacgggtatgcgcggatacccgaaggccatccttggatgggccagaattgtggcaacatacctgccgacgcgccgggaggcgtttcctatggatgcgatcaggacggatggatcggattcggcaccatgcgtgaggacacggtgaatgaagctccatctgatggatcagagcatgaccgcatggtcgaggaactgtgcgagaagcttggaacaccaatgccggaacaatatgaatggacttgcgacgacgtgaccgacatggcttgggagctcgcccggcagattcggcgggctagccggagaggagcgctgtgcttcgggtcgctgtgagaggcactaccctcgttggtacaatggctctcatagctaaggacgggagacggcatggaagcggacgggaaggcgtcaaggaaacccatcctcactgtagaggaacaaatcgcgcacttgaaggccaaaggcgtgaagttcgtgctttgcgacgaggctgaggctgtccggtaccttgcggagaagtgcaatttcttcaagctcgcctcataccgcaagttgttcgcgaagcgcgagggcggtgatcgggacggccaatacgtcgatctggactttgcccaactgcgtctccttgcctcccttgaccagcagcttcgctttgtcttgctgggcatgacgctcgacatcgagcatttccagaaggtcgctgtcttgcatgagatggatgcaagaggagaggatgggtatgctatcgtcgctgactacatggcgtccttgagccagccgaaccgggattaccgtctgcacgagcttaagatgagtgggtatagtccgtacagtgccggggtatatgcgaaatatgccgacgacatgcccgcttgggtgttcttcgaactcacctcgtttggtacattgatcgatttcgtccggttttgtgccaggcgttggaatgacaggtctttgcatgtggctcattacgatctcaagggcgtgaagtctctgcggaactgcgcagctcatgggtcgtgtatcgtcaacgctttcgccgaccgtggagcgggaaggactgcggtcaccaattccgtcgtgcgcgctgtctctgttgcgaatgtttcgaaagccactcgagccaagtggatggggtgtgcagccatgcagcagattgcgacggtattcgtcgtctattcacggctcgtgcccgagggacgctcccgcaagcgtgcgatggcggatctcgcgtccctgtttgcaagggtggaggacagtgcttccattctgccttcgcagggaccggactccacggcatgggcggcgttccatttcatgcgctcattgacaaaggggctgggattgctataatagttgcagatgtcaaaacctttgggttttaggggcggattcgcgaaagcgattctgccccattttcataaggcggaaagaacgggttaagtaaagaaaaagtgtgtcttatcgtgcgtgtcgatggcgtgtcggtgagttagcgagagcgtccgctccagcctttcctgatgccgaacccgtcctcgtaggcgtcgacgccggcggccggcagttgcacgccggtcacggtcacgggcgtcggcccgtcgtcctccgccggttcctttccggtggatttccagtagtcgggcgtgacgaacgacatggggtcgggatgttccgtgagcatatacaccgtccattcgcagcaccgtttcatatgctcttccgacagtccccggtggtggtcgagcgtgcgcttgacaaccgcgttggtcccgccttccagctggttcgtggtcgacggcaacgattctccgtccccccgcgatggcggggtcgcagaacgcgaacagcatcccggcgcggttgagccggacgagccggaagcaggcgcggcgcagacgttcgtgcgtccaccaccacttgcgccccctggcgtgcgcgggatcctgtttggccgtggtcctttccttgaggtaatcgccgtgttctccgtgccatgcattgagttcggcgagccagttggcggccccgtccacagtgctgattttggtgagcctgcgtgcgagtctgagcagcgccctgccggcctcgctcttgggcctgttcgtcaggtcgacgcgggtgttgcgcagcacgtgcacgaggcaacgctgcgcgcgaacccccttccaccgggccccggcggccgccagacacccctggcctccgtcgcacaccagcaatcccggccttttcgatcgtccgaagagctgccggtaggcgtccttggtctccgtggagcaccactgccatgcgaccggccggccgtcatcaccggtcagggccagcaggcaccagccatagggaacatacgtcccgtccgccatcacataccggtgggaacgggaggcgggcggcaggaccggttccacgctccagcaccacgcgatacgggccgagaacgtctgacgggtgataccgagccgggcggcggcctcgcccatggactccttgccggtgacccatgcgatgaacgcgcggaactcggccctgcgcgccgggtccccgcgttccgcgaccgtgctcagccggcacgcatcgcacctccaccgttgggggcgggacttcgtgaacccgttcctgcgcatcgcgcgcccgcacaaggggcacttcctcgccctcgaagacttgttcctgctcatagaccaagccaacccgaaaagtcaagcaccccgccggattaacgcccgactcgctaatcacaccccgacacacaagacgccagtaagcctcacagcagatttaagacacacttttctttacttaacccgactaacctcctgtcatataaggaacccgttggcttgccgggcgccgctggtgcggtatccggcaagcctgctgggttttcatggatctctttatttgccgttgaggcgtttcgatacctgttcgatcttgtcgtcgaggtcatcccgctcggcgcggagcttctcgaggacatcccgcagcgtctccttgctcacgtcgtcctgcaggaagtcgtaggagaggagctcgacgaccttgcgcaggtgcgcgggtacgattttctggtagtgctcgaaggcgacctgcaggtccgcgtgcccgcagttgtccatcgtttcgcgcatggtcgcgtcgttgagcatgagcatggtcgcatgggtggcgtgcagcgtgtggaacgtggcgtccggccggttcgccgctttgcgggcccgctcgaactggtgggcgacgctgtcctgcgtgtacatggtgttgcgggtcagcgggctgtggcgttggaacagcatgctgtccggggtcttgtcgtcgcagtgttcgcggatgtgcttgcggatcatcgggatcagcaccatggggatgggcacgtcgcgtatgcccgccttggtcttggtcgtgtcgaggatgaacgagcccgcgtggtcgggatccttgttgacgctgtggcgaacgtggagtatccggttgtcgaggtccaggtcccgcagtctcagcgcgcatgcctcgcccacgcgcagtccaccgacgagtgctgccagccataccatcagctgcaggttgtccggcatcgcgttgacgatggcgcacacctcgtccttggtgaacggcagctggtcggctttcctgcttttgggctggggatgcttgacgctgcatggattgtaggcgagcatgggcttgccgtcggccaggatcttcttggacgcgtggttgaacagctgcgagatgaccacgcattcatgccagaacatggacggggtcagctggtccttcctgcccgaataccagtgctcgatttccccgggcgtgatctcgcatactggttcggatccgaaatagtccttgagcctcgtcagcgaccgcttgaggacctccctccttgaataggagagttcggacccgtcgggcgcgcgatgggtctcgtagtacagatcgcagaagtcgttgaacggcatgcgacgggccttttccgcgtcggcgaccaatgacctgcgtttcgtgggatgctgccattccttgaccccgagattgtgcaggcggacgaggtatcgctcctcgtccagccattgttccgccgagtccttcgagtcaggggagaaattgcgctgcacctttttggaagggtccaggggattcgtgtacctggcctgccaggcgacccgctccccgttcttgccgaagcgttcgaggatggttccgaattttcgttgctttggccgtttcgtgattcctccttcattggcttccggccgtctccggagctcccggattgctgggaacgaaggcgccttatggtcttgttcagttgcgtgcgccgatgttcgagatcgtcgatgacggttccgagcgcgttctcgtccgtgtctggcggaaggaagtcgcatgagcacaggtcggtgactttggcgacgtgatcgtccaacccgggggagcatagctgcgacatggtccttgtggtcgcgtagcccagcatgtccatcgcttcctgcatggtgccgccgttgcgcaggaacgtcagcgcataggtggcccgcaacgtgcgatacgtgccgtcaggccgtccgatcttctggaacgccttcctgaggttcgcttggagcatggcgggattcggataatccgccagacgccattcctggctgaccgggaagaggaagcactcgttgcttccgcttgggcaatacctttcggcgtgccgtaggatggcaggttccagaaggccggggagggggatggtgttgcccctgggtcgataggcttccgtgattccgtatcccggcctgcctggtttgcgcaccacgttcgagttgatgtggatgagatgatgttcagtatcgatgtctcccaggcgcagggcgcagatctcgcccatgtgcaggcctcccgccgtcagtccgagccagacgaccaaacgaaggtgtgcaggcatcgcttcagcgagctcgcgcgcttctctcacggtcagcggtcgctcgtttcgggaattcagatcacgaccgggcgtatctatccggcatggattggaggggagaataggttgtccgtcgcccaatccgtcggtcactgcggcgttgaacacgcggcgaagcatcatcgtcgcacgccgcaaccggtacggggacatcgatgcctgtgccgcgtcgaaccatcggtcgatatccgcctgcctgatgtcaagcaattgactgttgccgaaggtctggtccagatccctgatggcggctttatgggagcccattgtcagtgggctcaattgctcgccccggctgttgcgcagctgccggcaataccagtcgctgtattcgccgaaggtcaggccatcgggattcttgtagaccagcttccgttccgtcctctccgacggcggaatccatgcgcgttcgcctgcccgatactgttcgaccagctcccgctcctcgttcagccagcgttcggcgtcggccttcctatcaggagggaagtttcgctgcactttgacggtgttgttgagagggctcctgtacctggcctgccaggcggagagaacgcccttggcgttatgccttgccaccagcgtcccgaaggaacgcttcgctttgtcgcccatgtcatacctccacgtatgagtgacattgatgaatgtggtagcgcagggcgcattgtccctgctccaaagagtgaagagacccggtgctggcgagcggcttccgtcggctccacagcaacaggaacgcggtgcataacaatgacggagccaggctgcggcgcctggctccgtcaaagtagacacacgtcggaatcgttgttatcccatttcccccacagaagtcaaacccgatgccaacaacaccgccagggccacccgggttctcatgtcaaccccagattggatgcctaggcagtcgtcctgatcggcgcatgaacgcggcatcgtctttgatgcctcgcatgcgcccgtctgctcaggcgcatcccccaagacgccaacggtcagaagcacataccagagtgcacacaacctatcaaagtacgcccgctgattcgggcccccttatctgaaacatcagaatcaaggacataccgcttggaccccgctcccgcaagggacacggggttctcgcgttccggggtgcgggcgttttcccggagactgaatgaacggaatccgtccaccccgggcattgggaggagcgtgcccgtgacgaggtgttcgtcccgatcgacgactgtatccgctggcacgaccacgggtgcatcaaaacggcgtgattccgacggctccggttgccggagcgctggaatcacgccgttctgcgcaggaggaatggggcggactttgggcttgagctgcggcgctgggcgctcattgcagtcttgtcatctgcattgtgggtgatctggatgttgttgttgcgatgagtccgttcggcacattgatcgaatatcttctggtctacggatgcgggcaagccatttcctggaaggcgtttcgtcgagattggcgggagcttgcgtcagcaggcgtcgatgaaggcgccgaggatgcggcgttggttgctatcggcgcggtgggagaactcaggatgccattggacggcccagacgaaacgcttggccggcatccagaccgcctccacgatgccgtccggcgcggtggccatcggttccagtccctggcccagcgtgcga

SEQ ID NO: 3415 - DNA, 7113 bp, Unknown
  R151_18m  MAG No. k141_39026
cggacttgatggcgcggcgtgcctcggaagcggacttgaacagtccggcagcctgggcggcgtcgattacgcgatcgcccggcttggagacggggaaggcgtgctcgccgttctcgtcgaccaccttgaagccgtcgagcacggattccagcgtttcctcgtcgatgtcttcgaggttgccaccgcggccgaacagcgcaccggaagcatcgatggcagcctgtgtagcggcctcgccatgcacgaagctggtgacctcccaggcgagcgtcttctgggcctcgcgcttgccggggttggtcttggattcctcgaccaatcgttcgatttcggccttgggcaggaaggtgaacgccttcagcaggctttccatctccacgtccgggcggttgatccagaactggtagaacttgtacgggctgagcatcgtggcgtcgagccagacggcgttgccctcggacttgccgaacttcttgccggaagcatcagtgatgatcgggctggtgaacacattgacgtccacaccgcgcaccttgtggatcaggtccaggccggaggtgaggttgccccactggtcggagccgccgagttccagcgtgcagtggtattcgtcaaacaggtggagaaagtcgttgccctgcagcacctggtagctgaactcggtgaaggagatgccttcctcagagttcaggcggcgggcgaccgtgtccttggcgagcatggtgcccagacggaaattcttgccgacgtcacgcaggaagtcgatgacggtcatcgaggcggtccaatcgtaattggatacgaaacgcacggcgttcgcgccttcggtgtccagaatgccgccgatctggttcttcagacgatcggcccagccggccaccacgtccttcgggttgagcgtgcgttcgccggactggcgcgggtcgccgataagtccggtggcaccaccgaccagagcaatcggatgatggcccgcaagctgcaggtgacgcatgttgatgagctgcacgaggttgccgatatgcaacgatgcagcggtgggatcgaagccgcaataataggtgatgggctcgccgttcagtgcttctgcgagtcgatcccggtccgtggactgggaaatcaacccgcgccattccagttcctcaagcagggtgttgaaacccgcttccttgaagtcggtgacgtgagccatagcttgtcgcttctccctatcgaattgtgaatgagactgcccaattgggcacagtcaagtttcgcagaacatggcgacagtgccgaacaccagccgagccgcgcgattcagtaaaacaccttattctagcggcgcgggcccataagttcgcgcaaagagtcgatgatgtcctgacgatccggcacctggaacttcgggaaggacttgagcatacgcttctgctgtgcgttgatgacgccattgacggcccagcgcagacgctcaaccgtatcctgcgaaaactcacgcatcctgtcggataccgcactggagccccgctgccacgtgccaccggcgcgtgccgccacatcctgcaccacctgagcgacggaatcgagcacctgctcgaatccgagcatgcccgtaaccgtgaccgccaagtcgatgatggtgatcagagccagtaccgtgaccagcgtatgcagcatcggcagcggaatcatatccgtgacccgctcgacatatggctgcgaaccaagtaccacgcccacgccgccgagaccgaaaatcaacgcgcccagcaggcagacgcggccttggaggttgaagcggaaattcgagtaatcccaccagcgggcgtggaacagctgctccatgacccacgaggttgtgtattcgagtatcgtggcgcccaccatcgaaatcaggaagatgatgatcgggttatgtacgttgccgagaatggcgacgccgagtatcgcgccggtgccgtagatcgggcacagcgggccgttgaggaaccctcggttgaccaagcggtgctgttggcaggagacgagaatggactcgtacgtccagccgacgaaactgtagaacagaaaccagaggaaataatgttcgagtgtggtgatcatcgacgggcttcgatctcggcgtagggcttcgcggcgggcaacgcgcgcttgttgaaccggtcgaacgagaaggtctcggcggtggcggagcatttgtccgccaaggtgaccagatagccttcgatatagcgcggcggcaccagggtcatcgggaacatgtggttctcgatgctgttgcgttcgatatcgttgagcttgaagtccttcagggcattgaccagggcggcgtggccatgggtgaagccatgccactggtgttcgccgttatcccagtcgtgccagtcgtacaggaagtaatcgtgcaggagggccgcgcgaatcagggatttgaggtcgacgcggtaccacaggtgcgcgcggtcggccatccacacagccaggcaggcgacacgcacggaatgttcgaacgtggtgacgttgccgtgctggtagcagcagcgttcgatctgcatgtggcgatgctcgatgacctcacggccgtgcttggcgaccaggcgttgaatctgcgttcgggtgagcagatgtcccacggtttcgaccctccgttcgggttggttcagtgcaatcccttgttgtgaattacgattacccgacgatattcaagaatccatcgaataataccgtgaccgattgtagggcacacgtatgtccgtgcacactcatccaaaagaacgacaacgggaaccgttaatcgtggtgggtttcaagatagtcgagataaccctgaaaaccgccatcgaggcttgctacatcgtaaccgcgatcggcaaggatttcagctacttcctcgctccaccatccttgagcacaatagactacgacagttcgatctgtgggcacggttttgagcacatgggccagagggtcgagtggtgcattgatggcaccttcgaccgggtgggcggcgaagtcggctggttccctcaagtcgagcagcgtgaccgtattcgggtcgagcttggcaaattccgccggcgtgatgcggcggtacgatgcttcactgctctcatcgtcatcgaccgcattacgcaaagcaataggcatgttcttcccctctcgttccgatcttggctcccctcaaggaggggtgccacatagctctaaatcgcgcaggccggctgaatatagttggccggatcaatagcagtaatggtcggctgctcaccgcacaccgggcagtcgggcacatggttcggcaacggcacacggcggatgttcatggtcagggcatccacagtgagcatacgagccacgagcggctcccccacgccggcaatcagcttgacggcctcagtcgcctccagactgccgatcacaccgaccaccgcgcccagcacgccggcctccttgcaggtcggaatttcacctgcggcgggcatatcgcggaagatgcagcggtagcaggggccttcgcctgggatgacggtcatcacctggccggagaacccgaccacgcccgcatggatatacggcttgccggccagtacacatgcgtcattgatgaggaattttgcggcgaagttgtcggtggcatcgatcaccagatcgtacggttcgatgaggccggcgatgttgctggcatcgacgagctcgtagtaggtgtcgaccgtcacatctgggttgagcgcgcggatggccgtggccgcggattccactttgggcgctccgacacgtgcagtggtatggatgatctgacgttgcagattgctcatatccaccacatcgccgtccaccagtccgatatggccgacgccggccgccgccagatacagggcggccggagagccaagcccgcccgctccaatgatgagcacgctggaggccaacaaccgcttctgccctttgacgcccagccccttcaaaatcagatggcgcgcgtaccgctccacctgttcatcagtcaatgccatgttttctccatgtttccagctcccctcagtccgctacgcggccagctcccctcagagaggggagctaataaaagtgtcagtgcaaatatcccgtagtcggactggacggcacggcctgtccctcggtcaccttgcccagaccggacagatacgccgcacgaccagcatcgatggcgtgcttgaacgcctcagccatcagcgggatattgccagcagaggcaacggccgtgtacgccatcaccgcatccgcacccatctccatggcgtcgcatgcctgactcgggcgtccgatgccggcatcgatgatgaccggcacatgcgcattggcgatgatgatctcgatgaagtcacgcatgcgcaggcccatgttggagccgatcagcgaaccgagcggcataacggcggcggcaccggcctcctccagctggcgtgcggcaatcgggtccgggaacatgtagggcatgaccacgaagccttccttggccagcatttcggtagctcggatggtttcggcgttgtccggcaggaggtacttggtctcgtgttcaatttcgaccttgacgaagtcggtgtggcacacttcgcgtgccagtcgggcgatacgcacggcttcctcggcgttgcgcgcaccggaggtgttgggcagcaacgtgatgccttcgggaatgtagtcgagcacgctgttctcggtggtctgcgcgcggcgcagtgccatggtgacgatttgcgtgcctgcatgttcgaccgtggccttgatgaggttcaggtcgtagcggccggagcccagaatgaatcgcgactggaactcgtgaccgcccagggtcagcggcttgtcttccactggcagaatcggcgcggcggtgccgaccggattggtgacggcgggctgcggcggcagcggagtcgcctcaacagatgcttcagtaaccggattaatattgctcatagcttttcctttcatccaccctgtacaaactgcacaatttccatgacgcactggtcgtcgagcatggcgtcggcacgcttatcgcgcgggataatctcaccattgagttcgatggccacacgctcggcgcggaatccgtgcgcttcgagataatcggcgacgctgaccggcgtctcgagcgtgacctgctctccgttgacctgcataatatcctttcagatagtaaaaaagggtgcacgaaacgaaccgtaccttaagtggtgcgcccattcatgaacccaatcatgcgaccgttcgaccgctgtgatgtattggctccatcacgaccgtctcacggctgaattatgcaaacggaatgaaagctgtatcggagaacccggcaaatctgcaacaacgattccttacggcggcatgacccgcgtcaagttccccggtcgaagtctggcgacttcctctcagcctcacggctcccgttcgttacgatttctcagtgtatgccgttgcagtgacaacagcaaaatagagctccctctgacgagggagctctattgggactagaacgtgccgggggctttgtaggcggagccatccgacgtggatgcggggaagagcttgagttcttcgacctcggccttggcgtcggcgatctgctcgcgcacgcgaccgtaagcggtgccgcccttgccgttgcgggagtcgaccgaaccgtggctggagagcacttcgcgtactcccggagccttgtcggccggcaggaacgcggcgaaggtctcgatgaagtcattgtcggtcagatcccacagttcctggccgcggccttcggcgagcttgacgcaggcaccagagagctcgtgcgcatggcggaacggcacaccgttcttgacaagccattcggcgatgtcggtggccagcgcgaagccggtcggggcttcctcttcaagccgctcgctgtcgaagtgcatggtcttgaccatgccggtgaaggcgggcagcagcacttcgagcgtatcgacctggtcgaacacggcctccttgtcctcctgcaggtcgcgagcgtaggcggtgggcaggcccttcagggtggccagcagaccggtcagatcgccgatgagtcggccggacttgccgcgggcgagctcggcgatatccgggttcttcttctgcggcatgatggaggagccggtggaatagccgtcgtcgagcttgacgaaggcgaactcctgggtgttccagatgatgatctcctcggacaggcgggagatgtccacgccggtcatggcggccacgaacgcgaattcggccacgagatcacgtgcggcggtgccatcgatggagttgtcggtcacgcgggagaagccgagctcacgcgccacggcctccgggtcgaggccgagcgtgttgccggccagtgcgccggagccgtacggagaggcgttgatgcgcttgtcccagtcgatcagtcgctgcacgtcgcgaatcagcggccaagcgtgggccatgagctggtgcgcgagcagcacgggctgggcgtgctgcatgtgggtgcggcccggcatcacggtgcggccggccttttcgctctgctcgatcagggcgttgacgaggtcaagcaggagtccggcaatcgcacgggagtggcggcgcagccacatacgaatcaggcaggcgatctggtcgttgcgggagcgtccggcacgcagtttgccgccgagttcgtcgccggcaatgtcaatcagtccgcgttcgagggcggtggcctcgtcctcatcgtcttcgatgggggcgaaggagccgtcatccacatgacgctggagcgtgtcgagcgcatcctccatgcgctgcagctcgtcggcggtcaaaagtcccgcacggccgagagcacgggcgtgggcgcgggaaccggcgatatcgtcgtcggccaagcgccagtcgaactgcgtggacttggacagtcgggccagttccggcgacggaccggacgtaaagcgaccaccccacagggccagatgttcgttgttctcagtcatgaaggctccttgaaaagtgaaaatagctgtgtttaagcgtagcaatgtgttcaaacatacagttgcccccgctggcgagggctgtcacatggagtgtgactgaggacagtcctttcaaagaccactcccagtcagctatgccgac

SEQ ID NO: 3416 - DNA, 23935 bp, Unknown
  R151_18m  MAG No. k141_39250
agcaggttgccgccggtcttctcgtggtaggcctcggtgtgctggagttccttctccatcttcggggcgatgaacgggtagcagtagacctggccgtgcgggtgagcgagggagacgccgatttcctggccgtggttctcgaacgggaagatctgctcgatgccttccatcttggagatttcggcggtacggaaggcccatgcctcaaccacggtgcgcaggcgggagaccggcagatcggccggcaggccatcctcgttcgggtcgaagcagatgacctcgcagcggccggcggcgagcttcttctcccacagcgggttgccgtcaacgtaggtcacgtcctcggagacgccgggcacgcgcaccatggaggggaagcggttctcgaacacgacgacgttgtagtcggtgtccggcacttcgccgtcctggtacgggtcaccgggcttgcgggcggccagcgggttgcccttggcggtagcgccggggccggcggtgatcgggcggttcatacgggcggtggccatcgggatccagtcgccggtcagcgggtcgcggcgcatctgcggggcggcgtacggcacttcgttgccgtcggcgtccaggtgcggggcgaaacggtagtccagcgggcgcgggtccttgagctcgcgggtcttggcaccggagacgaactcggggtcgtcgtccaggtagaagaagtcacgaccgtcggcaagcgtcgtcggcgtgatgcggatgtgctccttcgcatactccccgggggtgtagttggcgaaatcagccatgggtttactcactttcctcaatgatctcgctctggtgggccagcacgagttcctttaccaaatccttggttttggcggcggagtcgggatcgagcccgtcgtcagtaatgaccgtgtccacctggtcgaagcgcgcaaacagcgacagcgatgtgcagctccacttggtgtgatcggtcaaaactatggtacgatcggcgatgtccatcatcgccatatcggttgcggcttccagcgaattcggcatcaggaagccacggggaatcgacaccgagtgggtgccgaggaatacggtgttgacacgcagcgaggcgacgaccttgtccgcgatcggaccgacaagcgagttcgatcgggtgatcacgccgccggtgacgatcacctccacgtccttggattcgagggcctggaccagttcggccacgggaatcgaattggtgaggatggtgatgccgctggactgctgcgattcgagcagatgctgggcgaagacataggccgtggtgccgccgccgatggcgatcacatcgccgggagccacatatttgatggcttcctgggcgatggcgtccttcaggccgagatccatctgggacttgacagagaacaggggttcgctgagcaaggtactggtagtcaccgcgccgccatggacgcgtttcagcagtcccttgtcggcaagttcggcgatatcgcggcggatggtcatcgctgacacacccagttccttcgatagcgccgtaatgcgcactgccccgcgcgtgcgcaacctgctcaagatgaggtgctgacgttgtgacgaaatcatgtgaacattatcgcacacaaaagctcacaaaccaaaccggcttgagcgttttggggacaatctctcgaaaattccgggcaattcaggtgttcatttccacaaaaccgcgcaaaatcgcacattgtgcgaaccgatattctcgcagcgaccactagcgcgatgactcacgaccgacgactctcccgagcgcgttgctcagcggcgagtcacgcctgatacctggtgcatcccgattcatgtatcttctgccgagccgacgcctgcgtgcgcctcgacacgcggtagccccttccccaattcgcctaggcaggaatcgcctagccgcaccagcccaagcgtgagacaataggcggtatgacttacgtttctgaaagcttctggcacgacgccgtcaacaaagccaccaccgatctgttcaccttcggctacaagcacatcatcaaaccgaacttcgtgttcaaccaccgccccgatgaggcacacgatcagatgatcgagttctgccacgtcgtcaagaacgtcccgccgctgctgctcgccgagcagctgatgctcgactacaccgaccccattctggaaacgaatgtgatgggcgtcgatttcaccaacccgttcggcctgtccgccggcctcgacaagaactgcgacatgcccgtggtgctggaccatgccggcttcggttttgaaaccgtaggctccgccacctcgcgtccctgcccgggcaacgccaagccgtggttccaccgtctgcctgaatacgattcgatgatggtgcacgtcggcctcgccaacatcggttcggacaaggtcatcgagcgcgccgagaaggcttggactcaggcccgccagatgcagctgtctgtgtcgatcgcccgcaccaacgacgaccagtgcggcgatttggacgaaggcattgaggattactgcatttcgatgcgccgcgccgccggccgcaccgcgatggtggaggtcaacgtctcctgcccgaacacgcgcgtcggcgaaccgttcaccgcgactccggaagcgctcgaccgtctgtttacggcgctcgacaagatcgaccgcccgcagcccacgctggtcaagatgccgttgaacaagccgtggggcgagtacaaggagctgctcgatgtgctggccgagcacaatgtgcaggggctgtccatcgccaatctgcagaaggaccgcaccggcctcgagattccgcgcgattgggagggcggcctgtccggcggcccgtgcaccaacgccagcaccgagctgattcgcaaggtgtataaggagtatggcgaccggttcgccatcgccggcatcggtggcgtctttacccccgagcaagcctatgcgaagattcgttccggctccagcctggtcatgttcatcagctcgctgatgtaccgaggcccgcagcagatcaccgtgttgaagcgcggtctggcccagctgctgcgccgcgacggattcgagcacgtctccgacgccgtcggcgtggacgtggagtgaactcacatattgccctattacccatggggcggtaaaaccctcatggggcggtgattgtcccatggggcggttagccaaatttcacattccgcagaataccgccgtgttgggttaccgccccatgagggttttaccgccccatgggaaagtcaccgccccatgaggattcagtacgcaccggccacgtattgcggggcgtaggggacctctgtggacggtatgcccagcttgttggccgcacgcaacggccagtacggatcgcgcaatgcggcgcggccaatttccacggcatcggcttcgccacgggccaaaatcttggccgcctgcttcggcttggtgataagacccaccgcggtcaccggaatatcggccttggacttgacctgctcggcgaacggcacctgatagttcggcttgaccggaatcgacactcccgacatgatgccgccagtggacacgtccatcacatcgacgccatgctccttcagcaccttggatagtgcaatggtctgatccaaatcccaaccgccagcggcccaatccgtggccgaaatgcgcaccagaaccggcacgccctcggggacggccccgcgcacggcatccacaacctcgaccaggaaacgagagcgaccggtcaaatcgccaccatattcgtcatcacgctcattgctcagcgggtcaaggaactgagaaatcagatagccatgcgcagcatgaatctgaatagcctggaagccggcggccaccgcacggcccgccgccgcggcgaacgcaccgaccagaccatgaatctcatccacggacagcgcgcgcggcgtacgcagcccgccgaacgcgatttcagacggtgccatggtgggccagccgcccgcctcctccggcacactctgaccgtcgtaaccaacggcgaagcaaccggtcgaagccttacgccccgcatggttgagctggatggcaggcaccgcacccgcctcgcgaataccgtccacgatccagcgccaagcatcaatctgcccgtcttcccacaggcccagatcgcacggcgtgatacgcccttcaggagccacggcggtggattcgacgatcaccatgccgaatccgccgaacgcacgagacacgtaatgctggtagtggaacggcgtgggcctaccatcgcaggcgaacgacgaatacgtgcacatcggcggcaaccaaatacgattacgcacggtcacttcgcgcagcgtcattggcgcaaacagtcccggacggtccttgctggctttcttatctgccttgctcacagcttcccttccctcataatcctcataatcctcataatcatcgaacgattcgctcgtcttgcccgcgccggcccgcttcttggaccgtgcgtcggattttgacttcttcttaccgtgcctacggttcctcgatgcatcctcgtgcttggtcttcggctgcttggactgttcgccgtccgaagacgaagccagcgtcaccgctttgagatccggcacgtcgaatccacgaaaatcaaaattctcatgcgtcagatcgtcgtcgctcatcgttcccctttccaatgcgcgttcatggcgaatattcgatgaacgcgctggcgttgtcattaagtattgtaaaacgggcgtcacctgaaacaggtaacgcccgcaaactacgtaatttgggtatcgcagtcgactatgttacgtagactcagccggcctgcaatcaccaaatgtcaaacgccaatcaccaatcactggccatcattcgaccgctctgaattggtgccctgggtttgggtgttgttttgcccagtgttctgcgactgagactgcgactgggattgaccattggtggtcgtctgcgattggctgttgccattcgtagtggtctgcggcacgctgaacgttcgtccgccaatgcccaggtacttgccagtcgtggtgtacttcgagacgggctggccgtaatcgttgtcaatcggtattttcttcttggaaatgtagctattgaagaagttggtaacggccggagctgcgattgtcgaaccatcccaatagctgttgtaccggccattgatggcaatgttggaaatacggttggtgtacgggttctgtgcatcgccgaccacagcgaacgccgcaatctgattaggaatgaacgatccaccggacaccgcaagatcctcactggtaccggtcttaccaaacgacttacgcccgtcagccaatctgaatgaccaaccggcaccatccggccgcaccgtaccttggttcagggtataagcgagtgtttggatgatgtccttatccaccgcctgatggcagttcgcggatggaaccttgagatcgttgccgtccttatcggtcaccttgctgatggcaatcgggttgcattgcacaccattcgaggcgtatacggcgaagatgctcgccatggtcagcggggacacattcaccgagccaatcatcatggatggtgtatacacctgggttttgtcgatggtctcacccgtggcggcgtcatggtatcccagtttggtcgcggtgtccgccaccttgcacagtttgaggatggcgcccatggaggcctgggtggtgttgtgcgatcgcaccagaccgaggaacgggctttccgggttcaccgtgccggcgcccatggcgttcgacacgttccacgaatcggcaccgcccttgtagttgttgcaggcgaagtcggtcgtggggtacgtcgtggtggtctgtaggttgtcgttgatcgaatgacccgcctccatccacgcaatcaggttgatcggcttccaagacgaaccaatggtccaaccggagccgccgccgtccaccagatcgacggcatagttctggcccgacttggtcggatcgttcgcggctgccggagtggcgtcatagtaacgattcaggccaaagctcagcacctcgccggttcccggtttgactgcggccatggctatttccatgccgctgggatcgtccggtggaatggtattacgcgcggtctccatcatcgtggaattcgcttccacatccaacgtggtgacgatcttcaggccaccctcctgcagcaacttgttacgctccgcacgagtcttgccgaattcttcggagttctggatgcgatgcaccacgaaatcacagaagtatgcgtagtcgccggtgtcctggcagccgacgttcacggcctgcaccttcagcgtgtccttcagcggcgtgttcacggcttcggtgtactgcttctgggtgatgtacccctcctgcagcatcagcttgagcacgatgttgcgctggttctcgctttccttctggttctcctcgaccagcggatcgtactggctcgggttcttggtgatagccgcgatggtggcggactgcaccacgttcaaatcggcggcggacacgctgaagtagcgctgggctgcggtttccacgccatacaggttgttgccgaactgggcgatgttcagatagccctgcagaatctcggccttggaatacttcttctccatctgcacggagatcagcatctcgcgaatcttacgggcgacggtgtcttcggtggcatggtactgggcgatcgggtcgtcgtcctcgatcgcctgcatgagcagcacgttcttgacgtactgctgggtcagcgacgaaccaccctgctgggagcctttgacgaggtaggtctgcacgaacgcacgcatcacgccttgcacgtcgacgccggcgtgagtccagaatcgacggtcctcgcgcgccaccactgcctgctgcatggttttggaaatcttcttcagcggcacgacgatacggttttggttgtagaacgtcgcgataacggtggaaccgtctcgcgcgtacatcgtcgacttctggggcagaccggtcacgtcgaagtccacgttttctaccttgagcgacggaatcaccgctttggcggctttattggcaccgaccacacccggtacaaacaacacgctggccgccacgccaccgcagacggcaagcatgatataggccaagaggagaacaagcacacgttggagagtgagggacttctttttgggcatgggccccattctaaatggggtgccctaccaaccgggctcgcggtcagcttccgtgaacatatcatcacaagaaccgcactagcgtaacattggctggaagtcagccgaacggtcagcgccgcgagcgtcgaatcagcatgcctggctggaagatgatgatcgatcgaccgtcacgtgcgatccatccgcggttggaaaagtccatcaacgccttgttcacggtctcacgactggagcccaccagttgggccagctcttcctgagtcaggtcatgcggcactttgaggccctgttccaccggctcgccgaaacgtgagcccaagttgagcaatgtcttggccagacgcgccggcacatccatgaataccaagtcggagatgcgttcgttgttgccgcgctggcggttggccatgacctgcaacatgtcgatggccacacgcggatgctcatcaagccatgcgaacagggcatcatgctccagccagaccacgcgcgtgccatggctcatggacaccgcggacgcagtgcgcgggccaccatgagggtcgaataccggaatctcgccaagcacttcgcccggcgcgtggatggacagcagctgcacacggtcatcggaagaagtgcgaatcagcttgacgcgcccctgctccagtagatacatgcgctgatcggtatcgccttcggagaagatatagtcgcccttatcgaaggtcgcacgcttcaaatgcggcagcagctcctcggcttcggctggcgatacctgcttgaacaatgccgtatgcagcaggatgttctcctcgtcagcaaaagcgtttggcgtttccaagctcatcgcaccatccttattgtcctacgaccgtcgtcggccatccgtcatattgtaacgcgccccacaggtttcgtcagaagcatgccatcattcgtcacttcatgtgtggcgcgatccgatagccgtacgacatgctgacgaatgtgttaccgcgaaaaacggcactgtcgcggttaccgcgctcgcccatgacaaaaccacgcacggccaccggcaaaatcgtatacggccatcggtgaaatcacgccgcaaaccagtcaataaggtgttcgacgatgtgttcgcggctgagacccgtctggcttttcatcgggtccacgcgtttgactgctgatttcaccgctttgtctgacatcttctcgcgactggtgttgagcacacggctcatcttggccgcatcgatgtcatatgccatggtcacatggtgcagcaccgcgccgcctgagcctacggggaagcgccgttgcgccgctcccccgatcttgccgtactgcgaggcgatatcattgaggcccgcgaaccgcacatccaagccaagttcgcgcagcgcttcgaccagccaccagtcacagagccggtaggattcttcgatgcttacgccctgaacgaaatcgagcggtgcatacagagaataggtaatggtgttgcccggttcgataaacatcgcgccaccacccgtgcaacggcgcaccacgtcgaaaccgagctgctcggcaatgtccagattcacctcgtcctgggccgattggaaacggccgatgaccacagccgggcccacccactcccataatcggatggtcggctgtcgtgttcctgctgcgacttcacgcgcccaggtctcgtcaatggccatttgctcgtccggagtacgcggatggtcgtggatcacggtgagttgaggtctgagggcgttccagcgctcccggtattcagagcttttgtcgggctgcttggtttgtgtattgatggatgccggggtgttcggcgcatcggggccgaccgcccccacccgctgcgcgggagcccccaccagcgggggcaagttgctgcttacggctcggctatatgcggttttgatggcaacttcatctgtgccgataatttggcaactagggtgagcgtccaatacggaccgcaatgaatcatcactaattagagcctgttccaagtcacgcaacaaagcatgagattcggcatccgaaactgattcaataaagaaatcaccgctgatatggcatgactgtgcggtgccgtcatcatcgaaggatacggtcacggcgactagtttgccgccaacggttttgcattccccatgtcgcatttgcatgcaactcagtataaacttggctcccctctggaggggagccaagtgggacatcacatgcgggccagaatgtccttgccgacctggtcggtggagcgcacggtggagccgagctcctcgatgtccgcttcgacggcggtgtgaatcttcttggccgcatcatcaaagccgagatgctcgagcagcatggcggcggagaggatggcggcggtcgggttggccttgttctgaccggcgatgtccggagcggaaccgtgaatcggctcgaacatggacgggaactcgtcggaggcgttgatgcagccggaggcggagtagcccacgccgcccaccacggagccggcctcatcggtcagaatgtcgccgaagaggttgtcggtgagaatcacatcgaaacggctcgggtcggagaccaggaagatggtggccgcatcgatgtgctggtagtcgtgggtgacctcagggtattcctcgccgaccttgtcgacgatgcgttgccacatatcaccggcgttgacgagcacgttcttcttgtgcaccagggtgacgtgcttcttgcgcttcatagcgagcttgaaggcgtaacgcaccacacgctccacaccgtatgcggtgttgatggacacctcggtggccacctcctgcggggtgttgcggcgcaccgcgccgccggcgccgcagtacagaccttcggtgccttcacgcaccaccacgaagtcgatgtcgccggggttggcgagcggcgaggtgacgcccttgtacagcttggaggggcgcaggttcacgtactggtcgaggtcgaagcgcagcttcagcagcaggccgcgttccagaatgccggccttgatgcgtggatcgcccacggcgccgagcagaatcgcgtcgttggccttgatgcgctcctcttcgtcctcgggcaggatcgcaccatcgcgcagataacgctcggcacccaagtcgaagttctcatactcgaagtcagctacgccttcagcggccttttccaaagccttctgagcccacggagtgacttccttgccaataccgtcgccgggaataacggcgattttatatgtctttgccatagttcaaggagcctactcgcgcgaccacctgccggcccgaacccgctcagctagtggacacaaccaacatgcgtatcgtgtcgagacattcattaggtcattttagtgttcattaggtcggcgtgggttcatttcagggactgaaatggcggcatttcagtctcacatagaagaggacaccgacctaatgaacgacgaaatgacctaatgagcgagccccatcacatccatgcaccaagcgttctcataggaaacctcttcccattgcttgtaacgcccggatagaccgccgtgaccggcctcgacctcgatcttagccaccgcgtccacgccggcggactgcagacgggccagccatttgagcggctcgacgtacagcacgcgggtgtcgttcatcgaggtggtaatgaagattctcgggaattgcgcggcggcgagcgcgccggcggcagccccatcagcactgccgtcaccggcagcctcgtcgtcgccgccctcgagtacggccaccggcacattctcgtatggcgtgtacgacttcatgtactgatacacctcagggtcatgcaacgggtctccccattcgtcccattcggtgacggtcaacggcaagtccgggtcaagaatggaggtcaacgcgtccacgaacggcacatccgcctcaacaccggcgtagcattcgggcgccatattggcaatcgcgcccatcagcaggccgccagcggatccgccgttggccacggtgtgccaagcatcagccaaatgcgccttctgcagcgcgcgtgtggcgtccacgaagtcctcaaaggaatgcttcttgttcagtctgcgcccctgttcataccaggcgcgtcccatttcgccgccaccgcgaatgtgcggcacggcgtacagcacaccgcgatccaacatgctcagacgagagaccgagaaccccggatcggaggaaatctcgtatgcaccatatccggtaatgaacatcggcgaatcctgcgccgggcaatcgcggtgccagacgagggaaacaggaatgcgttcgccgtcgcgcgcggtaatccacacacggcgttccatgtaatcgcgtggattgaagtcgcccaacacggtggctcgcttcagcagcgcatcttcaccggtggcgggatcgatttcgtgcagctcgcccgggcgggtgtagctggcgaacgagtagcgcatgcgcggcgcctcatacgatgggttgccgccgacgccgatggtgtacaagcgccgggtctcaccgggcaggtggtcgtcgctggcaccatcggaagatgacgtgtgatccgtgggggcctcatcttcggtccacaagatttcgccatgatcgccggtgaagttttcgcgatcggcggcgaccatgtcccagtcgtcctccagggcaggcggcagcagttccgtaaaccgccacggccgtccggccaggaagtcggcggcagccgcgctcttggtcatgtatgccacgtgcggctggccgtcggcacggtagctcagggacacaaagttgcgatgcaacgcgatgccttcgatgcccagaccgtgggcaccctgcaatatcgccggattggcggcgttgaagtatgcctcggtaatcggcttatccggctcaccatgttcacagccgtacggcgacccggcggcgatgcacacgccttcgccgagtcggtacggcggctcatggccacgcatgtcaatgacgtcgatttcgaaattcggattggcggcgttgtggtagaccacggcgagcggcacatccgcaccgttctcccccgcgccttcaaaacaggcaaagctcacatcatattcaatatcgttctgacgtggaatgaaggcttggaattcgccttcaggcgtggccaccggcagcatcagcacttcggtggtggttttggaaccggtgccgatcacgatattgcgctcatcaaaactgatgccgacgcccacccagaaccgttcatcggtttctcggtacacgcacacatccgattcgaccgccgtgccaacacgatgccgccacacggcgagcggccgccaggaatcgtccaattccacccagaacacccattggccgtccggcgtgaagcatgcgctgccaatgccggtgaactgttcgggcagttcgctgaccggctccccggtctccagcccggcaaggtcgcgaatgcggaaatcatatcgttcgtctcccgcaacatccacgccgtacagcatccaacggccgtccttgctcagatccaagccgccgagccggaagaagtcatgcccctcggattccttgttcgcatcaaaaacgacctgttcaccgggcatggatccgggcgcgccttgcggatccacgaccggcgggtcccagtcatcggcatcgcgcacggggatgcggcattgcacgccatactgtttgccctgctgcgtgcgggtgaagtaccagtaatcgttgatgcgcgtgggaacagacatatcggtctcttccacatgcgatttcagctcttcaaacaacgtatgccggaaatccgccagatgcgccatgcgacgctcgcagtactggttttcggcagctacgtagctgcgcacatcatcggagtctttgtctcgcatccactcgtaatcgtcgtcgaaaacgtcaccgtggaattcgcggcgcttcggctcgcgcttggcgtaaggcggcatcgcggccgcggcgtttgtgctctcgtcagtcataccacgcgattataggcgaggcaccacaccgggacacattcggcgttcatcacgccgcgcttatcgcaacaccgtcttcagatatggcagcatggtcttcagaatgttcgagccggtggtgccggtgaatactggtacatcggttaccggagtcggctgggtcgaggtgagtcccgtcaccgacgccaatccggttgattcgcgcgggctcaactcacgaatgacgatcgccagtacacgtccgggatatctgcgggcgatggtggcgtacgtggtcgggtccttctgcccgtcatcgcccaccagaatgaacttcatgtccgggaagtcggccataagttgttcggcaaactcaagtttgtgctgggggccggtgggcacgaaggtcttgggcctcgggtcgaggtcgcgcagcagcagcgggccttcgggaaaaccatggtcagtgatgaagttgcgaatcgaactctccacattccagggcgatgtcgaaagatagaagaacggtgcgccggggaacaagtcggcgatgcgggtgaacagcacgctcatgcccggcacggaggctttcttcttggggtcgaggaacagcaggttgtacgcggccttccatggcaccggggcctgtgtgatcatgatggtgtcgtccacatcggagatgatgccgactttggcgctggcggggatggtgtacaggttggcgctcacgggtttgcggttggccacgctgtaggagacgcgatggatgccgggcaccagacgatgctcggccacgaggtcgaggtatccggcggaatcggagatggcgtattcgctgccgagatcgcgcgtgcggtccaccttgtcatagacctcggagacgccgatctgcacggtgttgagcggcgtgtcatcaatgctggcctgcacgtgggtgcgcggcgcggatacggcaagcatgccgcggatgccgcggatcagttcgccggattgcgcgtgcttgggggcgtataccgtgcggcagatcagacgcgagtaatcaccggtgccataacccacatagggttccactcgcggataccagccccattggcgcaccacctgagtggagatgtgtgaccatacgccgaacacgcgggtgatggcacgacgtatgaatcgggtgatcggcggcttgacctcgatgcgctcacgcttggagggggtgtcgaacgtcgtggcagccttgcgtgcgggaatcggcacggtgggcatgtcatcggaatgttcagcattgctggcattgctggcattgtcggcgccattggcggatgccttgacgtcagagactggcgcggtggcggacagcgctgcattgcgagcagcagcatcccaaggcagtcgcttgcctgccgcctcaaaatcctcgcgtgggcttctcatagacaccaatataggccatacacctcattttcttggctcccctctctgaggggagctgtcgctatgggcgactgaggggagtccccaacatggaaactctcctcagtccgcttcatagccagctcccctcagggaggggagccatgggtggaactaccgcacgaccttcgcgtattcgtcggcgctcagcagctccggctcatcgtcgtcaagctcgaccttcagcagccagccttcgccgtacggatcgccgttgaccacggacgggtcgtccgccacgtcacggttcacatacttgaccgtacccgccacggggctgatcaacggctggacggccttggaggattcaagctccacgatctcgtcgccggcctccacacgggcgccaggctcaggcaaatccacgaacacaagttcgccaagctggtcggcggcgtattcggttatgccgatgattgcggggtcgaccgaacggtccacccaagcatgctcctcggagtattcgaggtggtcgggaatgtcgaggttcagcggctgttcgttttcgttgtcatcactcatagtcataagcctaacctatcttcgcggtccgtcacagctcgcgaccgagccattcctcaatcatgtagcgggcgatggtggcgcggcccggcgccgccatacggccggcgatgagctcggccgtgtattcgtcgcgtgtgacccatcgcgcggtcatggtctcctcgccgtccacatgcacgtcggtggtgatcgcatgtgccttgaacgccatcatcagcgaagccgggaacggccacggctgcgagcccaggtaccgtacctcgccgagcttgatgccggtctcttccatggcctcgcggcggcaggcgtgttcaaggttctcccccgcctccacaaatccggcggacaccgaatacagcctcgaatccttccatgccgcgttgtgttgcagcagcagacgatcgtgcccgtccacgatggcggtgatgaccgccggctccacgcgtgggaacagcacacggttgccgtccgcctcgttggtgcatcgctgcgcccatccggcgagcgccggccggaccgccgcgccacaggtggggcagaaccgctggcggctgtgccagatgcttaaggtgatggcactggtggcttgcccagcctcgcgcgcgttggcgtgaggggcgaatccgcgcaggtccacccagtcgaaccgggtcacggcctgttgcagcagcgtgggcttcggggccaagggctgtacgggcgcgccgaccgaatcatcgaaggcatcgtccgcaccttgtccggctgaatccggtacaccgagcggcccggcgattttggctgcggctacgccgccattgcccttggcgtttcccggctgccgtattccggcggcagcacctccgctgatgccgttcttgcccagcgcaccgtccacggtgccggaatcctgggtgccgagcacgccgccggcagcaccggaaacaccagcaatcccgccaacaccgggaacaccggcttccggcacgcgcgtgatatccacggcgaccacggattcgccgcgcgccccgacataggagccgaggaacatggcgaccgcttcggggtagcgtgccagttcggcggacacataggcgcccggcaacgtggcgagccgcattttcacgttctcatagtccacgagctcgccttggccgcgcggtacggcgacaagtccgccgcgcgtaagcacgactttggtggtcggctcggccaacagctcgtcgatcagaccgggttcaccgcgccggtccacctgatagtcgatgtcaccttgcgcgagcggcaggaacggcagcgcatgggtcagcgccaggggcgaaaaatgaatgtcagtgcccatcgaggtctcctatgcgttcttctgcgcgttctgcacgcgcctgacgagcgagagcagtgctcgcgccacggtatccggatgttcgacggcactgaaatggccgcagtccggaatgtcgatgaattcggcgccggcgattcgctcggcgagcggacgcatcacactcggattgctggaggggtccagttcgccggacaccaccaggctcggtgcgctgatcgtttccggcaccgcccccagttcgggccggccataggtcatgcgctgacgccaggccagaccagccgggttctgttcgttgatccagccggtcatggtcgcgatgaattcaggagtcttcttgacggtggaatcgccatcggccggttgcgcgaagtgcatgaccggttcgaccgagttcgtctgttcggcggcgtccgccatcttcagtcggttctctccgcccacgccgtcggacgcagccatcgtgtcacacaaggccagtccggccaccgtttcggggtacaggcgctggatgtccatcgccacgtagccgcccatcgacagtccgacccagatcgcctgctcgtagccggcggccttgatcaggtccacgtaggctccggccaggcgatccagcgcctcgctgtacgcgccgttggccatacgcgggccggaatcgacctcgctgggaaccggggatgcgccggagccggccatatccggcgcccaaatcgggaagtccggcacatcgttcaggtcggcggagtcggcgagcgccttcgcgcacacgtcccacatgcggtggtccaccgggtaggcgttcatcagcaccaccggcacgccttcgccatcgcgatagatatgattggccaattcgattgccatgaattactccttcacattcacgtcccaccagcgggaagcaaaacaactgtcagattccggcccaggccaacgcctgccgcacgatgcgcccgtggccgttgaccatctgcgccacgaacgtgttcattacgtcgctcttgggatccacccattccacgtccagcgtctcgtcctgcggcttgcagtcgccggcgatgggcaccacgtagcacagtgcgatggcgtgctggcgcggatcgtagtattcgcttagtcccggcgtggggaagaattcggccacggtgaacggctggagcccgaccggtagcagcggcagggcgatatcgcccaaatccttggccacattgcgggcgatggcctcgcgcagcgtctcgtggtacagcacacggccggtgatcagcgtgcgttcgatcgacccgtcctcggatacgcgcagcagcgagcccacctgggagatgcggcccatctcatcggtgcgcacgggcacgatctccacgtatgcgatgggcatctgatgacgcgcccggttgatgtcggccggtcccagccagcccggcgggttgccgtggccgggaccgcccccgtggatgaagtcctcgggcgtgatgttgtcgaattcgccgcggccacggccggcatcataatcgccctcgtcgggcacttcatcattcatgactggcatgcatcccattattgcgcgtcacagcgcgccacgcgtcaccttccagcgaaatcttgggaaacgtttggccggcggcggaaaatacgacacaaatgttgggtggtgctgggaagctggtagccagcagggagccgacggccacgaaccgcacggctccaaacgccaagacgtattgcatgaataaggcaatcgcccggcggccacgcacgagggccgtacggcgacgccaaggaaaacacagaagaagggaacatcatggcaaccaccgctatcacctctgccgatttcgagaagaccatcaccgacaacgagatcgtgttcgttgacttctgggccacctggtgcggcccgtgccgcgcgttcggcccgattttcgaggcggcctccaacgagccggagaacgcgaacatcgccttcgtcaaggtggatatcgatgccaaccaggatctggcccaggccgccggcatccaggcggtgcccacgctgatgatcgccaagcagggcgaggtcatcttccagcaggccggcgcgctgcaggccgccgatctcgacgatctgatcgcccaggccaaggcactcgacctcgccgccgccaaggccgcccagtccggtgccgaccagcaggcctgagcctgattttccttcatccactgcgccgcctatcatggtgggcagtgtgaaatccaatcaaggagcgcaatgacgagacatgccaagccgacccgtatgctcaggccgttgaacaagcgccagtggatgaagatcgcggctgtggtggccgcggcaggtctgctcggcgcggcgggattggtgtcgcgcagtttctaccatgctgatgatgtgaagccgatttccaccatcacttcgttctcggctaccgattcggccgcatcccgttctgccactcgtggcgcaatcaacagcgccgacaagaacaccacgttcattacggtgaagattaatggcgattcgcgcgtagtacttggcgaaaaagccaacatgaccaccgtcaaggacgtgctggagacgggtgatatcacgcttgacccggatgatgccgtatcgccctcgctgaaatccaaggtcaccgaggccaccgtggtcaccattaatcgcgcggatgccgatgtggagaccaacgataccgagatcgccttcaatgaagtgcgcaaggagaccagcagcctgcccaagggtcaggaaaaggtcgagaccgagggccagaagggcattatggagaccacctcgctggtcaagcgagccggcgacaaggtcgtctcttccaacgtattcgcctcatgggtcaagaaggccccggtggataaggtgatcctggtgggcactggttccaccgagtcgccgtcgacgtcgtcatcatcgtcggccgatctcggcaccactgttccggctggagaagttcagtcctgggcgcatcagtatctgttagacaacgggtatagcgaagcggacttcaccgctgcgaactacatcatcaatcacgagtccggttggagccccaccgccaccaaccccacgtctggtgcttatggcttgggtcaggccttccccggtagcaagatggcttccgccggcgcggactggcagaccaactacaagacccagttcaagtggttcatcagctactgcgagcagcgctacggcggcatcgtcgcagcgtacaactactggatcgcccataacaattactgattgcgattattctcggtctacgcaaagagcctccgccggttggcctaaccaccacacaaggggttacccccctaactttataattgcgtatgcaattcaatatcgctcgcataattcacggagacggccatgacctttaatcggtatatttgctttcgtgccatccttgaatccataggtgccattgcctgcatgctgatggctcttattggcaataacctgctcggagtaatcgtggcagcgatcgcggcgctgttgtggatcggcggcgaagtatggggcatgactgtattccgacggcagaacccgcgacgcgacgagctttccgatatgcatcaaagcgcggccatgcaattcgcgctggtcagtttggtgggcattctggtaattgtcggtttcatctacaccacactgaatctgattgaccgctcgatagttcacattattccgccaatgctactgcccgcattggccatgtgcgccttggccatttccgatattcgatatctatggctggaacacgataccggcaccggaggcgacgatgaagactagtctgaaacttcaccggctccaacgcggtatgaagcaatccgacctcgccgatctggtcaacgtgcgacgtgagaccataggaaggctggaacaggggcaatactgcccatcattgcgtctggccatggatttggcgcgggtgttcggcaccaccgtagaggacctgttcagttttgacgacgagtacgaatcagaatccgagtagcccgtcggcgtgtcgcagaaaaatttccctgttgtttaccatgcccatatcgccaatcagcgcaatcgttggaatagcaacgttttcagaacgtcaggaaaccccgctgcaacggtaatgcggcgacaatatgttcgaacgttgtcacatgatgtgaccacgttgtcacacccccttatccgttaacataattaccccttatataccgacaaaggggggtgtatggttgggggctgtaattgaaaaaagaccgattttctattgataagaaccgaatttttattggtagtaaccggttccattgtggaggttcgaagttatgaagaagaagattatggccgtgctggccgttatcgccgcagttctgggctttggttttgcagctaacaccgctatggctgatgattacggtgcaacggttacttacagcggcaccaccgctaccgtgacgttccctgcaggcacattccaaccgaatgaatccgtcaccgtgtactacgatgatgccatcgtcgccgacgtccagcagatcgctgaagtatccaagacgttcactgccaaggcagacggttccttgactttgctgtacacgttcaaggccagccaggctggcaagaccatcgcggtcaaggctgttggcgctgtctccggtaccaagaccgccaccattcaggttccggcaaccggaaccggtgaccagtccggtaccacgactgctaccaccgccaacaccggtgcggccatcgcaccgtacggtgtggccgttgtgctgcttgccgccgcgggcatcgccctgttcgccgtccgcaagagcaccactcgtcgctgacgtgactgacataataaacggtagacgctgaagcatagttcgcgaataccactgaaccgggagtcgatgattcccggttttttcatgttattgctacggtacataacgcacgcatattcgcgaagaatgctcactggaatatatgagggaatgctcacaacacttgagaagggacgttgttatgcaaatcatgtatgtatgcaccggcaatcaatgccgttccgtgatggccgaatactacacccgagccaagcttgccgaccgaggaattggcttgcagagcggcaatatcaccgtgcgcagcgcgggtactctgcactatcccccgcatcccgctgatccgatggttatcgatttgctgaagaacgacggcatcgacgcgaattcccattcttccacccctctcaccaccgatatcagccggcaagccgacctgattctgtgttttgagcgtgagcaaatttccgatttgcttgagcagaatccactggctattcgcaaagtatttctgttcaatgacttcgtgaacgcttgcaaacatatgcatgctgagggtccgattgccggcgataccgccgcagacaagctcatcgaaatcatggattgcgtacctatgctgcggccgtttttgcctacggcactcgaaaccgaagaccctcatcgtcaatcacgcgaggtgtttgaacgcgtgtatgcggagatcaagcacggcgtcgatattatgctcggcgctgtggcctgaatgcaatatcggcgaatagagcaagcaaaaaggccgtcagttattgcgatgttgaaattgcatattgctatattcaatacggctgatattgcgggttcttgtttccgcttttcttggtattggttaaatcagtgctattcgaggagcgcaatacgtaggtcaaatgttcttcaattatgcaatcatgcatgcatatgatttgtataatgcgaaattagctggttacaattagtgacgtaaataaaaaaacacgtgaccaatgcaataaggagagcaattatggcttcattgcttcagggattcgaagaggttcagctggtcaagccggtgggcaagaccgttctgaccgtcaccgattccgccattcgtttcaacaaagccaccgctgaagtgctcggattcccggcgtacgtcaaggtgctgattaacgacaagaccaggcagatcgccgtgaccccgaccaccgccaaggccgacaacgccattaagttcagcaagcccgaaggcaagcaggctgcttcggtaagcgtcaaggaagccacgctcattgaagcagtgaaggcatacttcactctacccgaggctccggaaggcgaaatcgcctaccagtccgtcaacggtaccgcctaccccgaaagcaagaccgtgatcttcgatgtggccaatgccaccgctggcaccatgaagcgccgcggtcgcaagaaggccgcctgattcttccaccttgaaacggtgccctgattgaagacgaggggccggaacccgtaaaagattccggctgttccgctgacaagtcagcggcctcgtctgagactcagaccaagcaacaccagtgtgacgatgatgatggccgtcgaccatccctgtccaacttggttggccagagcgatcaacaggcccgtcatcaggccttcccggtattgtcggtcagatctcggacggttgtcatggtcgttgccttccatgagaacctcctctttagttgtaaccagtcactatgcctgctggcacaatgacaccgtgccaaggtgccacgctagtagttccttggtttggtctgtccagtgtacggggaaggttcgatggatgctggtatgctgtgttgtagcagaaaggtcgcgctagcttcggggcaatcttctcggcggcgccacagactttcgccccgttggacccaactgccgaggtttcctcaacctcagttgttaccaaaaaggtctctggctggtgaacagccagggaccttttactttttcaaattccgggttaagggccagtttccttacctcgatttgcaaggaaagcccgacgccataaggcaccaccactaagaatcgtgccgcaaccgcgctttgcgacccacccaagcaaataccaggcaaataaaattttggcggaattccaacgtttcgcacatgtgaagtacgataaggggctgcggacattttcttggagataatcacgcagccattccttggctttgacggtattgtaccgggctcatccaaccaagcgactgtttgatgcgctcgtggtcgtgccagcgtatgtactcatcgaccaaggcgagcacctcgttgcgggtgtgttcctcccacttctcggggtagaccgcctcggtcttcatcctgccgaagaatccctccgcggccgcgttgtccggcgaacagcccttcgcgctcatggagcgcgtcagcccgaagcgttccatgagcccgagccatccgggccaccggcagtggcatccacggtcggaatgcaccaggggtgtttgtgttcaattagttgttgcgggttgggggtggtgccgttttcttggactgtgatccgaggaggagacggccatggcgaagtacacgagggaacagcggcaacgcgcggtcgagttgtatgtgaaatacgagggctgcgcggcggatgtgatccgcgagctgg

SEQ ID NO: 3417 - DNA, 11591 bp, Unknown
  R151_18m  MAG No. k141_39360
acgccttcgagggactcctcggaaaccggagcgttgagcttcttccaaggggtgccaataacaggactcgtcatgtgtactcctgtactcctgcacgtgatcgtgcgattgattatttctgttcggtcacggttcctgacccttgcggtgccaaggttttccgttcccaatcaatcgtcatggtacgaggacaacgcgacttttgaacgatttcttgcgggtgtgttcgaaattgttgcggaaatttcagtatttgtgcggttcaactgaccgtttgtcaacattagttttttcaacatactttttcagaacggcggaagcatgcggaaatctagcatctggctagaacagcgcacgttcgatttcccatgttcgaaatcggcgtgttgtccgactacaggcatgtagtttgttcgatttgcgcacatagtccctgcgtgtcggccttgtcgccttgaccagtgataatcaggggtgttcagcccacgtaaaattccaatgaacgttaggggaatatcaatggcaaacggtcctgtgcttgtcgtcgacttcggcgcccagtacgcccagctcatcgcccgccgcgtgcgcgaggcaggcgtgtactccgagctggtccctcattccatgccggtcgacgagatcctggccaaggatccgaaggcgattattctgtccggcggcccggcctccgtgttcgagcccggcgcgccgaccatagataccaaggtattcgaatccggtgttccggtgcttggtatctgctacggcttccaggtcatggcctatgagctcggcggcaaggtggataaggccgctctcggcgaatacggcaagacctcagccaccatcgacgacgccgacggcatcctcgccgactcccccgccgagcagaccacgtggatgagccacggtgtggcggtcgaacaggccccggccggcttcgaagtgctggcccacaccgaaggcgcgcccgtggccgccatggcggacgaatcccgcaagctctacggtgtgcagtggcacccggaagtcaagcactccccgcttggccagaagcttatcgaaaacttcctgcaccgttgcgccgcgctgcccaacgactgggacgcctcctcgattatcgaggatcaagtcaagaagatccgcgagaaggtcggcgacgccgaggtgatctgcggcctgtccggcggcgtggactccgccgtggccgccgctctggtgcacaaggccatcggtgaccagctcacctgcgtgttcgtggaccacggcctgctgcgcaagggcgaggtcgagcaggtcaagcacgacttcgttgccgccaccggcatcaagctcatcaccgtggacgcggccgacgacttccttgaggccctgaagggagtctccgagccggagcgcaagcgcaagatcatcggtgagaagttcatccgcacgttcgagaaggcccagcgccaagtgcttgaagaggccggcgcgcgcggcaaggaagtcaagttcctcgtgcagggcaccctctaccccgacgtcgtcgaatccggcggcggcgacggcgcggccaacatcaagtcccaccacaacgtcggcggcctgcccaaggacatcaagttccagctcatcgaaccgctgcgcactctgttcaaggatgaggtgcgcgccatcggcaccgagctcggtctgcccgacgaaatcgtctggcgtcagcctttcccgggcccgggtctgggcatccgcatcatcggcgagatcaccaaggagcgcctcgacctgctgcgcgaggccgacgccatcgcccgcgaggagctctccaaggccggtctcgaccgtgacatctggcagtgcccggtcgtgctgctcgccgacgttcactcggtgggcgtccaaggcgacgagcgcacctacggctcccccatcgtgctgcgtccggtgagctcggaggacgccatgaccgccgactggtctcgcgtgccctacgatgtgctcgccacgatctccacgcgcatcaccaacgagtgccgccagatcaaccgcgtcgtcctcgactgcacgtccaagccgccggccacaattgaatgggagtaattgctctctgtgacgaatgggattctccatcggggaatcccatttttgttgccgacgatgcccggtataattttttcgcttacgacgtcgtccggaaagggatgccgacctctttgcgccagggattcgacaacgaaaaatacatcgaactgcaagccgccaacatctcaacagcgtgaaccgacgcttgcactcggatgaaacgctgattgcattgtcaatcaccagcgacaccagtcctgtggccgctcgcgtcatcgacgggctcaaacagttgcagggctgcgacgcctttttctccgttatcatctcatccacggacgaggcgttgtatcgcaaactcggcatcaacgtgtgctgcgaaccgaagtacgaacgggtgagtctgtatcaccggtaaacgccaccgataagcgcggtatgccgcgaatcgtcaagccggtaatcatgcagcatgcggcctgacgattcgctgctgtcgcattgtctctcccctcgaccatgctgggcttgttttccgtttgttggagagaacgggggatgccattagcactacggtgagagaaggattatccgtgaatcggttcgtgggtctagacggtattaaaggactggcgctgatagccattgtgctgtaccactgcatgcagcaactgctgccaggcggattctacggagtcgacgtgttcttcaccgtctctggattcctgattgccgtcagtttgattcgttctctggcgaaaaccggatcgctgaatctcgtgcgatatatccccaagcgtgcagtacgtctctatccggcgctgtttctgctgattccggtcaccgtctccgtcggctggctgctcgatcacgacattctagtttccatccgcgaccaagtcatcaccgtgctgctgggctgctacaactggtacgccattgccggaggccaaagctatttcgaccaaatgaacccgcaggtgtttcgccatctgtggttcattggcgtgctcatgcagttctacgtcatcgtgccgttcatcgtctggctgatgtggaagctccgccagacgaaactgccctcactcatcccactgggactcgcggcgttcagcagtatcgccatgtgggcgatgtatgtgcccaagggcgaccccacccgcgtctacttcggcaccgatacccacagcatgggcctgatgctgggtgtggctctcgcctggtgggtcaccgctcctcagttgggccacgctcgtcagggagctgtgccgatgccccgcaccattagatcgagcgcttcggccgccacgtaccgggctccgttacctcagattcctgtaaagcatcgcatctggaatgcgacggcaccggtattggcattcctcagcctgattgccttggtcaccatgacggttatcggcaaacaggatgcattcgccttccgcggcggcatcatattgtccagcctgttgtccgtgctgctgattgccggtaccatctccgacgattcctggatgcaaagcctcatggtgttcaagccattggccgccctcggcaagtattcgtacggcatttacctgtggcactggccgttgtggattctttccagcgcccttgccccgaagatcttcaaggcagcagggccttggcctctcatcatgaccgcgttgctcaccgccattgcggtgatgatttcctggctgatggtggagaaaccggcggcaatgcactcggtgatatccgtcgtggtgccccttcgcacgaacaagaagaatcatgcggcccgggttattgccgttgacgttatcctggcgctgtcgttggtcggctgcgcgcagggcattactcatgcacctgcgaaaaccgccatgcagatccagctggagcaacaggccgcacaactggaacgcatacagaaaaccgaacacgtgctgctgcgccatgccgtgccggcaccgcccaagcccaagcatgagatgcccaccggcgatcagattaccgccataggcgattcggtgatgctggcctcatcacagggcctttcggaagtcttccccggcattcagaccgacgcgagcgtttcccgctccatcatggtcgcccccgaactcatcggcaatgatctgtccgccggcagtctgcggcaatgggtgctgatcggccttggcaccaattcggcaatcacccctgatcagctggaccagattcgtaatatgatcggccccgaccgcgtgctggtactggtcaatgcccacggagaccgtacgtggattccacctaccaaccaggtgcttgccgactatgcggccgcacatccggacaatgtggtgctggtggattggaatgccacagccaacgcgaacgcgcaggtgctcggctccgacggcatccacccgagcatggatagcgatatctatgcaaaggcggtcaaacaggccatcgaacaatggatcgcaagcggcaggtgaacggcaggcaacgctgagttgtccaaccggtcgtgaagaacggctatgctgaagactgcatcaacgagaccacacgttgggagacatggtgagcgcaatccttgaagggaagcccgataagaatcttattctcgttacgggaaggattcatccgaaattggctgaggatgtcgccgagcagctcggcatcgacgtccttgaaaccaccgcatacgatttcgccaacggcgagatgtacgtgcgctacaccgaatcggtgcgtggcgccgatgtgttcgtgctgcaaagccactacaaacccatcaacaaggcgattatggagcagctcatcatgatcgacgcattgaagcgcgcctcggcccgttccattactgcggtctgcccgttgctcggctactcccgtcaggacaagaagcaccgcggccgcgagcccatctcctgccgtctggtgttcgacctgctgaagaccgccggtgccgaccgcatcatgtcggtcgatctgcatgccgcgcagtcccaaggcttcttcgacggcccggtcgatcatctggtggccatgccggtgctggtcgactacatccgtgatcgtttccaaggccatctcgacaacgtcgccgtcgtctcccccgacgccggccgcattcgcgtggccgagcagtgggcgcagcgtctcggcggcggtccgctcgctttcgtgcacaagactcgcgacatcacccgcccgaaccaggcggtcgccaaccgtgtggtcggcgacgtcgccggcaaggactgcgtgcttgtcgatgacctgatcgacaccgccggtaccatcgcgggcgcatgccacgtgctgcaggacgcgggagccaagtcggtgaccgtggtcgccacgcatggcgtgctctccggcccggccatcgagcggctcaagaactgcggtgcgcgcgaggtcgtgctgaccgacaccgtgccgattcccgaggaaaagcgctgggatggcttgaccgtcctgtcgatcgccccgctgctggccagcgccatccgcgccgtattcgaggacggctcggtcgccgaactgttcgacacctaccccgagcaccacggtcaaggcttcctgttcgcctgatcacgtgcgtgtttgttcaaggaaagcacacgatgcgagacgcgacatggcgtagtctttcggtaaataccgacagtatggtataaatgaacacttgtgggccgaaagcccacgactcccccatggtgtaatggcagcacacgggtctttggaaccctttgtcttggttcgagtccaggtgggggaacggctgacggccgctcgacatccgggcggccgtctattgttttgaggtgtttccaccctcaatagacattccaatcgaagggaatacgtcagttatggcattatccgcagccatcgtcctcgccgccggcgagggtacccgcatgcgttccaacaagccgaaggtgctgcatacttttgcaggcaagaccttcctgaacagggtcatggattcggtgaccgccctgaaccccgacacgctggccgtggtcgtgcacttccaggccgagcgcgtcgccgaagccgcccgctcctatgacgagcaggtcaccatcgtgaaccaggacgacattcccggtaccggtcgcgccgtgcagtgcgcaatggcacagctcaccgaggctggcaaggtcgatggcccggtgctgatcgccgcctccgacatgccgctgctcgacagcgagacgctgcaccgcctggtcgaattccacaccgcctccggcaacggcgccaccgtgctcaccaccatcctcgatgacccgaccggctacggccgcatcatccgcgatcgcgaaggcaacgtgctgcgcatcgtcgagcagaaggacgccaaccgcagcgaactcgccgtgcaggaagtgaacacctcggtctacgtgttcgaggcttccgtgcttaccgaggcaatcgccggactgaagtcgaacaacgcgcagggtgagttctatctgaccgacgcgctggaaaccgccaaggccgctggcaaggtcggcgcgttcgccgctccggatccgctcaccgtcgaaggcgtgaacgaccgcgtgcagctggccgcgctgtccaagacctacaaccgccgcgtctgcgagcgctggatgcgcgacggcgtgaccattcttgacccggaaaccacttggatcgaggacgatgtccagatcggccgcgacgccaccatcctgcccggttccttcctgcaaggccacacggtggtcggcgaggacgccatcgtcggcccgtacaccaccctcattgacgcaaccgtggacgaaggtgccgtggtcgagcgttcccgcgtgcaggaatcgcacatcggcgcacgcacgaacatcggcccgtggacctacctgcgcccgggcaacgagttcggcgaggatgccaaggccggcgcgttcgtcgaaatgaagaaggcgcacatcggcaacggcaccaaggtgccgcacctgagctacgtgggcgacgcccagctcggcgaccacaccaacatcggcggcggcaccatcaccgccaactatgacggtgtgcacaagaatcgcaccaccatcggctccggctgccatgtgggcgccggcaacctgttcgtggccccggtcgaggtcggcgacaacgtgaccaccggtgccggctccgtggtgcgccacgccgtgccgagcgacacaatggtctactccgagaacacgcagcacaacgtcgagggctggaagcccgcctgggagcgctgaaccatgcccgcacttcaggattccatcaacgccgtccgcgtggccgccgaggccgcagaccgtatcaaggccaccgacatcgtggccttcgacgtagccgacctgctcggcatcaccgacatcatgatgatcgccggcgcctccaacgagcgtcaggtactggccgtggccgaggaaatcgaaaaggacctgttccttaagtgctccggccgtcagccgcgctctcgcgagggcctgaccgagggccagtgggtgctgcttgactacggtgatttcgtgattcatgtcatgcacgaagaatcgcgcgaattctacgggctcgaacgactctggcgcgactgcccggccatcgatcttgaactcgcacacccggaaacggcggagcatgcggacgctgctgccgtcaccaccgcgtaacgtgcgaatcacataacgctgatattcgctgatactcgctgatattcgtgtgtcgggctgcctgttgccgaacgtcattgacggcaccaggcagccctcccttttccctgtttcctcactggaatcgaaaggatcgtcactatggccaatcatgttcgttccattttccttatccgtcatggacgcacttcctataacgccgctcacaagctccaaggccaggtcgacattccgctggacgccgtgggtgaatggcaggtcaagcagaccgccgcggccttgaaaagcctgtacgtcgatcgtcggccggaaatcaaccaccggttcattgtctgctccgatttgaagcgtgcgcacgccaccgcgcaggctttcgccgacgtattgggtggaatcgagcccgtcgatgatcatcgcgtccgtgaacgcagcttcggcgactgggatggccatgccgtggctgaactggccgaacgctaccctgaggacttccgttcctggatggagtctcggggcggtgaactgaagtatggtgccgaacccaaggaagccgtaggcaaacgcggtgtggaggctcttgaggactggtccacgcgtgccggagacgacacggacctgttcgtgttctcgcacggcgcatggatcgcgcagacattgcagaccctgttgggcatttccgcgatcgatccgaccttctccacggtggtcacattgcgcaatgcgcactgggtgcgcttggtgccgatggacaatcccgatggcactgtgcgctggcgtctgctggactacaatcacggtccggccatcgccgacaccgacgaatgggaacgcgaacgctgatcatgttcccgactcccctgctaatccaataggtccggtgcattcggaaccgttcaagcaataactgaatgactcaatgtctgaataatggcggaaacaagccaaaaagtgtcgccaaatcacacttttgtcatttggcgacacgccggcttttgccagaatcgacatctcgtcgtaatgtatacgaggtccgaacaacgggccgacaattgaaaacggggctatagcgcagctggtagcgcatctccatggcatggagagggtcgggggttcgaatccccctagctccacgacgaagccatcaaatcgggtgatatggtggtttctccgctggttcgtggcgggtcttgtgactcccatgaatcggatagcttcactcggggctatagcgcagctggtagcgcatctccatggcatggagagggtcgggggttcgaatccccctagctccacaatcaaggccggtgcttcacacaccggcctttttcgttttctatcctatcgggcgacttttgcgcaacattcccgggaatgcgtcgcaaaacagggactggaatgcatgcagtgcgatactttccccggaaagtatcgccaaggggacgctcttccgattggcgcgacaccggcgtgagagataacagtaatcgccactacaatgaggtgtggtccctatcgtgttgatcatcaaaggagacaaaaacatcgtgaccgtcacccgtgtatatatcgccagccctgaaggcgccaatggccgcaacgtcgtcgcttacggcgtgctcaacgcattgacttccaagtacaagaccatggtgttccgccctgctgtgtccaaccatgacgaattcaccccgatcctgctcgccgcttccaatgccggactcggcgtggccctgtccaccggcctcgatgtgcataaggtgcgcgccgacaaggacaccgcccgcggagacatcgtcggcgagttcaactacgccatggaggtctcccgcgcgaacgccgccctgatcgtcggcaccgacaaatcccacgtcaacgacccgaccacctacgagttcaacgcggacgtcgccgccgatctgaaggccggggtgttcctggccgtgtgcaccatcgaccgctggccgcacgagctcgacgagaccgtcaagctgtccatcgagggcatgcgcgccgcgggcaatacggtgctcggcatcttcgtgaccggctgcgagccgcgtcacgccttctccgtcaaggagaccctcgccaaatacggcctgccggtctggactttgccgcaggtgcccttcaccgacgaatccaccaaggacctggcccttgagaccttccgcaagcacgctcccatcgacgaggtgctcgccgcgctcgatgtggacgtcaccgcgccggtcacgccgtacgccttccaattcgacctgctcggcaaggccaagagcaacaagaagaccatcgtgctgcccgaaggcgaggaggaccgcatcatcaaggcggccgattacctgctcgaacgtgagaccgtgaacctcatcatcgtgggcgacaaggacgccattttggcccgcggcaaggaactggggctgaacagtctggggcgcgcccgattccaggccatggacgacgagaacgtgttgaagcccatggtcgccaagctgtgcgagttgcgcgccaagaagggcatgaccgaggagcaggcccgcaagcaactgaccgacgccagctacttcggcaccatgctggtggtgctcggctatgccgacggactggtttcgggttccgtgcattccaccgccaacaccgtgcgccccgccctgcaggtcatcaagaccaagccgggccagaaactggtctcgggcgcgttcctcatgtgcttcaaggaccatgtggccgtgttcgccgactgcgccatcaacctcaacccggacgccgagcagctttccgaaatcgcgttgcagtccgccgagaccgcacgtgccttcggcatcgacccgaaggtcggtatgctctcctactccaccctcggctccggcaagggcccggacgtggacgtggtcgaggaagccaccaagctgctcaaggagaaggctccggatctgccggtggtcggttccatccagttcgacgccgcctggtcccccaccgtggccgccaccaaggccaagggcaacgatgtggccggacacgtcaacgtgttcgtcttcccggacctgtgcgccggcaacatcggctacaaagccgtgcagcgctcctccggcgccttggccatcggcccggtgctgcagggtctcaacaggccggtaaacgacctgtcccgtggtgcgatggtgcaggacatcatcaacaccatcgccctcaccgccatcgaagcgcagtgagcccggcttagctcccgccagcgggagccactgtaatgcttattttgtagcaagcaacgagtaatctaatcaacggtaacccgtgtctcacgggaacattcaatcacaatggaggatgcccacaatggcgaaaaccgtccttgtcatcaattccggctccagctcgatcaagtaccagctggttgatctcgaatccggcgaaggcctcgcttccggcctcgtcgagaagatcggtgaaccggtcgacggccactacaagcacgagtacaacggcgaaaagcacgagcttgaagagccgattcacgaccacgagcagggtctgaagcgcgtgctcggcttcttcgaggagtacggcccgaacctgtctgaggctggcattgtcgccgtcggccaccgtgtggtgcagggcggctccatcttcccgaagccggccctcgtgaccaacaagaccatcaaccaggtcaaggatctggctgtgctcgccccgctgcacaacggcccggaggccaagggtgccgaagtcatgcgctccctgctgccggacgttccgcagatcttcgtcttcgattcctccttcttcttccagctgccgaaggccgccagcacctacgcgctgaacaaggaaatcgccgatcagtaccacatccgccgctac

SEQ ID NO: 3418 - DNA, 7536 bp, Unknown
  R151_18m  MAG No. k141_40415
gctgtgccgtccttacgctattgttgacactcgcgggcaattagctcagttggttagagcgccacctttacacggtggatgtcaggggttcgagtcccttattgcccacttcatgggacccttgagattccaacgaatcaaacaccccgaacatgcacggcatccacatgtgcccacattttgcccacatcctgcgaagcgacctgcaccgcagcgtcgatggtgcgcgccacatcatccaaatcggaatcgaacagatccgcatagacgtccagcgtcatggccgccgacttgtgtccaagcatccgctgcaaagccttgatgttcgcgccggcatgcaccgcgatggaagcggccgtatgccgcaggtcatgaggtggcaacggctccacgccagccctcctgcacgcgcttatgaaccacgtgcggttcgatttcgcccccgcagccgactggttacgcggaggacggccaagatggtcgcggaaaacccaatcgaacgcccccttgccggccagcacgggaagcagcgcctcgccgactatggatggcattggcacgtcgcgcatctcatgcgacttcggcgaggtctccgaccattcgctaccgattcgcgtgatgttgcgtcgcacgtggattcggcggcgtccatagtcaacgtcctccaccctcaagccgcacatctcaccccagcgcaggccgcataggccgagcaggaggactagcgccttgcggtcctctggctggatgcgtgccttgcctgcctcgtcagcgacggcgagcaattggtcgatggtcagataccggtgcagtctcctgccctcgcgcctaggcaatgccagatcgtcggtcggagccttggcgatgagcctgtttttgacggcgagatcgcagacgcccttgagcacgccgacgatcttgagtaccgtgctcggcgccaatgtctcggccttgctgctgacaaaagcctggagctcgcgctgcgtgatggagccgatttgtcggtcggcgtattcaggagcgatgtgattgcgccaggtgacgtcatccgtatgcagcgtattggccttgaggatcggtttgcgcgtgtcagtccattcggcgtagagatccgatatgagggtgcgtccggctgattggtcgacaaagctgccgtcccttttggcggcattgacataccggtcgccccatgcgtcggcgtccatcttgcggcggaagccgcgtttgccggtcgcgctgccgtccggcttgcggtagcgcacctcgtaccttttcccggctttggtggcgtattggcggatggtgtaggccatgctggtctcctttgctgacatggccgattatatgaaggaccccgacctcatgatgctcgggacacttgggtgccccaagcattatattgaaacagtgtctatcaacacttttcagggctcaggttctgatttaccgccttggcttgctgtaacaagtcaagacttataagacaatataaaagccccacagattgtggggcttaatgcttttagaggctgttcacggcattgtagaattcctgcgcgtcctcggctttcttgaatttcagcggcagtgagcgcaacgcactgtatttccatgtgaccgtgcgcttcttcaacaccacgccctgcaggtcgctcacctggtatgcttcggtcttcttataccggtgcaggtacgtcgtgcagacatccaattccagacgattggcatacaggcggatacccataaacagcgggtcgtcaagcctttcgcacgtgtagatcgcgcccggcgcgggctgtggtctcttcgccatgattgttctccttcgctttccattgattctatgcttcagataatgctgacacgctcggccatgacttggcggtagtcttcgaggacttgtgtcgttatgtcgagttcgtccgcgatctgccagtcgtactcgtacatgcgttctagcagtgcgagttcgaccgaatcgaccaataggagcgctgtctgcgtgcgacagcggcgttcctgcttcgaacgatcgttcgcacaaccatcgtcaccgtgcttccaatgcagcagctcgtgcacgagcgtgcaccgtttggccgtgtacatgagcctgcggtcaatcagtatcacctcggtcgcgtcgtcgtagcagccccatagtccgtccggcaggatggcgctggacacggttacgggcaggccgatgatcgcgcggcgcatggccccgtatgtcatgcgccggtctatcggcaggtcaggcaggctcgtcgtaatccggcccagcctctccattgatggcctcacgcttgccagcggcgttataggcggcaagaccgtaaccgcctgcctgcgctttcctctcggcggcttcgaccgcatggcgtttggagtccatcacgatgtctccgatggatacgccggtcacttcgctgatgcgttctaggtcactcaggttgagcgggcgtgtgaagttctgccgtttgtaccagtagtcctcaccgaagccgcacgccttggcgaattccttgacggtcataccgctttttcgttggagcctgacgcactctcgcatgacttgtttcgcgaatgtggtcacttcgtttgctttcatacccatgcttccattatagccaattacgtagctgttgtgtacaaattgtaaagaactatgcaaattcatagaactaaactacgaatttacgtagagtaaaaaccgttgaaaggaaaaacgagatgttgagcacaaagaagaccaaggcctccgaccgctactcgtgcggccacatgcacggccccggctggcacgactggcgcgcatgcctcaccaaacagggaatcgaggaggatgaatggccggtctgacagaaacagccaccagaaacctcaaagcggaactcgccagacaaggcaaaacaacgaaagacctagcaaaagcatggggcctcgaaatcagggccgtaaacaaccgactcaaaggccgcacgccactatcgaccgacgagatcgaaaaagcagccggactactaggcctcgaaccagaaaacctgacgatgctcctcattcaacccctcgacagcatcaccaaattccacgtctgacaccaaaaaggaaccacaatgacagaccacaccgactacgagacgcgacgagccatcgtcaacgccatcatcaacgaaacaaaagaccacggcgacgccatccgaccactcaactgcgaacgatgggacgacatcaccatagatgaatacgagccgcactgccccgtcatcaccggtgaaatcgtcatcgacctctacgacctcgcggacctcatcctcgacaccatcggcagggaaccctccgaccggggaccggtcggagccgactctcacgtctccgaaccgctagaactccacacggacgaaaccggcatcatcaccgataaccacatggcctggttctcctcctcgtcgccatacacgccaacaaacacggaaaacaaccaatgaacacgacaccgaacccgcccagaccaccgatcatcatcccctacggcgacaccccatacgccctgcaactcaccaacgacggcggcacaaaacttatacaactcaacgccaccggccacaccacgctcgccacactcaaaccatcgcaggcggaaacgttcgcctaccacctccaagacgccataggagcaaccagatgaacaacgctgacggagccatcgcgaccctgctcagaacagccatcaaccaccggctcgacggaaacacgaaggcataccaccgaaccctcaacacgatacgcctcgccatcgaagccaacatccccaaaccagaacagataccacccgaggacaccaaatgaacaggaaaacccgcaaaccgaactacacgctccgccgcatcaagacgctaatcgccatcatcgcctgcaccgcatcgacgaccctgctggtcacgtggcggacggcggactcgcagaccgccaccatcctcgccggcatcatctacctgctgaccggcctatggctgaccgtacggttcgccccacgcgaataagactccccatccactcgtcaggacggggcacacaacttgcaacaagcaaagggaaacaatgagcacgatacgctacatcagcctgttcagcggcatcgaagcggcgacagtggcctggcagccactcggatgggagccaatcgcatacgccgaaatcgaaccgttccccaaagcggtactcaaacaccattatccaaacgttccggacctgggagacgtgaccaaagttgactggaaacaataccaccatgcagcagatgtcgttgtgggaggaagcccctgccaggcattcagcgtcgccggactcaggaaggctttggacgatccacgcggccagctcatgctcgaatatctccgagcttgcgcagagattgatccggaatggatcgtctgggagaacgtgcccggagtactgtcggctgaacacgggcgggctttccagtcgctccttgaagccgtggccgaactctggcctgatggggggggggcggcatggagagtgctggacgctcagttcttcggtgtggcccaacgacgcgagcgtgtgttccttgtcgtcaacactagagactggcgacgtgccgccccggtactttttgagcgcgaaagcctgtgctgggatcatcagtcgagccgagagaagaggaaaagccttgccggaggaactgctggcggcgttggaaacgcagattcaggcatcggaaacttgacccacgatgagaacggtgggcgggatcagtcggctgtcatgctggacttccaccagcaggatggaaggttcagggtcagtgaacatccggacctgtcaaacactctcacctctcacatgggaaccagtgggaacaacgtcccacttgtgaaagcgttcaaatggaatcaaggggaacgctcgcgaagcctggcgatcggcgatgtgagtccgacattgagcaccgaccataatccagccgtctacgaggtggcaggaaacatcatcggtcgtggacaaatgaacggcggacatcagcttggtgttgccgacccggacgaaaacggcgctttcacattgacttccaccgatagacatgcggtggctgaaatcgagagagaggtgatgtgccgggcggacagccaggcgaacgcggcgcggtgctttgatcttgcgccgacactgatggcgcatgcggggaaagacgccccattcatctatccgacagccgatgggagaggctaatggcccttaccttcaaaatacgcggagggaaagcaggggggggtaagggattcctgggacaggaagagctttccgccacgctcagcacgcacaacgaccagtacttatacatggaggattcaatgaaaggtttaacggttcgcaggctcaccccgttggaatgcgaacgactccagggattcccggacgggtggacggacgttccgtggcgcggtaaggatcatgcgccggacagtccacgctacaagtcgttggggaattcaatggccgttccggtcatgagatggatcggtgaaggaattcaactcgtcgaagacaacaaggaacttttcaagaaggaaaccacatcatgaacgaaaacaaaccacaggcggcaacatgggcgctcggcctcggcatcgacaaatccgacccagtgttcatcgccgcactcgacatgccgctggacgcattaaaaggcggcctgatcggcgtcaccctggccgccaacatggacgaggccaccgcgttcgtcgccagaatcgcttgccagtccattgacaaggcgctcagacgtcacctcgaacgcggaggcgacagcgacactccggaaatgctcaccggcctcaacgtcggcccgatgggcgacattcgggacgcccggccatgaccgacctgctcacgccaccgaaggcatgacaccagaacaaattcttcccatgcgcttagtgcgattggcgtatgggacttcgggtggaacggcacgacaggaaccgtccaccggcatcgtacgggcttttgaaaccattcccccatacgaagccggaagcttaagggcaccgaacacggttccgaccgtcgggttcgactcccgcaccacccacgcaaaccatcaacagatcggagaacaccatggaaaacaacaacccagcacgtctcggcaaaggccagacgtacttcatcgaccgatactgcccgcccgacgaccatgagtgacgatctgctcacgccctccgaattggccgtcatgctcggcatgagcgcacgcacccttgccaactggcggtctaacggcaagggcccgccatatttgaagatcggcgtggaaccgcccgaaggccatcaggacaggcgcaaagtcagataccagcgtcaaaccgcggaacggtgggctttggcgcacaagtaccagaggacggtggcgagatgagaaacgacatgttcgttccagcgacacggattaaaagcagtccagacgtcaaaaacgaatacacggacggcgaactcgccgaactgaaaagcatttacgacgagtcaggcaaagcgggattaagccgtgacgaaatgcgagccatgcgcaaagccggactcgtcgcacaaaccacccaaaacacagtaaaggaaccagacaccatgaccgccaccactactccagtccaagaacggaagcccacgactccggagaacccacgcgccgtcatcgcgaacgcgctggtcggcatctacgactccatctcggcattgcagcgtgccgcataccatgccaacgacaaggtcgtctacatgttcgccaccaagctgctgaacagcgaattgatggatttgaaagccaactactcgaaggacgtggcgagatgagactcaatttcaatagcaaggatggtgttttcgccatcaaagccgaaaacgaagaggaaaaaacccagctcaaaacgtcggtgcccgccatctgcaatctcatcatcgattttttcgatgctgaagtccaggaaatgaaggcggcgaaggaatgaaacgtatcccactcaaggacacggaacgctacacggtcgagcggttccggcagtgcaagaaaacggaacggcatctcgcgtggctgaaaagcaggaaggccggtgtgggcggttccgacatgagcacgatcctcggcctgaattccttcaagacaccgtacgagctgtggcttgagaagaccggccgtgtggaaccggaggacatctccgacaagtgggcaatcgtcaagggcaatgccttggagaacgagctcaggaagcgtttccgcgcgaatcatcccgagatgctggtcacggacggtaccgacaagcagttcatcagctgcgaaaagccatacctgcgcgcatcccttgacggcatcctgcaaagggaggacggaagctttggaatcctcgaaatcaagactgcgagcaaccgtcgagcgggggactggcatgacgaggaaggcaacctccgaattccaccctactatctcgcccaagtcgagttctatgcgctcgtcac

SEQ ID NO: 3419 - DNA, 2684 bp, Unknown
  R151_18m  MAG No. k141_40745
tccagcccgctcggccagcaaggctacgggaatgcgctgttgtctgcgcgccaaatcgaggttggcggatatctgacgcatcgcccgactgaccgggattggtgtgcgtgtcggcatattggcacctcctatcccaaatttatataaaatttgtatggactagccttatgcggaggttacgccaatatacgacaagaacgaaccaacgtcagcccggaatcttttcgacgatggtgttcaaggtgtcgaaagtctcatcgatttggtccactacctgcttgccctggttgaccatttcggtgatctgttccgtgcggggttgcggcagcgcataaatcgacgtcttgacgcgcttcaagaccgcaccggcgtcggacaggtcctgcttgatggaagcgattttgggaatggaaagcgtgccgtcggagaagttcatgccggacagcagctcttcgatattgaagtccaccaacgtgccctgcgcggcactgtcgattttgggcagggcgttggtcgcggcgtcggcggccgcatccagcatgccgcgcaccgccttcacgtccgaaccgtaatacagcacgtattcggcggcctgccatagcatgccctgggtttcgtctcgcgccgcgacgatgtgactgccagcgctgtccatctgctcaagcgcctgcttgaagtcgccctgcccgacggattgctgcgcctcggccgcatattcgcccgcctgctgcgcctcgccgatcacccgttgtgccgactgccagaatagccagccggaaacgcccaccgccagcagaatagcgaccagtattgcaataacaacagtgccggtatgtttgcgcttagccataagaccaatgtacctgccactctgaccagcgtcattcgcggattagcatcatggcttgggcctcattctggctcatcggtatgttattggcgatacgtagcggtggttatgcaagtgtcttttgattagtgcattcgcttttccggaacgggattgccgattctgcaggaacctattccggtaggtatgattgtttgcaatggggcggttgacatgacggaacaagagatacgtgcgatgagattggcggaagccgtccattctgcccgtatggaaggcggcgatgtcacatcctcgttttttgcagacgcgcgcgactatatcgaagaacaaatagacgcacacgaattggttaatagcacacgtcgccgatacggtctggaatccgtatgattgaactgcccgaaacctttgaacccatatctgatttccggcacaaacgtactgcgcaatcttatcggtgccacaaccgttacagaacttgaagcggctgaaaacgatcttgtatctgccagaatgttggaattccaatcgaatcctcctgtcgctcaaggtactttgtggcaactgcagcagattcatcaacaattatttcaggatatatacgactgagccggtcaaatcagaacagtagatatcgcgaagggaagcagccaggtctttcagcctcttgcattttttgatgttggcgcgcaatacgccgaacgaatcctggaccgggacatcaagaccgcccgcacccaggaggcgtagaatcaaaccgcgaccgtgatgaacgccatgccgctgtccggctcgctcggggccatccgctccgcgctggccggcgacccgcgtttcgctgacccgtgtggtgaggcgctctacggcagcaaggcatgcgccgacttcgttaacgaagccaagaacatccacgcacggcaaatcgccgaacaattcgcgtcggaacagggcgtgcgggatcagccgaaatgaggcgcgatcctgcgtgaatatgctgtcatgcgattgcttgacatggctggtctgcgaatgcatgttttaccggtcgccattggttggaatgacggcctccagttgccagtggtcttgttcggtgtgggtttggaaggtgccgccgcatgtttcgatgatggtccggtagcggtcgaggccgctgcccagaccgagtctcgtgtcatcggatgcgatggtgtcgctggcggagacgtggatggcgtccgtgtcgaaggtgacgcagatggcgtaccattcgcccgggtcggcatgcttggcgatgttcgcgtacagttcctccagcaagcccgccagcaggcgcatggtctccggcgtgagcggccggcatggttcggcaagcaggttgtcgccggtgaatcccagggcttcgagcctggactcctcctcatcgatcagcgattgcagaccggcacgctgcgcggcgatgccgacttctgcgggcacggccggctgccgcactcaaatcgccatcggctggttcaaagcaggatgtaaacccgctatttgcccaacagttcgtcatggctgccggttcgcatgaacatggcggtaccatcatcgcgaatccatagaagcagccagtcgccgtcattgccgatgtgacattccagtacgtcgtttaaatcaccggtaagtgtgtgggcgcgatgcctacgcctcaatacttccttggagtccgccgtgtcctcaagcaccagacgaatgacttctttcagcgggcgtaaatcagcgtgcttgcgtttgagcttcttgatatctcgctggaatgccgccgtgtaatccggtttgagcattgatcagattcccaacgaatcga

SEQ ID NO: 3420 - DNA, 14452 bp, Unknown
  R151_18m  MAG No. k141_40757
aagccgaccacgaaacaggacgcccagccctctacgacaacgctatcgacaccgactacacccactcaatcggcattcaaaaaggccaaatctaacccccgcgacacgccgagccagacacacattttgacccttaacccgccgaacatgatggagaagatcggcagatcacggccgcgcgacttataggcgctttcgaattcgtcctgatgatcggagttggagcggccgtcggtcatgagcacgatggcggtggtgtattgcgaggcttccgactcgctgggcagctcgtcgagcgcgctcagcaggccttcatagatatcggtgccgccgctggcatcggtggcatcggcctcatgcagcaggtcgctggtgcttgtgccagtggccttgaccgggcggtgggcctcggtttcaaacgggatgagaatgttcacgtcgccgctggcgggctcgatgtacgacttcttggcctggtccgggtcgagcgccgcgttcaggcctttgaccacgccgttcttgccctctccagacatcgaaccggagtaatcgaccacccaaatggtccagctgggtttcctgagcgcggtctggtagacgttgagcgcgctgtcgatcaccgtggcggaggtcatggagaacgtgagtttgccgtcgctgaccgcggcgaggatgtccgcggtggagacgggcttggtggcgccggtgtcgtcagcccagccgagtttgacggccttggatttggcgatgccgaacacgatcggcgtggtggaggtgctggccgcgtctttgacgatgtgcttggtgtctcccatcgaaatccacatcgaggaggcaggccagacggcgtcgtgatcctggccgccggccttgagcgcgttcataatctccagcgaacccatgtagtgcatcgtcacggctacgttggattggtcggccgctttctggatggcgacggcgacttccttgttttcggagccggaggcaatgctcagggtggcagtcggtttgccgccggacggctggaaggtctgcgtggtggcggacgtgccgttgccgtccgctgtgccgtcatcggaattattgaacgccgtgcaaccggtcaacgcgagcacgccggcacataccgcggccgcaaccgcggcggcggagagaagacattatgcccataattccatggctctcccgccatctaaagcgggccgggccacaaggtgaccgcacggtgaacaatgggtgaagagctacatcagtacgcggcgcaggcaatcatggggtcgtcgtagaagccgaggatcttttcgaggtagggcttgtaagtgctgttgggcatggagaagatttcgtggcgcgattcggggaagcgcacgatgttcgcctcgccgccgccgtccttgaccagttggacgaagtgattctgcggcttattgagtacccagatgtcgcgtccggactggaagagcagcaccggcgtctccacttcggcgcaggcggacggattcagtatggcccggttgagcttcaacgcctggcgcacccattcgaacgccgcgcagtaggtctggtattcgctattctcgcaacgcagcttgaagtaccagcgttcacgcgcctcggaagcgccctcgttgccttccatcgagaactccggcgtgaagtccgactgcccgaacacacgcttcttgccgaagccgagtccgcacagcgcgccgaccagcacacgggccacgcccagcggcatgccggtggcgggggcgaccatcggggcggagagcaccgctttgtcgaacagggtggggtatcgctccaacacggccgcgccgatgccgccgcccatcgaatggcagaacaggttcagcggcatgccggccgcgtactgctggccgatggtttcggcgaagccggccagatcggccacgtagcgctgccagtcatcaatccacaccatgcagcggttgtccacgtcgcgcgcggacttgccgtggccgcgatgctcgagtacacacaccgagtagccggcaagcaggaagtaccagacgagctcgtcgtacttttcggcgaactcggtgaagccgtggctgatgacgatggccccgcggaaggtggcggtggcgccttgctcgcgaatcgcgtcgaatttggcggagtcgtagcacaggtagtgcagctggcccgagcggccgccggtgtccataatgccggacagcggctcgatcccggccgaacgttcggcggcggacggatcgaaccagccctcctcgcggcattgttcgagcgcgggcagcaccacgtcggtcatcgtttcggcgtacttgttttcgtcgatcatcgtcacctgcatggctcccatcttaggacaagcctcacgcccacacctcgcacccacaccacgacacattcccgggaatgcgtcgcaagcctgcgcgccactgaccgcacaggcgcgtaggttgtgaggtatgagcgaaaccaatgatgtcaatgacgcaatcaagcatttcccacgcctccgggcgcgcacgctgcgcttcggctgcggcgcaccgcgctccgcacagaccgtgggcgacggctcgcgggccctgttcctgcgctccgacggccccgaggatctggtgaccgcactgtggctgagctggttcgacgagtccggcgaacaccatgagaccaagctgtccgacccgcgcgaactgttgggcgcaaccgccgacagcgaggacgtgccggccgaggagaaggcccgccgcgagcgtgcgcgcgaaggcggcaccggcatcgtcggctactccgcagacgatgacggcaatcgcatcgtgttcaccatcaacggccgcctgttcctgaccgacatcgattggaatgacgagaccggcgcacccgagccgcacacccgcgaactggccggcgaatggctcgatgaggacccggagatgtacacgccggtgctgaacccgcgcatcgccccggatggcgagcatgtgctgtacaccacgggcagctacctgatgctggtcgatatcggcggcgagctgggtgaccgcatcaccgcggtctacggcgtgagcgtggaggatgaggacggcaatccggccgaaaacacgtggaaaatcggtctggccgagttcgtggccggcgaggagatggaccggtacgacggtttctggtgggccccggattcgcagcacgtgctgttcgagtccttcgacaccgccgacgagccgacctggtacatcagcgatccggccgaccccgagaagccggccgccggccgccgttacccgcgcgcgctgacccgcaacgccgacgtgtatctgaccgtgatcgccctggcgttcgatgagaacgaccggtacgcgggcatcaccggcaacgccgatgtggattgggatcgtgaggcgtatgagtatgtggccgccgtgagctggcgtcgcggccacgatccgctggtgctggtgcagaaccgccgccagacccgcgaccaggtgctcgaggtggcggtcgcggcggatggggccgcgctgggcgccacgcgtgtgcttgaggagcacgcgaacgagcagtggatcgacttggttcacggcacgcccgcctacacgccggatgatcgtctggtgtgctcgctcaacgatatggccacggataccaaccgtctgacggtggacggccgaccgttcacgccggctggctggaacgtgcgcacggtgctcgccgtgaccgacgaggatgtgctggccgtggtgcagcgtgcgcccgaaatcgcgaccgaggtgccgcgcgcctgggccggctcgggtgccgcttcggatgccgagtctctgttcggcggccatgacgcccgcagcttcgatgtggtgagcatgggatatgacggctcggtcgcgccgatcacgaccgagcccggtcagtggacggcctcacgcggcgcacgcggcatggtggtgtctgggcgcgatatgcgttccgcccgcgcccggatgcggcacatcgtcacgcgacgcgccgtcggcggcgtcaccgatgccgtcatcgccgccaacaccagcgatgccgccaacaccaccgacatcaccgccgccgacatcaccagcaccgccgcggaacccgggttcacgccgaacgtcacgttcacgcggctgggcgagcaccggttgtacacggcgatcatcgcgccgagcccgtccagcccgtacgcccatgccgacaaactgccggtgctgatgaagccgtacggcgggcccggcttccagcaggtcgtcgcctcccagtccttctactgggagggccagtggtgggccgaccagggcttcctggtggtcacggcggacggccgtggcaccacaggccgcggcccggcctgggatcgcgcaatcttcgagaacatgaagggcgtgacgctggccgatcagatcgaagccgtcaacgcccttcccgaggccgtctccaggctcaacgccgatgggcgcaggcccggcgttcccgcaccggacctcgacaaggtgtgtatgatcggctggtcgtacggcggcttcctgtccgcactggccgtgctggacgcgccgaacgtgttcaaggccgcgtgcgccggcgccccgcccaccgactggacgctgtacgacacgcattacaccgagcgctatctgggcctcgacccggatgtctactaccgcaacggcatcgtgcaggacgcaccgaaactcgagcgcccgcttatgctgatccacggtttcgccgacgacaacgtcaccatcgcccatagcctgcgcctctcgcaagccctgatggcggcgggtcgcccgcacaccttcctgccgttgacgggcatcacccatatgaccaacgacgagaccgtagccgaaaacctgctcaccctccagcgcgacttcctgcgcgacgccctggcctgaccggccccgggcgcgccgtgggccgtgacgtccgcggcacgcccggggcccgcgcccacacggcatgcggaaaaacggcgcaggtggtgcgccgcacccatttccaccctgaatttttggatatttttggatattttgcacccatcgtcatgtgaaagaccggttttttgcctcatattcccatcaccgcgtaggatgggtgaggattagaaagggaggactatgagcgttctcgaccgttttgaaaaaagcgtggagggtgcagtcaacggagtattcgccaagtttggctccaaagacctgcagcctgtcgatctttccagcgccttggagcgcgagattgacgccgaggccatgcccgtgggccgtgaccgcacggtggccccgaatgaataccgtttcaagctcagtactcctgacttcgaccgtatcgaggcatggggtagcgagaccctggccaacgaactggccgataacctcaccgagtacgcgaagagccagcattacgccttcgtgggcccggtgatcgtgatcttcgaggaagaccttgacctgtccaagggcaacttcaacctcacctccgaatccgtgcagggcaatgccgtgccggtcaccaccgatgcgcagaccgaggacagcccggtgctcgaggtgaacggcaaccagtacctgctcaccaaagacaagacggtaatcggccgcggttccggctgcgatatcgtcatcgacgatccgggcatctcccgcaagcacctggaaatcgacatcacggataacggcgtgatcgcccgcgacctgggttcgaccaacggcacgtacgtggagggccaccaagtgcccgccgccacgctgctcgatggcaacaccatcaccatcggccgcacccgcatcctgtactgggcctccgcccaagcccaggagtagtcgagcacacgcccgaaagccgcccacccatgaccgaactgacattcgccctgctcaagtatggattcctgatcctgctgtggatattcatctggctggccgtgcgttcgctgcgcaaggacatcgagacgttcagtccgcgaccttcgcgcgcacgccgccgccgtgagcgtgaagtgcataaggccaaggccgaaacgccacaggcagctgcgccgcgcccgcatcgccggcccagcgcttccgcgtcgtccgtcgcctcggcgcagcctaccctgttggtcatcatcgatggtccgcttgccggcagctccgtgccgctggccgaagccgacatcgcgcttggccgcgccgcctcgaacaccgtggtgctcgatgacgaattcgtgtcttcccaccatgcccgcgtctaccgtgacacgcgctccgggcagtgggccattgaagacctgaactccaccaatggcaccgtggtcaaccagcagcgcatcaaccgccccaccatcctgcccgctcgtattcctgtgcgcatcggcgccaccaccttcgaactgaggtagccgcatgccaaaatccgccgcttcacaaccgctgttcctgtattccaccacggtgtccgatgtgggcactgtgcgcgcgaacaatcaggattcctccttcgccggcgagcatctcatcgccatgtgcgacggcatgggcggtcacgccggcggcgatacggcatcctccatcgccatccggtcactggcccacatcgagcaggacgacaccggcggcaacgtcgagacgatctcccgcatgatggaaacctccgttatggccgcgcatgacgccatcgtcggcaaggccaagcgcgaacgcaagcttgccggcatgggcaccaccgttaccgcagtggcattggtggccggctactgggtcatcgcccatatcggcgattcgcgcgcctacctgctgcgcgacggacacctgagccgcatcacgtgcgaccacagctacgtgcaacacctcatcaacaccggtcgtatcaccccgtccgaagccaagaaccacccgcagcgcaacgtcgtgatgcgcgtgcttggcgactttgacattgacccgcgcccggatatttcgattcgccgagcccaccccgccgaccgttggctgctgtgctcggacggcctgtgcggtgtgctggaagattccaccatcgaagagacgatgaccacgctgtccgatcagggcgaatgcgcgcagcgtctggtgcagatggcactgcgggcaggcagcaccgataatgtcacggccgttattgcggatgccacgttggcgttggatgccgatgcgttcgatctgccgcaccaaacgccgttggtcggcggtgccgccagccgtaatcttgagccgatcgccgacatcgtcaacgagccggtggctaccgcgcccgcgctgcgtgaggatgattcccccgcccagcgcgccgcagcattgattcagcccgccagcgcgcacgagacggaggccgcgcaaaccacggccgaaccgtcgtccacacgcgtggtgcagccgtccaccgtccgcgaggagaccggtgaacgagccaatcccgataccggtgagattccggtggtgcaaaagccggatgggcgcctgtccgccgaccccaacgacccggatgtggccaaagccatccgcgatgagcagatcgagcagaagaaggccacgcgcaccaagaagcgccgcaataagcttgcggtgattattacctgcattcttgccgtgctggccttggccggcgctggctggggcgtgtacacgtggagccagacgcactactacgtgggagatagcaacggcaccgtggccatttatcgtggcgtgccgaccaatctctttggacttgagctttcgcacgaagtgcagaccaccaatatcgccaccgcggacctgcctcagacatggcgtgaccagctgagccaaggcatcacagtcggttcgttggacgaagcgcagtcgcatgtgggtatcatccgcaccgaaatgcgcaaactggccaagcagcaggaagccgacgccgccaagaaggccgaggcgtccaattccctggacagttccaaagacagttcccagagcgattccaaggacagcaccaaggattcgtccagccagtccggttcgtcaagctcatctgattcctcggataaatccggtatcggagcggccgacaacgcggccacgggggattctcaatgatcgctacccgtctacgtcagatttccttgttgctgattgccatggcgatcagcgcgttggcgttcatccagatgttccaacgcaccgccggcgaattccctatgcaatacgccggcatgctggcattggtcgtagtgctgtttctggtgctgtgggggctgattgtgcgcttccagccgtacgccagccagtcgattctgccttgcgtgctactgctgaccgccaccggcgtgaccatgatcgcccgcatcgaccagagcgaaggttgggcggtggcccaacgccagctggtgtggctgtgcatcgccatcgtgctttccgcgctgctcatcatcttcctgaaggactaccgcgtgctacgacgcttctcctatgtgtcgatggtggtgggcctggtgctgctgctcgccccgatgctgccgttcatcggcatggaggtgaacggcgcgcgcatctggatcaggattccgggattgggccagttccagccgggcgagttcgccaaactgttcctcgcgttcttcttcgctgcctacctgttcgatcatcgcgaccagctggccgtgggcggtaagaagatgctcggtctgcagctgccgcgtatcaaggatctcggcccgatcatcgtggtgtggatcgcctcgatgggcgtgctcgtcatgcagcatgatctgggcacctcgcttatgttcttcgccatgttcgtggccatgctgtacacggccaccggccgtaaaagctggatcatcatcggtctgatcgcgttcgccgcgggtgccgtgctggccgcaggcatgttcagccacgtgggtcagcgcatcgacgcctggctgcacccgttcagcaacgagcaatacaacaagacccccggcggctcctggcagctggtcaccggcattttcggcctggcatcaggcggcatgctcggcaccggtctcggccaaggccatccttcgctcgttacgttcgcgaactccgatttcatctacgcctctctgggcgaggaactcggtctgatgggcgtcctggccattttgatgctctacctgctcatcattgcctccggcttcatcaccgccatgaaaatcaaggatggcttcggcaagctgctcgcttccggactggtgttcaccatggccttccaagtgttcaccgtggtcggcggcatcacgctggtgattcctctgaccggtctgaccctgccctatatggcggccggcggctccagtctgatcgccaactatattctcgcgaccctgctcatcatcatctcgaactcggccaatgcgcccgagccggagctgacctcggatacgttccagtacgaggctttggccgtgctgcgcaacaaggaacttgaggcccgagcccgcgccactgagccgatcgttcagcctcgcagcgcgtcggctacggcgtcgcagtccgaggcggaatcgtttgacgaccccattgtggatgccaccactccggcgtatgccggcgccgatgaaccgtacacgcctaccggtacgattcccccgcttcctcccgttaacggaggcactcgcgtatgaacaaatatcttcgtcagcttttcaccgccgtggtcgcgctgttcgtgattctcggcctgtcgtccaccatcatcatggcggtacgggccaacgcgctgaacaacgatccgcgcaacgcccgttcgctgtaccaccagctcggtgcctaccgcggtgccattctggcctcggacggcacggtcatggccaaatccgaaccggtcaacgacgcgttcaaatacctgcgcacctattccaacggtccgctgtatgctccggtcaccggcttcttctccatcaaccagaccgccgatcgcggcctggaagcctcccgcagcatgctgctcaacggtgaggccgattcattgatctggcagcgggccaaggccatgctcaccggcactacgaatcagggcgcgtccatcgaaacctccatcgaccccaagctgcagcaggttgcctacgatcagctcggtacgcgcgatggtgcggcggtggccatcgaagtcaacaccggccgtatcctcgccatggtgagcacgcccagctacgatccgaacaaactggcgacccatgacgccaaagccgcgtctcagtcctacaacgaactctctgcgggccaaaatcaaaatagcccgctaatcaaccgcgccacctcgcagctgtacccgccagggtccacgttcaagaccatcgtcgccttggctgcgctggaaaccggcgattatcagacggacacgaagattcctgcaggctccagctataccttgccgggaaccgccacacagctgccgaacgacgaggcacagggcgatggcgtcaacggacagatctccctgcaagaggccgtcgcatggtcgtccaacaccgctttcgcccagcttggcgtgaaactcggcgcgagcaaggtttcggacatggccaccaagctcgggttcggcagcaccatcaccattgacggcaccgaatccacgggcaccccgatgacggccaccgcgtccacattcccctctgatccgaccgacgacaagcttgcgctggcatccatcggccaaggcgacaccacggccacgccgttgcagatggcgatggtcgcgcaggcaatcgccaacaatggcaaactgatgcagcccacgctggtcgatcgtgtgcgcgccgccgatctcaccgtactttcgcagaccaaaccgcaaaccatggccaacgcgttcagcaaggattccgcagacaagctcaccacgatgatggagagcgtgatgaccgaggccaatccgcagctggccatcgacggcatcaaggtggcgaccaaaaccggtaccgcacaaatcggtatcgacaactctgccatcgacggctgggcgatcggtttcgcgccggcggacaatccgcaaatcgccgtcgcggtgttggtgcataacacagatgtacacggttcgctcgccgctggcccgatcatgcgcgcgatgatgcaggaggctttgcaacagtgaaacttatcgaaggacagcttattcaccgccgatatcgtcttgattcgcgtcttgcgcaaggcggtatgggcgaggtctggaaaggctacgatattcagctcggccgtgaagtggccatcaaggcgctgcgctcggacgtgaccaacgccgaggccaagttgcgccgcctgcgtgccgaagcccataattccgccaatctggcgcacccgaacatcgctgcgttgttcgaatactacgagcatgacggcatcggctttctgattatggaatacgtcccctcgaaatcgttggcggatctgttccatagcaagggcgcgatggatcccatcgaactgctgcccattctgattcagaccgcgcgaggcctattcgtggcccactcgcacggcgtgattcatcgtgacgtcaagccggccaacatcatggtttccgacaccggcgaagtgaagatcaccgatttcggcgtgagctactccaccggccaaggccagatcacccaggacggcatggtggtgggcaccgcacaatacatctcccccgagcaggcgcagggccagcaggccacgccgcaatcggacatctattcactgggcgtagtggcgtacgagggccttgccgggcatcgtccgttcaccggcaccactccggtcgatatcgccgcagcgcacgtgaacaatcccgtgcctccgctgccgaactcggtggacgtccagttacgcgaatttgtcatgtcgatgctggccaaggacccgttggatcgcccgaaagacgcgctggtggtgtcccgtacgctggcacgcatcgaacgccgtctgctggatcagcagaccgaaatggccgacaccgccatggccacgtccggcaatcgactgccgcgccgagtgaccagcacgccacgcattgttttggaggccccggcctcaagattgggagggaataagcaatgagcaccagtatgcccaccgcattggccggcggacgctaccagcttggccagctcatcggtcgtggcggcatggccgaggtccacgtggctcttgacacccgtctgggccgtaccgtggccgtgaaaatcatgcgcgccgatctggccaacgacgacatcttcctggcccgtttccgccgcgaagcacacgccgtggcccagatgaacaacccgaacatcgtgaacatctacgattcgggcgaagaactggtttcttccgaaagcggcgataccgagcgtttgccgtacatcgtcatggaatacgtcaagggccagaccctgcgcgacatcatcaaggtcaacggcgcactcagccagcgcgactgcgaacaggtgatgttgggcgtgcttaacgcgctcgactattcgcatcgcatgggcattatccaccgcgatatcaagcccggcaacatcatgatttccgagcagggcgcggtcaaggtcatggacttcggcatcgcccgcgctctggacgattccgcaaccaccatgacccagtcgcagggcgtggtgggcaccgcacagtacctttctcccgagcaggcgcgcggcgagaccgtcgacatgcgttccgacctgtattccgccggctgcgtgctctacgagatgcttaccgggcgcccgccgtttaccggcgattccgctgtggccatcgcctaccagcatgtctccgaagtcgccacgccgccatccgccgtggtgccggggctgccgaagatgtgggattcaatctgcgccaaggccatggccaaggaccgccagaaccgctacgccacggcctccgaattcaagaccgacatcctgacctacatgaacggcggcgtgccggtggcggccgcgttcaacccattgacggacctgtcgaatatgaaggcccgcaaggaagccgaacgtgatttgcccaccacgccggtggaaccgcagcagcagcccacccaggcattcaacccggtgaccggtcagttcgagcagattccaccggccaatggtgccaactcagcggcgttgcagtcccgtgcgcagcagcgtgcggcggcggccaaggccaagaagcgcaagaagatcatcatcggttcggcgatcgcggcgattgtcgcggtgctcgtcattgtgggcatcatgttcgccatgaacggctccgacaacaagtcctctgaagacaccgtcaccatccctgaagtgtgcaacgcttccacgtccaaggacaacatcaagctcaagcttgagagattgggcttgaagatgaccgaaaagcaagacaccgactccaccgagccggaaggcacctgcaccaagatgagcccggacgccggctccaaggtggccaggggatctgccgtgaaggtgtggttctccgcaggcccgcagtccactcaggttccggatgtcaaggagcgcagccaggaagaggcgcgcagcattctggaaagcgccgggttcaaggtgaacgccaccgtcaaaaccgaagacagcgccgacatcgccaaggatatggtgacgagaaccgatcctgccgccggtcagtcggttcccaagggcaccaccatcaccatatatgtttcttccggcatgaccaccgtaccgagcaatttggtcggtcagtcgaaggacagcgtgctacagcagtatgagggcaagttcagcttcaccgtggagcaggaaagctccgatacggtggaggccggtctgattacccgcgtaagccccgattcgggctcttccatcgcgcagggcgggtccatcaccatctgggtgtccacgggcaaggaaaaggtcgctgtaccgaatatcaccgctggcactgactacgccaccgccgaactcatgctcaaggccgtgggcctcaaggctcaggccagtggcccaaccgacagcaccgctgtggtagtcagcatcaatcctggcgctggcagccaagtagatgcgggatcgaccgtcaccattaccacgaaggccggcagcaccggaggcgacaccggtaccggagacggtggcaatggcaacggtgccaacaacggcaacggggggcggaacccgtgagtgagtgagcgccgggcgtgtgtgttgcgcatacgcaacgcacatagcgcaacacatgcgcaacacatgcgcaacgtaaacacgcaacgcaatcacacaacgcaaaggggaggggcttctgcacccctcccctttgctgtataaagagctatcccagcgcaacattcccgggaaagcgtcgccgcgcgcggaaaagctacttcgtaaccttgggctgaaggccggcggacttggccacggcgttgtcttggccgcagaccttaagccagttggccaatagacggtagccgtcctgggtcatcaccgactcgggatggaactggacggcatacatcg

SEQ ID NO: 3421 - DNA, 3991 bp, Unknown
  R151_18m  MAG No. k141_41495
ccctggattattgccggtcaccttgttgcgatcggcttcgatgtacaatcggccattgtccagtggggcggcggcgttcttgctgatggcgtgctcactgaagacgatggtcaccaatccgtctggagcgatcgtgtacgtgccgagatcgtcgttgagcgtgcccgacatggcggtaccggtgccgttgaatcccgcgatgtggtatcggaacacgtggttgtcttcggtgatgcttcctttgggtatgacgaattgcgcgtcaaaacggaattgggctattttcgtgctgtaatcgaacgagacattgccgtgttcatccacgggaacgttctgccattgcgtcgaattctgcaatcgatattgcactgcggcattgctgatgcagccgaccaatcggccggaaggctggctagaatcaacgacggtgccttgctcgtcctgattccaaggacgtccgcacgccggcgtctgttgcgcggcatcgacaaccccccccccgtcgacggcggcggccgtggcgaccggtacgatcatgccgacgaccagcgcgacagccgtcgccaaccgcgttaaacgtgtgaccataccagaactccgcacatactgacggttcatcgcttcgcgcgaaccatcgtgagatagtgaccgcaagggatgcgcttgtttgaatgcgcgccgaagcacacgtccctaaacgcgaaaacgtaaccctttattcaacaaatgttatcacttgtatcatatgtcggcatatctttgtgccgggatatggaaccggtatacggccgcgcctccggccgcgcgcgtatacgaatacttcgcgccgctttccgcttctatcaggaacagttacctgaataaaccgggttacctgaataaaccggacagttggctccatagcgacggcttgcgcagcaaatcatcaccctcgccctcgccaggcgcggtttggttcaccgcataggtgtaggcgcgtttggaactgggcttgcccaccagttcgccaaactccagcaattgcgtacgcggctcgtaagggtgacggatatcaaattcgatcaatcgcgtggcacgtttggccggagccggtccgtacgtattgaatccgcaggttggcgtagcgataagcaacagaccctcatgttcgccgacgaaaccgttgcgatgatcatgaccagctacgacgccgaaatacccctcgcgcagcgcctcaaactcgtccgactcatccgggcaggaaatgccttcccccagatacccgccggcttgagtgcgatcctcgtccagcacataataggtatccgcatgcttgcggtagccctgcatggcgaaagccgcattggcggccaccggtttgagtacctggtaatactccggcagcggcatgtgctggaacaccattgatttggctccgatatgttcgggcaaagccttgaggaaggccaatgtctcgggcgaaggcgtgccgaaaccgcctccatgcgcatagtcaccggaattcaccagtaccagtcccagtacgttgcgcgtgcaatccacatccatcaccggcaatgcaaaagtgccgggaatggtggacgcggaaatcggcgcatcggtttcttcaccattggttgccgcaggcgagccgtccttatgacacatatatacggtctgcttggccagcgcatcgctcggcggattgatgcaaccgggaaactcgcggtagattccgtcgagttcggcattgctcaaaccgcactggaaatcgtggttgccgtaggtcaccgcccacggtatgccccgtgacgccaaaggagaggtaaattgaccgatggccttgcgcaccaattcacgcgtatggttcaacgcagattcaggaatcgcctcttcgcaccaacggcgtttgcggaagctcttggcaaaggccggatcgtagccggcgatctggttgccggagaaaatcaccagatcaggccgtgtggcatcaaggctggcctcaatcagggcgatggtgtctttggagactttcggcccatcctgaatgtcggcaatctgcagcacgcggaacttgccggaatagtggaattgcagtcgtccgagacgcgcagagatagagaccgggcggccgtcttcggcatcggccggcttgatacggggtttcgacgacatcccctctggcgtacgctgtgtttccgtcatgccctccactgtacacacaaacgaaaaggcccgccggagcgggccttttctacaagttcaactactggagcagaatctctgcacaacatcatcgtcgtaacggtaagtctttccaatgcccgtccaacgtaacagtcctcgtgaccatacactatttgtgggctctgctctgttcagttgttcttgtatctcataatctattcatcactcccgtttctcgcaacctgcagagagtcgttgtgcgttttttatcacaactgttcaatcgcactttctgactatcggaaaacgagctgaaccgttcacatcgaacccgtctgatgttcggtttcgttcgtttcaccgccgctcacggcgtgtcgcgagcacgctagcacactcagaaccaaccaacaccgaactaacatgaacacccgttgaattctggcgcgttcagtcgttttccggccacgccagagcttacgatataagctatggcacagatatttgacgcaccctcgaaggcaattctgcgcagccaaatcgcagagcatattgccgaaaacgacaacaacgaccgccgcgtcgatcaggaaggcgaggcaccgctgcccaaggaccgtttcttcgaccgcgagctcagctggctcaagttcaaccagcgcgtgctcgaatgcgcggagaacgaagacatgcccctgctcgagcgcgccaacttcgccgcgatcttcgcctcgaaccttgacgagttcttcatggtccgcgtcgccggcctgaagcgccgtatcgactcgggcatcgccgtgccgtctgccgccggcctgagcccgcgtcagcagctgcgcgcgatcagcgagaccgcacaccgtctgcaagacgagcacgcacattacgcgatcgacaccattctgccggaattggagaaggagcgcatcgtcctgctgacgtgggacaagctcacctcctccgagcaggagcgtctctcgcgttactaccgccagcaggtgttcccggtcctgacgccgctcgccgtggatccggcccacccgttcccctacatttccggcggttccatcaacctggccgtgattgtggagaacccggcctccggcaagtcgcacttcgcccgtgtcaagatcccgggcaacctgccgcgcctggtgccggtggacgacatgaccgacgaggagtccaaggacgagcgttacggcttcatcgccatggaaaagctcatcgccgcgcatctggaatccctgttcccgggcatgatcatcaaggaagcccgctccttccgcgtgactcgtaacgaggacatcgacgtggaagaggatgacgccgagaacctgctcaacgccatggagaaggagctgctgcgccgccgcttcggaccgccgatccgtctggagatcacggacaccactagcccgttcctctcccagctgctcgccgaccagctcggcgtgagccaggacgaggtataccgtctgcccagcccgctggacctgaccgtgctctttgagctcggcagcgtggaccgcccggacctgaagaaccgtccgttcgtgccgaccacgatccgtcagatcgccgaggtcgagtcctcccgtgcgcaggacattttcgccgccatccgcgagcgcgacatcctgctgcatcacccctatgactccttctccacttccgtgcaggccttccttgcgcaggccgccgcggacccgaaggtgctggccatcaagcagaccctgtaccgcaccagctccaactcgccgatcatcgacgccctgatcgacgccgctcatgccggcaagcaggtgctggctttggtgga

SEQ ID NO: 3422 - DNA, 6343 bp, Unknown
  R151_18m  MAG No. k141_41898
caagtgaaacctgagaggagataagaatcatggctgaaaacaccaacgactcccaggttgtcgagaccgaagaggagctcaccaactacaccaccgagaccaacgctggcgctggcaccggcacctccgcgatcgagccgggctacggcaccggtcgccgcaaggaggctgtcgcccgtgtccgtctggttccgggtgacggcaagtggaccatcaacggccgcaccctggaggagtccttcccctccaagctgctgcagcgtgaggtcaactctccgattgttctgctcaagctcgaaggcaagttcgacgctatcgtcctcgttgacggcggcggcaccaccggccaggccggcgctatccgcctcggcgttgcccgcgctctgaacgccatcgatcgtgatgccaaccgcgccgccctgaagaaggctggcttcctgacccgcgacgctcgcgtcgtggagcgcaagaaggctggtctgcacaaggcacgtcgcgccccgcagttctccaagcgttaatttcgcttgtcctgtaccgagcatgcaaaggctctccgtggaattccgcggagagcctttgtgtttgtgtcgtgctgttttgagtgtgactcacacctgtttcatcagcgtgatgctcagcgccggcatggtccagacattgtcgtcgacgggagtgtccggcgtatcatccacaggggcatcaggcatatcagctgatacctcatcccgaggcgcggacgaggtgccgtttgcggcgtgatccgttgctggcatcgcgaattcgatggtatccgcttcatcctcagtcgaggattccgtgcgctgcatggccacttcttcgaccagcgtgcgtaccgtctcgctggcgtccggtacatgctgcgtccaaacggtggtgtcatcgttcaaatcgcattcctcgacctgaatgccatgcccggctcggcggccgttgatttcggccgagcaccatttaggcgtccagtgagtgtctggcggcaggcggaatgtgcggtcgtctgcggtgccgttgaccacaatgcacacgtccacctcactgttggacagcaatcgcatggtgaagctacgtacgcccagatcgaaccagtcacgctccatcggcgtggtgccgtcgggcaggaaccactgcacgcggcttgagggcttgagtaggccgagttgggtcagtcgggtgaagaagtcctcgtggtgatacaggtccagtgatttacgtagcgccaccagtcgagacacggttttcaggcgacgcatttcgcgtgtcttgttggtggaatacatccaatcccacttcagccacgtgatgtcgttgtcttggcagtaggcgttgttgttgccgtcctgtgtgttgcggaattcgtcgccggcgagcatcatcggcgtacccagcgagagcagcagcatgccgatcatgttcatggccgcctgttcgcgtgccgtgatgacgtctggatcatcggtgacgccttcgacgccgaaattggcggaatggttcaccgacgagccatcattattgttctcgccgttggcttcattgtgcttggagcggtatctggtgaggtccgtcagcgtgaaaccgtcgtggcaggacacgaaattgatggaggccggagcgccgcgcccgggttcggtggcgaacagatcggccgagccgcagagtcgcgtggccatctcctgcaaactgatacgaccgaaatcggagccgccatccacatcctcaagccagaaggtgcgggccgtgtcgcggaagcggtcattccattcggcgaacggcacggagaattggccggtgcgccagccgaggttgcccagatcccacggctccataatgagcttcaggttgcccagcagcagatcggaacgcagggcgtagaggaacgggtgatgatgggtgaattcgccttccaggcgggccagcgtgacgccaaggtcgaaacggaaaccgtctatgccgatacgcttggcccagtatcgtaatgagtcgatggcaaaggtgaccacatgcgtgttggtgaagtccagcgtattgccgcaaccggtggtgtcttcgagtcgaccggtattggatttttgatggcgatagtaggccaggtcgtcgaggccgcgccagcagaccgtcgggccttcgacgccgccttcgcatgtgtggttgtagaccacgtccatgatgacttcgaagccggcctcgtgcagcgcgcgcaccatgtctatgacttcttggcgcacggcggccgcgcccttctcttgggctgctttggtggcataggagggttcgggggcgaagtagctgagggtggagtagccccagtagttcttgtggccgtgttcttgcaggaagagctcgtcctgcttggccataatcggcagcagttcgatggaggtgatgcccaatccctgcagataggcgagcgttgtggggtgggcgagtccggcgtaggtgccacgcaacgctttgggcagccacggcgcgttggcggtgaagcctttgacatgcatctcgtagatgacggttttgcgccacggcacatgcgggtgctgcgggtcgccctcatgcttatggatatcgcgatcgtcgatggccacggataccggcacatggccgagcgagtctacggtgctcatggcaccgtatgccgagccggttaccttgtggtccacgacatcgcattcataggagaaggcggcgggggtgagctccatggagccgtcgatgcccttgccatacgggtcaagcaggaatttgtatggattgaagcgcacgccgtgtttcgggtcccatgcgccgtccacgcggtagccataacgcatgccgtcccatgctttgggcaggtgcacgtaccacaggccgtagttcggtccggtcatgcggaacagggtctcgcgcagatacaaatgttcgataatgcgcgtgcacaccggaaactcatggatctgctggatgaacgaggcgttcgggtcttcgaacaggcggatggcgtcttggaagaaggcgccgggctcgtcaatgggctccagcacacacagccaaacctgatcggcagtttcggaacgaacaacgacgtcagccccaccgtcgtcagtgaagtacagccctgggcgagtggcgtaacgatgcaacggtgggtttttcatacctccattgtagacgtgttgtcacttctggtggaagcccttgatttcctgccgcgttccgcagcaccacagatatcgtcgaaataattctcggcgaatcgcaatgcggcaccgatgatgttctggtcttcggcgcagtagctcttgcgcagattgaaatggtcggtgccgaacggactgcgtgcgatgacgcgcgccttcagatcctcgatgtcactgtcttcaagatgctgggctgcttcaccgccgacaatcacgtcgcccgcgatgatggatcgcgcgttgacgatggcctgcgccacgtaatccagccattcgtccatgcgctcgcgatgatgccgttcaccctgctcaagcacgctgaagaagccgggaatactttcgtaatcctcgggcaaggtctccggcgagcagtaggtgtccatgcaaccgcgctggccgcagtagcattcgcggccgcccggcaccagcgtcatgtgttcgatggcgccattgcacatattcggaccctgatacagcttgccgcccacgatcaccgcgccgcccgggcgtcgctccagatagacgcacaccgcatcggtgagcgtggagtcgaaccatagctcgaccatggcggaggcatcggaatcgtggatcatcatgcacgggtaatggaccgactggctgatggtttcgagcgtaagccccgtgttgcccataatggtgccgaaggtgatggtggtggcgtcgggggagaggatgccttggatggcgaacgagacgccgagcactttgccgtgcttcttttcgacgtcggaggcgaagttgttgatgatgccgccgatacgctggtagtaaacgttggtgttgcggtaaggcagggcatcgttgcgtttttcgatgacgttgccgtacaggttaatcgcgcacaggcgcagttcgttggaccgcatcactacgccgatggcagtgcgatgatcgggattgaactcataattttgcgccttgcgcccgccggtggaatcctgcagttcgcctttgcggatgagtccgtcatcttctagggcgcgcagattttgggtgatggtgggcaggctgaggccgagttcgcgttccagttcctgcttggtgacatggctatggccatacagatactgggtcatggcactgcggttgtgcgctttcactgcggtcgatggcattgccctcatatttacccctttgtgcgatgagatatatgtaagtatactttatgaaagtggctttcatgtgcctcgacgcggagattatgaggcaacaatcgtatatttgtaggcgattttgggcacttttttaaaccaattttctagaaatgtggggaaaatgagtacttttggaaacttgatttaagaaagttgtcggattgcgttgtctgcaagcatgtgattttcggtaaaaagtgaacaaaaagtaccaaatcgccgaataaagtgaggatttgttcgatatttcgcacaactcttaacaaaaactgttcaatatcgcacgtgaaacgccgtcgattttgtgcgtatgcatcgcgccggaccgttcggtatattgtgactcaagtcacatatgcaatgtgacaacgcatcaccggccattttcggttactgaggcggtatcccgctggtgcaactgaggtgacgaggcgatggcccagaactttgccatataccccaagaagatcgaggaggaccccaagtggcagaagcaaagaagaaagtcgaagctgccaatccgaccccagaagagaagcaggccgcagctgaggccgaagttgacgcgctggttgcccgcgccaagaaggctctcgacgaattcgagaacctcgaccagaagcaagttgatcgtatcgtcgccaaggcctccatcgccgctctgaacaagcacctcgttctcgccaagatggccgtcgacgagaccggccgtggtctcgtggaagacaaggccaccaagaacatcttcgcctgtgagcacgtcaccaactacctggccggccagaagaccgtcggcatcatccgcgaagacgacgtgatgggcatcgatgaggtcgccgagcccgtcggcgtggtcgccggtgtcaccccggttaccaacccgacctccaccgccatcttcaagtccctcatcgccctgaagacacgctgcccgatcgtcttcggcttccaccccggcgcgcagaagtgctccgtcgaggccgccaagatcgtgcgcgacgccgccatcgaggccggtgctcccgagaactgtatccagtggatcgagcacccgtccatccaggccaccggcgcgctgatgcagcacccgggcgtggccacgatcctcgccaccggcggtccgggcatggtcaaggccgcttactcctccggcaagcccgccctcggcgtgggtgccggcaacgccccggcctatgttgattccgatgtggacatcgtccgtgccgccaacgatctggtgctctccaagcacttcgattacggcatgatctgcgccaccgagcaggccatcatcgcccacaaggacgtctacgaccagctcatcaaggagctcaaggtccgtaaggcctacttcgtcaacgccgaagagaaggccaagctggaacagtacatgttcggctgcactgccggttccggcgtcaagcccgtgctgaactccgcggtgccgggcaagtcccctcagttcatcgccaaggctgctggcttcgagattccggccgacgccaccattctggccgccgagtgcaaggaaatctccgacgacgagccgctgacccacgagaagctcgctccggtgcaggccgtgctcaaggccgacaacaaggagcaggccttcgagatgtgcgagaagatgctcaagctgggtgccggccacaccgccgccatccacaccaacaaccaggagctcgtgcgtgagtacggcgtccgtatgcacgcctgccgcatcatctggaaccagccttcctcccttggcggcatcggcgacatctacaatgccatcgccccgtcgctgaccctgggctgcggctcctacggcggcaactcggtgtccggcaacgtgcaggccgtgaatctcgtcaacatcaagcgcattgctcggaggaacaacaacatgcagtggttcaagatcccggccaagacctacttcgagccgaacgccatcaagtacctgcgcgacatgtacggcatcga

SEQ ID NO: 3423 - DNA, 13812 bp, Unknown
  R151_18m  MAG No. k141_42600
ccgtggccgaatagtccgaaggaggtgggtgatgtctgcgcacaagtacgaactgatgttcatcgccgatcctgagctggatgagcgcggtctgaagaagctgaccgagcagtatctggaactcgtcaccaaggaaggcggctctttcgatgagcccgattactggggccgtcgcaagctcgcctatgagattgccggtaagaccgaaggcaactacgtcgtggtgaagtacaccgccgagcccgctaccagcgatgagctcgaccgtgttctgaacctcaacgaatccgtgatccgtacgaagatccttcgtaagggctgaatcaagcgtttagtcagctgaacagctggtattcaaggtaagtaagaaggaccgttatggcaggcgaaaccgtcatcaccatcgtgggcaacctcactgcggaccccgagctgcgcactattggcagcggcgcgaccgtggcgagcttcacgattgcttccaccccgcgaacctggaatcgtcagaccaaccagttcgaggatggtcaggcgctgttcatgaggtgctccgcttggcgtgatctggccgaccattgcgctcagtccctgaagaagggcatgcgcgtgattgccaccggccgcctccagcagcgttcctatcaggcacaggatggttcccagcgaaccgtcgtggagatgcagctcgatgaaatcgggccctccctgcgttacgccaccgcacaggtgactcgccagtcgtccggtcagggcggcttccagggtcgttccggtggtctccagggtggtcagcagcctaatcagggctatggcaaccagggtggccaaggtggttatgccggtggccagggcggttacaacggtggctatcagggtggtggcgctggatactcccagcagcctgccgctcccgccaacccgtccgctcctgcggccgacccgtggagcaatgccggtgcatctgatgccggtagcttctccacgttcggcgcttcctccgatttcggcggcggcgacgattccgacccggagttctgatcagtacttacctccccgctgccagcagcaatcaatatcaagatttataaggagaacatcatgtcacgtaagaggccgcaaccgccggtcaagccgttcaagaagaagccgaacccgctgaaggccgccaaggtcaccgagatcgattacaaggacgttgcgctgctgcgtaagttcatttccgatcgcggcaagatccgttcccgtcgtatcaccggcgtgaccgtgcaggagcagcgtgagctgtccaaggcgatcaagaacgcccgcgagatggccctgctgccgtacgccacttcgggtcgctgagttagggaggctttgaacaatggctgaaaccaaggttattctcaccaagaccgtgtccaacctgggccactccggtgacgttgtcgacgtgaaggccggctacgcccgcaactacctgttcccgcagggcctcgctttcgcgtggaccaagggtgctgaggctcagatcaccgctatgaagcgcgctcgtctggccaaggccgtcgccacccgcgaggacgccgtcgccgccaaggccgccatcgagggcaccaccgtcgagatcgccgccaaggtgtccgagtccggcaagctgttcggtggtatctccaacgaggccatcgccatcgctctgtccgacaaggccgcggtgaacccgaaggccatcgaggtcgagaccatcaagaccaccggcgatttccccgccaaggtggccctccacccggagatcaccgcttccttcttcgtgaaggtcgtggccgagtgagtcattccggcctagtgctggaatcacacagaccaagagtctgagcttaagcatcatcccccgtgcggttcgcgccgcatgggggatttttgtattggtgtttaaaaacgctggaaataggcgcgacacgccgagagttgcatccgcttcaaatctgagtatatttaacacctgttgcaaggaacacttcaatatctaaccaagcccctgtagctcagttggttagagcagctgactcttaatcagcgtgtccagggttcgaatccctgcgggggcacagacaaccggaatcgaaagattccggttttttgttttttccagcatcagtccgtagctggtgcggaaaggccgtcttcgcgcgtgacggccggacgtgtaaggagcggcgtcatgtctcagatattcgcgttcaccgtatccgaccccgaaggcatgcacgcccgcccagctggccggttggttgccaaagcgcgggaatatgagtcgaacatcaccgttgcctacggcggcaaatccgtggatgccaagcgtatctttggtgttatgggacttgatgttcaacaaggtgacgaggttacggttcgggtgcagggcaacgatgaagctgtcgctgccgcagagttcgagcgattcctcaaggagcacctgtaatgagaacgatacagggcgtcggcgtatccgctggcattgctatcggcacggtccgcgtgctcgccgccgccgatcatgctgtagaacgccgcgtaatcgacgatccgcaggctgagatggatcgattccgcgcggcccgtgacatggccgtcgctcagctcaagcaactgcgtgacaacgtcgccgctgagttcggcgaaaacaaggccgagctgttcgacgcccatcggcttatgctccaggacccggactatgcgggatgcgtcgaaggtttgattgcgcaagacaaggtgaacgccgaatttgcggtgaaaagcgtcgccgaacagttcgccgccatgttcgctgcgatggatagctcgaccatgcaggctcgagccgctgatgtcgaggatgtttctcgccgcgtgatgaacgtgctgcaaggcaaacgtgatagcacggcgcaggatggcagtatacaaggcgatgctgtgcagaacggtactgtgcagaacgggattgcgcaggatggcagtatacaaggcgatgctgtgcagaacggtactgtgcagaacgggattgcgcagaacggcgaaagccacatcatcttcgcccaagatcttgctcccagcgagaccgcgcagctcgaccgcgctaaggttttgggcctcgtgaccgccaagggctcagcgaactcgcacaccgcgattctggcgcgcacgatgggcctgcccgccatcaccggtatcggcgacgccttcgacccgactgatgacggtcacgttgccgtaatcgacggcgccagcggtgcggtgttcgtcgacccggacgaggccacgctgaccgagtgccagcgcaggaaggccgaagctgaggaacacctgagcctactacggaagctcaaaggcaagcccaccgaaaccaagtccggtcagcgggtccacctgtacgccaacatcagccgtccctctgacgtagccgccgtgctggccaacgatgctgagggcatcggcttgttccgcagtgagttcctgtatctggaacgcgaggactggccgaccgaggaatttcagttcgatgcatacagacaagtcgcacaggagatgggcgaccgtccggtcatcatccgcacactcgacatcggcgcggacaaacaggtcgactacttcaatctggaccacgaggataaccccgcgcttggttaccgggcaatccgcatctgcctgacccgcccggagattttcaaagtccagttacgcgcattgttgcgcgcctcagcatacggcaatatcgccattatgctgcccatgatcacctcggtgcaggaggtgcgcgacgccaagcggattcttgaagaagccaaaagcgagctgcgcggcgagcacaccgacttcaacgagagtatccagatcggcgtcatgatcgagacgcctgcgtcggtcatcatggccgacgagctggccgccgaagtcgatttcttctccatcggcaccaacgacctgacccagtacacgctggcctgtgaccgtcagaccccgagtctcgaacgctttgccgacccgcattcaccagctgtgctgcgcatgatccagatgactatcgaggctgcccatcgtcatggcatctggtgcggcatctgcggcgagcttggcgcagacctgagcctgaccgatacgttcctgtgcctaggaatcgacgaactgtccgtctcgcccaccagcgtcctacccctgcgcaacgtcattcgcaaccactgagagtcaaggtcgcttcggctgattccggtggcttttttgggcattgcattcggctggacattcgacatcgcatcctgccagcatttcgtcgtggggcaaagtgtacaatcgccacgtttgctttcgcgcccagcgtaaatcgcgtcgccggctccgcgaacggatttccaatcacacagaatgccgtgaacagtcagccatgcctgttgcgcggcgaagagaaaagaagaagcagtggaatactctctctttaccaagctggccgccgagttcttcggcaccgccattctgatgatcttcggcaacggctccgtggccaacgtcgagctcaagaacaccaagggtcaccacgccggctggttgaacatcgccatgggctacggcttcggcgtcatgttcccggtgctcatgttcggtggcgtatccggcgctcatatcaacccggccatgaccatcgcccaggccgtcaacggcctgttcccgtggagcgacgtgctgccgtacatcgtcgcccagctgctcggcgccctgcttggccagctcatcgtctacatcacttactacccgcactaccaggagaccgaggacgccgaggcgattctgggcaccttctgcaccactgacgcggacaacaagaaggtcaactacttcctcaacgagatgttcggcaccctggtgctcgtcttcggcgccctgtgctgcctgtccctggcttggggcaagcaggattacgccgccgcctccatcgtcgtcggcttcattgtgtggggcctcgtgacctccatgggtggcccgaccggccctggcctgaacccggctcgcgacctcatgccgcgtctgctgcacgccattctgccgatcccgcacaagggctcctcccgctggggcgaggcctggatcccggtcgtggccccgatcgtcggcgccatcatcggcgcttggctgttcgtgttcttcttcgccagctgattcgttgattgattcatatatgcaaatggcctccactcgttttgggcggaggccattgtcgttgaatcaggtaaacgcagaggctactgctccaggaacacctgcggggccttcatgaagttcgtggcacagtgttcgccgcagaagtaataggacttgccctcatactcgcgcgtgatcgcgtcggcgttcaccgccacggtcatgccgcacaccgggtcggtggcggtttcgccgtccgcgggggcggtgtggtgcatgtgcattcccatatccatagtgttctccttgttggttggattattggattggtcagatgcgtgattggtgtgattcagcgtggtgcgatcgtcgatgatgatggttggctcgtgaggcgcgttggatgtggcggagccggtgatgttggcggcgttggctgattcggccgatccggctgattcgacatccgccgtgctgctgcccgagccagcggtgccatcgacaacgcccgcgttgatgttcgacccatgcagcctgttcgcgttcagcaccaggcacactgaactcaacgccatcgccagacccgcgatcatcgggctcaacagccagccggtgaacgggtagagcacgccggcggccaccggaatgccgatgacgttgtaaccgaacgcccagcccagattctcccgaatgttgcgcatcgtggcgttggacaggttgatggtcttgatgacgccgcgcaaatcgccgctcatcaaggtcacgtccgccgactgcatcgccacgtccgtgccggtgccgatggcgatgccgagatccgcctgggccagtgcgggggcgtcgttgatgccgtcgcccaccatcgcaatcagagtgcgggattgcgcggccgtgcgggaggtgccgtccgtggacttggcggcggcctcgtcgcgttcgcgctgcagtttggcgatccagtaggccttgccgtccggcttgacctcgcagatcaccgtatcgatgccgacttcgcgggcgatgcgcccggctacctcggccttgtcgcccgatagcatcaccgtgcggatgccgcgtgcgcgcaacgccgcgatggcctcgcgcgagccttccttgactgtgtcctgctcgtagctcggcttgtcccagtcggcggccgcgtccaccacgccgcgcgtgatggtgccggtcttgtcgaacaccacggtgccgatgcgacgcgcctgttccagcgccttggcgctggtgaccagcacgccgttggtggcgcccaagcccagtgagaccgtcaccgacagcggcgtggccagtcccagcgcgcacgggcaggcgatgatcagcacgctgaccgcggtgaccagcgcatgcgccagttgcggcaccgggcccagtgacacccagatggcgaacgtccagatggcgatgatcatcaccgccggcacgaaataccgggcgatcttatcggccagctgctgcaccggcgccttggtcgcctgggcgcgggccaccatcgccgcgatctgcgagagtaccgtgtccgcgccgacttgggtggcgcgcatcacgcagtcgcccttgagcagcacggtggccccggttaccggatcgccgacggttttggaaaccggcttggattcgccggtgatcatcgattcgtcgatatgcgcctcgccggccacgatgatgccgtctgtgggcacgcgctcgccgttcttgacgaccagcaggtcgccggtggcgatggcgtcgatgtcggtgtccgtgaaatacgccggattgcgccattcgatgccgtccacattgtctgcggaagtggcgttgagtttgtgcgcggtgcgcgggcgcagtttgatgagcgactgcaccgccttgccggtgccttcgcgggccttggtttccagaaggcggccgaccagcaccaaggtgatgaccacgccaaccgattcgaaatacggttcgcgcgagccttccgggaacacccacggggcgatgcaggtcaccagcgaatacaggtaggcggccgaagtgcccagtgagaccagcgagttcatgtcgggggagcgatgcgccaacgcggggaagccgaccgtgtggatcggacgcccgcagtagaacatcaccggcgtgatcaggatggcctgcaaccacgggttcaccatccaatgcggcaccagcgtgggattggccatatgcagcatggtgacggcgaatgccggcaacgtcagtaccgcggccacaatcaccagcttcgtcagcgccttgatctcattggcgcgttcagccgcctcccggcgctccccctccgccgcatccacggcggtaggtgccgtatacgaagcatcaggatgaggaaggggcgtgttctcatccgagccgtcctctccctcaaccctcaacaacccatgcaccatattcatgccgcacgcaaacggatactcgcccgccggcaacgccggcagtttcacgtcggtggtggcgttgcccggcagcatggcgtcaagtcccagatcagcaaacaccacatgcgaggtgcattcgccggtctcctgccggtcgaaggtcagtgtgatcggcgtacccgcacgcatgctcaccacggcgggggagtacccgcccttgacggtgatcgtcgcggattggcgttcgccggaagcgtccatggccccggccgttgccttctgcgttccgaagaagaaccgcaggaccagccatgtcaatgcggccgccactatcagcgccgtggcggtcgagaagatgctgaactccataactgttccttcccattcctaatgcactgaacaacagtgtataccctatacccctagagggtatatgatggggtgtgttcagctgacggataagtatcagggggttgcgatgcatggttatgacgaagacaaggccaaggtcatcgcacgattacgccgtatcgaagggcaggtgcgcgccatcacgcagatggtggaggatgacaaatactgcatcgatattctgacgcagatttcggcgtcgaattcggcgctgaaatccgtggcgttattgctgctggacgatcatctcaaccattgcgtgcggcaggcgtcggtccagggcggcgaggtggccgatgaaaaacttgcggaggcttccgcggccattgcgcgtctcgtcaaatcgtgacgagttctgccgcatgatgacgcgcgctggcaaatcatgaaaggccgtctgacgctcggatacgacacagcataataacggttgatgctcgactgtgataaggccaagcgtccaatgtgggctgctgagcgtccgtttaacggcttgaaatcgtcgagttcggtaaaaatttaccgtcattcaccatcgatgacatactgggtaccatgtttgagcaaataggaaccgtgattatcgtcatcgtcgtgctagtggttggtgcagggcttggcctcttcgccggcttcgtgctggggcgccataagggtcaggagatggctcgaggcgtcaaaagcgaggagctggaggaggccaagacctcgctggagaatgcgcgattcgagaatgctgagctcagtgctcgcaatgctgccgcacaggctcagattgaaggcgtgaaccagcaattggctttcgccaagtcacaacttgcccaggcgcagcaggctgagcagattcgcattcagcaggaacgtgagcgtgcggctgcggaggcggaacggaagcgtcaggcggatgctcgggacgccgaggccaagcgtgctgaacaggaagcacgtttgaaagaacagagcaaggtgctcgaggcgcttgcgccagtggccaaaaatcttgataccttgcagaacaaggtcacgcagatcgaagagggccgcaagagggaaatgggcgcattgggagcccaactcaaggggctcaacgaccagcaggcccgtttggacaaggaaaccagttccctgtccgccgcattgcgcaacaacaaggtgcgtggcgcgtggggcgaggcccagctcaagaacattgtcgagtccgccggattgctggaacatgtcgatttcgacattcaggtggtggtcacggatgccgatggacgtacgttgcgcccggatatgatcgtgcatctgccgggaggcaagaccattccgattgatgccaaagtgccttatgccgattaccagcgtgcctgcgagatcccggacaccgccagccccgaggatattgcccgccgcgatgatttgttacgagcccatgccaaggcgttgcgcgagcatgtacgtgctctcggcgaaaaggcctattggaatgcctttgatgtggcacccgattttgtggtggccttcatccccaatgaggcgctgttgcaggccgcgctcgaagccgaccccacactgatggatgatgcgttctctcgcaaagtggcgctcacctcgccggtcacgctgtgggccgtgctgaaatccgtggcctatgcctggcagcagcagtcgctcaccgatgacgccaagcagctgttcgatttgtcccgagaactttacgaacggttctccacgttgggtgattatgccatcaaattgggcacccagatcaccaagacagtcagcgcttacaacaagttcgcgtccagtttggaacgccgtgtgttgcccaccgctcgcaagctgcaaaaaatcgaaccgaccaagatcatcgaggaagtaccgatcatcgaatcagacaaaggcaatgtgagcgaactgtccgcccctgaagtggtgccggccgatgaaggtgatactcatctgactgcctcaggcgatagtctggagtcatgactgaatctggattccgccccactggtaccccggacctcgccgtcgcgaagagccacaatgactttgccatgctggagccgcgtgaacagctagccaccttgctgagggagcatgtggtgggccgtccgttctccgaacttgccgcggtgactttcgaccaccatgccgccaccgtcatgggccatgtactgattgacgctttggaagatgcgggctattcggttgatgacttcgatgctgttggtgccttgaccgcagcatctgtgcccatggtgtccgccatgatccaggccgccgcctctcgtggcgaggacctagacggattcgtgatggacttcgtctacccgtccatcaagggcccctccatcgaaggccgccgtgtggtgctgttggatgcttggctgtccgaaaagtcgtacgtgcagaccagctcgctggtcaccctgcgcaacggcaatgagctgagcctcgactttggcatagtggagcagctgggtgccaaggtcgtggccatcgcctcgctggtcggtggcggtgccaaagacatcaatgtggtcaacccctccaccggcgacgagcaaacgctccccttcatccaggtcttcgacgaatccgaactgcggtaaatccacctttgacttccctcgcataaagtcagccgggctgagccgcgaagttgactaagaggaaccggtgaatagcgttatcgaggagaaagattgcacgcacccaaccagatttctttggctgccaaagcttcaggtgaaccggaattccgtgaaatcggccttgggccgtggtctgagacccatcccggcgagcctcgtcccgacgatccgacttctccgaattatgacggtcgtttcgactcggtgctgttgaatgacggcgaccgccgcaacgtattggatcgttaccgctactggaccgtcgctgccattaaggccgatcttgacgctcgagggcgtcatgacttcgaagttgcggtggaaaactggacccacgatttcaacatcggttccatggtccgcaccgccaacgccttccaggccaagcgcgtacacattgtcggtccacataagtggaatcgcaagggcgcgttgatgaccgaactgtaccagcacgtcgaacaccacccctccatcgccgaactggtggaaagctggcatcatcgcatcgccggtgaaatcgcctatgaacgagccaaggccggtgccgccgccatccatgcgcatgatgtggctgtggatggagacaacaagcaccttcatgagctgctggccgaaatcgatgcttgtgatgcgcacatcaaggagcttcaagccgcccgcgtcatcgccctcgatatcattcccggcgcagtgccgatggaaacctataccttccccaagcggtgcctgctgctcttcggtgcggaaggccccggattgagcgagaaggccctcgaattggccgacgatgtggtctacatctctcaattcggttccgtgcgctccattaatgcaggcgctgcggcggccgtggccatgcacgcatggattgcccaacacgccgtatcaggcgtgtagccatgcatcgacaatcccgccgcatctgcccaatatgggccacattagaggcatgatctacgccaccaaatccatcgccgcggcattaattcgcatttgccgccggcatcgtcggcatcctgctcgccgcaggcatcagcagctccgcgcagtccacactggccgaagccgttaaaccggactactggattcccgaatggtggcagtccggcctgattctcatcgcctgggctgccgccgcatggatcggcggtctcatcatcaccggaaaagcggatatcagatatcaaataacgcgggttactgctttggcagttctgccggttcggccatggtcctggcagtttgtcatggctatggctttggcggttctgcagtgaccatggttctggtgactctgaccccatggatttgaccaccgtggttcactgcgcttaaccagctcccatcactgttccagcatgaggtatgccggctgcccgcagcttattgagtaaaggatgttgttgcatcacctcctcataggtgaatcggacaatggtgtcgactttggcccggtacagtgccgtctcccgttctttctccgcctgaactgcaccacgaacacccttgcggtcattcatatccgggttcacatatttttcatagccatcgaattcgcccacgataagccgattctcaggtagccgccagaggaaatccacgcgatacagagcaccggtttgcgggtcggtgatgttttgttgcagttctggggctaataggccgcctgcgatgatggtgcctcgtccaagtgactcgccaccattctcactcgccggattggcataatgcagtaggcggaatatcggcgtgcaatcacgtcgcatagtgctgcacacattcagaatgtccgtgatggcgacgccgttgcgcagcgccgaatcgataatgggcagtgcaaatcggaagtcgacggacagcccgcaatccaccaccgttctggctttgctggtcaccgggagtccattggcatattctggcgtgctgcttgacgtgaagatgcgtttgacctttgcactgctggcgttggggcctcgtgatgttgtggcgagagtgatggtgccagcatgaagatgccattggtgttcaaaatcgtggatggccgctgccgtgaccccggcgaacacccaatccggatgtctgttatgaagagttcgtgcaatatgtctgatacgttcgtcgggttgcagcgaatcccagtattccgaagcggcgtacatgttggggaatacacgtttgagttcgcgcgcctgcacgcgccgagccagcgccgagcggtgtgccttggttgttccataagcgcactgttgcgttgcttcagccttcgtgatgagtatgtccactgctttgtgatgtttcatgattcgacggtatgccaatggtgaacatggtgtctatctgtctggggttatgtggttctagcttcggtgcctagatgtgtgtttttgcctgattatcaggcatctgaccgtattggactgattatgtggattcttttgggtgggtatgcaaaatgtggataactggcgaggtgcgcagggcgattgtcgttcatatgttcgatgtaggtgtgtttgggctcattgtgagcttattagggtggccatgcagatacttcagtggggcacatttgcggttgggccgtggcgttgcctcgctgcggggcgtctcagcggggcgttttattggttggaccgcggttttgttttgctgggatggctgagcggtgcgtttcatcggtcagctcgcggttttgctctgctgcgagtcgtctcagtaaggtgaacttgcggtccggcaacggttttgccccgccgaagaagccagcagcggggcaaatgctcgaccggcttgagcttctgattcgctgaagggctccagtaggcgggaaaatgaggcttcccgacaactgcgtgtcacatacggctcatatagttatggccatgccaacattttcacgtgaagaaatcgtgcatttgggcgatctggcccgaatcgcgctcaccgatgaggaaatcacccgtctgcagggcgaactgaacgtcatcgcagactccatcaacaaggtccaggaagtcgcctccgacgatgtgccgccgaccgccaacccggttcctctggaagcctacctgcgcccggacgtcgccgaaaccccgctcacgcaggaagaggcgctcgccggtggcccgaagaccgaggccggcatgttcgtggcaccgcgaatcctgggaagcgaggagtaatcgatgagcaacgaa

SEQ ID NO: 3424 - DNA, 42838 bp, Unknown
  R151_18m  MAG No. k141_42631
ccagtccttggatgaggagaccttccagattctgggcgaagagatcggctggaacatccagctcgtctccgcagaagaggaagacaaggaactgctccagcagttcgacatcaaccttgacgaggaagaactgcaggatgatgaggatctgaagcctcgcccgccggtcgtcaccgtcatgggccatgtcgatcatggtaagacacgactgctggataccatccgcaagaccaacgtcatcgcacgtgaggccggcggcattacccagcgcatcggtgcataccaggtcacggtggatcttgagggcgaacctcgtaagattaccttccttgatacccctggccatgaggcgttcaccgctatgcgtgcccgtggtgccgagctcaccgacgttgcgatccttgtggtcgccgccgacgatggtgtgatgcctcagaccgttgaggccatcaaccatgctcaggccgccaaagtgccgatcgtcgtggccgtcaacaagatcgatgtgcccggtgccaacccggagaaggtccgcggccagctcaccgagttcggcctggtccctgaagagtatggtggcgacaccatgttcgtcgacatctccgccaagcagaacctgcacgtcgacaagctgctcgaagccgtgctgctcacggctgacgctgagctggacctccgcgccaaccccgacatggacgcccgtggtgccaccgtcgaagcccgactcgacaagggtcgtggtgccgtggccaccgtgctggttcagcagggtacgctccacgtgggcgatgccatcgtggccggcacttcgtacggccgcgtgcgtgccatgctcgacgagaacggtcagccgatggaagcggccggtccgtccacacctgttcaggtgctgggcttgacctccgtgccgaccgccggtgacctcttcctggtcgcctccgatgatcgtgccgctcgccagatcgccgagaagcgtcaggccaccgagcgtgccgcccagttggccaagcgtcgcaaggtcgtctccctcgaggacttcaagaagaagttcgccgagtccgagatcgacatgctcaatattgtcatcaagggcgattcgtccggttcggtcgaggcgctcgaggattccttgatgaagatcgaggtatccgacgaggtcggcatccaggtcatccaccgcggcgtcggtgcaatcacccagaatgatgtcaacctggccacggtcgacaaggccgtcatcatcggcttcaacgtacgcccgaaccgtcaggtggcggacctcgccgagcgcgagggcgtggagatcaagtactactcggtcatctaccgtgcgatcgaagacatcgaggcatccctcaagggcatgctcaagccggaatacgaagaggtcgtcacctctcactccgagatccgcgagatcttccgctcctccaagttcggcaacatcgccggcgtcatggtgcaggacggcgaggtcaagcgtggtacgaagtgccgtatcctgcgcaacggcgtggccacggtcaacgacctcgagatctcctcgctgcgtcgcttcaaggacgacgttcagtccgtcaaggaaggctacgaggctggtatcaacctcggcaccttcaacgacattgaactcggcgacatcatcgagaccttcgagatgcaggaagtcgagcgcaagtagtcattgttaagccctctctgacgagtgggctgtcagccgcaggctgactgggggagagacatggtagttccatgattttctctcccccagcctcactgcgttcggcagcccctcgtcagagggggctcaagtctagaaaaggaaattcctatggcaggaaccaacccgcgcgccgcacgtattgcggccttgattcagcgtgtcgtcgcctcctccattgagcgcgaactgcatgacaagcgactcgccagcatcaccgtcaccgaagttcgtgtgaccaacgatctgcagatcgccaaggtctactggacccagctcggccacgaaggccacgaggaaggcgaacgcaagcgcgcccagcaggcgctcgatcaggccaagggtcacctgcgttctctggtgggccacaaggctggcctgcgcctgactccgcagctccaattcgtgttcgatgaagtgcccggcgaggctcacgagatcgaagacattctcgccgtggccaagaagcgtgacgaagaactcgcccgcgcccgcgccaccgcccagtacgccggcgacgccgatccgtacaagcacgacgacgaggccgaagccgagggcgatgagttcgagtccgacgaggagtagtgtgcttcatacaacacccagcggcctactcatcatcgacaagccgcaaggcgtgaccagtttcgacgccgtcgccgccgtgcgcggcgcgttgcacatcaagaaggtcggtcacgccggcacccttgaccccatggccactggcacgctggtcatcgccttcggccacgccacgcgactgctcaacgccatcgtggcgcatgacaaaacctacgaggccaccatacgcctcggcctgcgcaccactaccgatgatgccgaaggtgaggtgcttgtcgatgatgaagcccgctcccgctggcaaacgctgtcagcgcagctgactgagggcggccagagcggcgaaccaacggcgtcaccaactgcctcatggcaaaacctgctcactcgcaccatcgccaccaatttcaccggcgatatcgaacaagtacccaatacgttctccgccatcaaaatcaacggccagcgtgcctacgacttggctcgcgaaggcaaggatgtggaactcaaaccccgcctggtgaccatcagcgaattcaccgtgctggatatccgcagcggattcgtagcaggggagcaggccgctgaaccattgcgggaagacgcgaacacgggaacgattcccgcacttgatattgacgtgcgggtcagctgttcatcgggcacctatatccgcgcgctcgcccgcgacctcggcaatgaacttggcgtcggcggatacctgacccgtttgcgccgtacgcgagtcggccgattcgcgttgccggacgataccagcggacttatcgcctctgaggcgatgcttgacacgcgaacccataccgtcaccgcacataccgatcagaagacgttcactaatcgggaagggcaaaccgtcacgcgcaacaagtgcgtattgaacactcctgaaggtcttgccggtgacgagcgccgcaactggctgcttgaccatgccctcaccatggaacaggccgctcgaggcgcgatgccggcgcttgacatcacacctgaggaagccagcgaattgcgcttcggccgccgtatcgagcgtacaatcagcgagcccactgccgccattgtgccgcaaacgcatgatgtggcggcgattatcgagcgtgccaacgctcatcaggccaagccggtcaccgtattccccctcgcgtaaagtagacgcggtgaaaagtgcagcttgatacaggccgcgcacaacaacgcctatattgcatgaataacatcgcacggataaaaggaacagtacactgatggatatcacgcacctgacccctgacgccgaaggttcgattgaatggccctcgttcagtaacgacaagaaggccgtggtgacattgggcgcatttgatggcatgcacttgggacatcaggcggtgatcaagcgtgtggtggaactcgcgcaccagcatgatgctttttccgtggtgattctgtttgacccgcgccccgcattcgtgcacggctgggccgcctcgcaccatggcgaggaacccgcggtgcagaacgtggatgccgaagccttgaccagtgtggatgatcgactgcaccgcatggaacagttcggcgtggaccatgtgttggtggtgcactacacgctggccttcgcagacatgtcatacattttcttccttggcagactcaccggcaagctgggcatgcgtacgctggtcctcgggcaggatgccgccatgggcaaggggcgagaaggtgatgtgaagcatatcgccaatcttgccgccgccaccggtgtattcgaacttgatgtggtcgatgaccgtggcccgggtgaagtgcgcattccgcgcgatttcaagccggaagccccgagcgaatggggagagcccgtcgacccgctggccaatgccaccaaggccgagcgccgcgcatggagcaagaagaaccaggccaaggcaatgcgcgcctggagctccaccaatgtgcgctacctgctggctcatggccgaatccaggatgccaacgccattctgggtgctccgcacgccatcgaaggcgaagtggtacacggtgaggagcgcggccgcaccatcggattccccaccgccaatcttggctccgacattgcaggctacattccggtcgacggcgtctatgccggttggctggtagatggtgagaaccgctggcctgccgccatctccattggcaccaaacccaccttcagcgagaaaacaggactcaacgaacgcgtggtggagtcctattgcatcaccgatgagtggattgatctgtacgaccataaggttcgcgttgaattcgtcggtttcctgcgcccgcaggtcaagtttgatggtcccgaccaactcgttgacgaactcaagcgcaacgtcgaagagaccaagtgtcttaccgcctgaggcatatctcagggctatttccgcactcccaaggcatctaaggcgtcggacaatgtgttggactccaccagccgaagtccctcgacatgcaccggcttgcgcagcggaggaatgactgccgtcgtaaagccaaggcgcgcggcctcgcgaaggcgatattccatacgcggtaccgggcgcacctgaccggtcagggaaatctcgccaatggcgcacgtggctcgcgcaatgggttttgacgtggcggcgctcgccagtgccgccactatcgccaaatcggaaccgggctccttggcctggcccccggcaatagtggagatatacaggtcgttggacagcaggttgagcttgctgtgacggtagagcaccgcaaccagcatggcgatacggctggggtccacgccattgaccgcacgtcgaggtgtgggcagcaccgacgtggtgaccagagcctgtacttcgataggcagactgcgatgcccatccaatgtgaacgtcacacaggtgccttccatgggtgccgcgttggccgcatcagggccgtctccagacaggaacaatccggcgggatcggtgacctcttcgatgccctcaccgctcatgtcgaaacagccgacttcatcggtcggaccaaaacgattcttcaccgctcgcaacattctcagcgcggtctcgctgtcgccttcgaattggcagaccacatcgaccagatgctccaatgtgcgcgggcctgcaatcgaaccgtccttggtcacatgaccaaccagaaatactggaatgtcaagtgtcttagcggtatctatcagcgcgcttgccacttcgcgcacctgagtcgaaccgccggaaatgccatcgacctcctgcgagacgatggtctgcgccgaatccacaatggccaaggccggcttgttctgttcgatcagccccaatactgtggacagatcggtggtggaggccagtaacaagttcggctccaccgcgttgatgcgggaagcgcgcaaacgaacctgcgcctgtgattcctcgccggaaatgtacagcacggtattggcatgtaccgacggtgcgttgccctgtaccgacaccgtgtttgatgtgccgccctgcgcccggcccgactgttgggcagaccgctgaccggctcctcggaatgtactgtctcccgccacaacgcgcgcgatattgccggccgtctgcaacagcaatgtcgacttgccgatacccggttcgcccgctatcagcgtcactgaacccggcaccacgccaccgccgagcacacggtcgaattcggaaaacccggtaccgagccgctcgacgctttccgtgcccacttcggtaatcggacgggctgcagatctggcgttgtcggcaaccgtaaccgactgcgtgcgtgatgttcggccgggagcggccgtgcgagagcctgccgccggccgagcctcgtgaaattcctcgaccgtgccccactgaccacactcggggcaacggccgtaccacttcggcccgttccaaccgcattcggaacatacatactgcacacttgatttcgccatggtctcaccctaacccaaacaccagcggacggtaaatttttaccgttcacaagagtttcacgcggcttgcgcacaacgactaagattacggccgtctagcgtcacgcggctgtgagagaatcggggtatgactaatagtgagaactcctcgaccacacaatcccatggcaagttgattgcagtggtggttgccgcagctgttgtgattatcctggcagtgctttcggcctttgtgtggccgggttgggccatccagaagaatgatggcacctccactaccacccaaaacagccagcagaaaaccgaatcatccgagccgatcaagccgaccatcgacgccacagctttgccggatgatgccagtgagctgttgaaggccatgccggacagcgtgctgaattacgcgcgtaccaaggcggatgcctccacgacgtggaattccgcgtcgccgctcgaggagtacactctgacctactccactggtgatgccgccaaggatgtcacgctggtcgccgcgcagtggtcgtcggcggacaatgccaagacccagtacgatgcgttggtcgctgcgcagaccggcgatgagtcggcatccggcaacgtcaaggtttccggcaacgtcacgggcgcgtacgtggtgaaggccgatgcctccaacagcaagaacgccgctgccatctggcagaacgataccgtggtcttccaagctaccggcaccaaggaagcggtcgatcgcttctaccagaagttcccgatgtagtatctagtatcggctgtcagctgctgcacaaacttatgaacgttggggcatccacattgctgatgtggatgccccaactgcgttcagggcatatgcggactatcgacaacatactggtttcctctgtctggcaacacgtgtattatggtgcaagttgcaacttttacgattaatcgaaatggaggcttcagatgggttctgtcatcaagaagcgccgcaagcggatgagcaagaagaagcaccgcaaactgctgcgtaagacccgccaccagcgtaagtagtcttacctgcaatcaaggcattagaaaccccgtgatcgttatggtcgcggggtttctctttttggctcctttgccttgttcgggcaacagtaaagcccgcacctgcgatgtacagatgcgggcttggaaaagttcagtgatgtgagacgatcacttgttggcgttggtcaacacgcgcgggccgttcgggtcgccgacgatgaccttgtcgaccatgttgaggaacaggccgtgctccaccacgccgaccgtgttgatgaggtcttcggccagctcctgcgggtgatcgatgcgctccaggtgcaggtccaccacgaagttgttctcgtcggtgcgcacttccttgccatcggcgtcaagacgaagcaccggcttgtagccgcggtcctcgaacttcttgatgacgtggccagcgccgaacggaatgacctcgaccggcagcgggaacttgccgatggtgtccacaaccttggactcgtccacaatccacacgatctggttggagttggtggccacgatcttctcccacagcagagcagcgccaccgcccttgataccgttgaagttcttgtcgacttcgtcggcgccgtcaatggtcacgtcgatgtggtccacgtcgtcgatgtccacgatcttgatgccgtagctttcagcctggacctgcgtgcggcgagacgtggttacgccagtgaactcaagaccttcctcctgatgacggcggccgagctcgtccaccaggaacttcacggtcgaaccagtgccgaggcctgcgatcatgccgttttcaacgagtttggcggcttcgatgccggccgccttcttcagcgcatcctgctgtgccttatccatggtttctcctttgccatccttgcctccgccgcatggatcaacggcgtgaagccttatctcctatcctaacgcgaatgagcgattttgtgtcatcgtgtccgattgcggtacatattcgtgtgtttgggtgttagtgtcgtacgaatggtgcgttggcgatggtcaggttgccgtcgccgtccacatagccttcgatttcgatgctgcctttgatcggcatcggctgcccgttgaaatacgggctcgttttcggcgcgggggagaaggtcagcgtaccggataccgtcagtccgcttggctttgcggggtgtacggggtgcgctgattgtacaggttgcgctgattgtgtcgctaagggtgacgaagacttggtctctggccttgtggcatccgtcgaatccgtcgccgcagccggcttgcgcaaacttgccgcatccgccttgccatccagcaccaactgcacgtctggaggcacatcggtgccatgtgcgtattcggagcccagtagcgactgccagccttcaatcggcagatagccgtcgcgcgcacccgaacggcaatcgcccgcataggtgcgtgccagttcatcgaccaactcattgccctcgttgccggcgtgacctttgacccatcggaaatccaccgggccagggcgttgtgagatctcacggtcgatcgcctgaataagctctttgttcttcacaggctttttctgcgaatttttccagccgttcttcttccagcctttgacccacttggtcgagcaattgatggcgtactgcgaatccgattcgatgagcaatggctcagggcccgggtgcgctcgcaaagcttccagcactgcgcacagctcaccaatctgattggtgccgttggtcgcgccgcccgcatcataaccatggtcgtcgtgcttatggccgggcttgccgccggcgttctgctcatgatcggcccaggcccagcccattggcccgtttggattccctaatgcggacccatctgtggatactgtgatagtcatgttctccaccctaacgcaagctgtgcaatctcttgctgaagtggggttgcccagtgcgaggcaaaacaacgtagtgaagagtgtgaataacatcacacctattgactttgcttgaaaaacatgccatcgcgcgtgaataggtgagcgctcacaagaaaaacaagacatttcctctctgcgggtgaggccggcaacaatggcgcatccggtatctggaatgagaataagggactgtacaaaaccagtgacggcaacatcgaaatcctcaaaccagaggcggacagcgatggttcgacctccacggccgcatccaagggcaccatgcttatcgcaggcaactccaaaaccatggcactcggtccaggcggcatggccttggctcccggcctgccgctcggtcttggctggttcatccgacgccgcttgggattggatgcctccgacattctggaccgtaagctcggcttgaagtaacggctggttcggacgtgattgctgtcacatacggatcatgacgacagcgcgaaggtcctcatcggtttacgtcgatgaggaccttcgcgcgcattaggggagtctgttgcgggctgcgctacgcgggtcatgctgcgcgggcgtgctatgcgaacaaactacgcgaacaagtcgttcagtgcctcggcaatcgtcggatgcgtgaacaccatatcgcgcaacgtgctggccggcgcgtcaagatccatcgccaacttgacgatattgatcacctcgtgcgactcgacggaaagcagcatcgcacccagaatgcggccagtattgcgttccacaatcgccttcatcagaccatccggtcgccgcattacctgggccttcggcacagcggccaccggcaatcgcttgaccacataatccaatccagccgccttcgcctcgcgctcattcaatcccacgcgcgagtaaggcgtggcgaggaatgtgctcgacggcacatgcttgcggtccttcaccgtgtacggacggtcggaaccattgagctgcgaccacaccacgcgatagtcatccagcgaaatgtacgtgtgctgcgggccgccgttcacatcgcccagagcccaaatgtcggctgctgtggtgcgcagaagctcgtcgactttcacggcaccgcgttcggtgagctccacgccagctgcctcaagatgcagtccctcgacgttcggcgtacgtccggtggccaccagtaccgcgtcggtggtcaggcagaatcgggcttcagccggctcggcgaaccgcggctcgccatcgtctgatggtttcgtttgaacgtgtgacatcgtggcgtgatcggtcgggttgctagtggggctggtggttgttgtagtgtcggtggcgccggtggcgtcggtggcaccggtgatatcggtatgagcgttcccggtgccggcgggggtggaatcgcaagcttgcgatgcgccgcgagccatacccttcaccgcaacggacaacctgacgccgccgtcagcagcaggcgcgatggccttggtatccgcgttgaacaggaacttgacgccctgcgcttccaactgtgcgcgaatcgcggccgccacatccgcatcctcgcgcggcaggaactcggcattgtgctgcagcacggtaaccgccgtgccgaaatcggcaaacatcgaggcaaactcaagtccaatgaatcctgaaccgataatcaccagtcgctgcggcatatcgtcgagatccatcagtccagtgctggtgtagacgccgggcgtagtgtggataccgggaatatccggaatgcgcggcgtggcaccggtattgatgaagatcttgctggcggtcacggcgaccgggccctcagcggtggcgatttccacgctatgagggccggtgaagtgagcgcggccggtgattacggtgatgttgtcttggtcggcgagcttgtgatagttcttgtcgcgcagcatcgaagtgacgcggcgcttctccttgatagcagcctcgaacgctgcttcgcgggtttcgggagtactgttcgcgccatcccgccgcgcctgttcggcggacaaaatcagtgacttggacggcaagcatccgatattgatgcaggtgccgccgtacatgtcggcgcttgcctcggcgacgacgaccttgcggccggctgcactgagcttggcagccaaggttttgccgcccttgccgaatccaatgatcagggcgtcggtggtgatagtgggggaggtgctgggtgtgctgatggcattgggtgtgctgatggacatggttacttccttacgtattcgagtgataagagtgcgttgtgctgatgtgttgtgtgccgtgcggcgtctgttttcttctttgactgccgaagcgttatcgactgatgctggctaggggaaacgcgcgggattattagcctttgcgctcgctgaatatctgttcggtgatgtcgtggatggtggtgtgttcgagttgttcgaggcaagtgcggttgagctcggcatagatgtcgttcatcactgcgcccattgaagatgacaccagacagtcctcgtgtacgtcgcccggtgtccagttcactttcacaaaagtggtgccggtggcttccgctaccgcgcgcaaagtgatttcggcggcgggccgggccagagcgtacccgccttcagcaccctctttagtggcgatgagtccggctgaggcgagcggtcgcattactttgcgcacgcgcgccgcattggtacatatgttctcggccaggatctgactgggcaggtgtgtggcgcgatggtcaaggtagaccaatgcgtgcactgccagtgaatggtcgccgttcatgaaacgacctccttaccgagtcgatactgtaactatgatgtgtacagttatgatactgtaatcatatcagatacagttagtgtgtcaaatcggggttgaagaggtggatgactatgtgtataagtgaggtgtccacatggttatccacaatgaatgtgcgtaagtgaagctaggaccacatacctcggatcggcttccgtttccgcacccactacccatatggtggtgtcatgaacaggatgaccgacggcatcaccaactatggagctctgccaggctctatatacgatcagcctccggaagaatcggaggcagtttttgttccgcccgaatttgcggggtcattttctactgactcgaaatacccgacttctcgcgactcgtcatcgccgaacagtggtgcacatgattctgcagcgacaccgaccatgagcgaaagcctcgcccagcgcagacgcgacatggtcgcacgctgcactgaggaagcgaaacgggcgggcaagaagctgcttttcggcatgaccacttccctcgctctgcaatccgtaccgattcccgccgattgcgacctcgactcggccaagctgcacactgtatccagcgttaagagcaagcggttccgtacacgccatgcaccactgcaaacgcatatttggaaacatgcggctaaagccgccaatgtggaaatgaaccaacacgtgtttgcgctggacctgtttcacgtatgggcccaacttgccccgtatgtttcttttgagtccctgattgtgctcggggatgccgtcatcgctgctacgagcaaacagccagtattggccaaggatcgtgatgctgctgcaatctatcaggatttggtgaagttcgtggagcagtttacccgattcagagggcgcccgtcctgcgttcgagcattgcctctgatatcacctggtgctgattcgcccaaagaatcagaagaacgactctctctggtagcgcatgggattccacggccggttgcgaactatgtggtgccggacgcggcttttgcatctggagctcccataacgttggacttagcgtggccggagttcaaggtcgctgttgaatatgatggcgatcatcatcgtacgagtaagactcaatggcgccgtgaccaagagaaaaggggtgtgctggtcgggcggagatggctggtcttcgtcgccacggcggcaagtatcgctaacgaggatgctcgtgctgaattcgctttcaacgtggcgagggcgcttgcttcgcgcggtgccgtattcgagtttcatgtagttgccatgtctcttgaagagttggcgcagagcctgctgtgaccatgatgttcgaaacggctgatgtaaaggcaatatttgtacgacctgttgttgtggtgtgtgcttgatattgcatgccgttcgattgcgatgcctcgtagtgatggatttcgtgaatgactagtgttcgattgtggagggaaatgtgtcatagtggtcgattgggggtgttgtcggtgcattgagcgtggatttgcgccaatgggtgtgggacgctacgcatgttttgccgatttttgcgtggcgtcccacggcccctcgggtaatggctgtgacgggtgtggcaggaatggcgtctttccggggtttccagtttgagtgtgtgggatgggggaaatgtaaaacgattgacttagctgttgtcccacgcttttgtgggatggcagctctggaatgggcaaattcgtcgtggcgtcccacaacgatgttaaaactcgaccatgatgcaagccgatcgaacgcttcggcggtcatctggccgctgtgaccccacaatgatgatggtaggcaggcgaacgtttcgcggtcatctggccgtcctgccctgcagtgatgttgagaaaatgcagtcacggtgcacgaggagaaccgttgacctgcgtgtttcagtggtcgcgaactgcatatgcgctaaaaaaagctctgcagtggattgcatgaatccaatgcagagccttattggttgcggtgaacgcgactaacgcagcgatttcactcgctcagggccttgtcgaccacgacggtggcctcgtcgagtaccttgtccagagcctcgggggagacgaaggactcggcgtacaccttgtagatgttctcggtgccggaggggcgggcggcgaaccagttgtccttggtggtgaccttcagaccgccgatcttggcgtggttgcccggtgcctcggtcagcttggcggtgatgtcttcgccagccagggtggaggcggtcacgtcgtcgccggacagtgccgcgaacttggccttctgctccagtgtggtcggggtgtcgacgcgcttgtaccaagactcgccgaagcgctcgacctgctcctggtgaagctgggccgggttcttgccggtcttggcagtgatctcggcggccagcaggtcggggatcagaccatccttatcggtggtccacacgcggccatccttgcgcaggaagctcatgccggagctctcctcgccgccgaaggcgacttcgccgctgaacagcgggtccacgaaccacttgaagcccaccggcacttcgatgaccttcgcgttgatcgatgcggccacgcggtcgatcagggaagaggagaccagcgtcttgcccacggctgcgccctcaggccagcccggacggttgccgccgaacaggtactccacgcacacggcgatgtagtggttcgggttcatcacgccccagttcgggcagacgatgccgtgacggtcggcgtccgggtcggtgccgccgaccagatcgtacttgtcccaagcgccggcgttgagctcgtcgaccaggcccttcatggcgtacggggaagacgggtccatgcgaatcttgccgtcgtggtcgatggtcatgaagcgccaggtcgggtcgacctcaggacgcaccacgccgatgttcaggccgtacttctcgttgatgagcggccagtagttcacggaagcgccgccgagcggatcgatgcccagacgcacgccggagttgcggatcacgtcgaagtcgatgacgttctccaggtcgtccacgtagtgctcgcggaagtcgaagccctcgacgtactcggacttgatggcctcctcgtagggcacacgcttgatggacttgaagtcgccgagcagctcgttggcgcgagcggcgatggcgttggtggtctcggccggggccgggccgccggtgacggggtcgtacttaaagccaccgtcggtgggcgggttgtgggacggcgtgacgacgatgccgtcggcgaggccctcgccctcgaagcgctgggtgccgtcgaccgcacggttgtgggtcaggatggcctgggagaccaccggggtgggcacgaagtcgtcacgggagtcgacgcgcacgtgcacgccgttggcgacgagcacctcgatggcggtcttcttggccgggccggacagcgcgtgggtgtcggagccgaggtacagcgggccggtgacgccggccttcttgcggtattcggcgatggcctgggagatggcgatgatgtgggcctcgttgaacgaggtcttcagggacgatccgcggtgaccggaggtgccgaagatgacacgctgttcggggacttcgggatcggggacgaggtcatagtacttgccgataacctcatcgacattaatcagatctgctggggtggcgggctgacccgcattgtttgctaccatgctccctattctgccacgtttttcgccactttgggtactcttatgttaagagttgtcaacttttgtgcgaatcgtgtgccggttgtctagcgcttggtcatttcctcctcgatttcctccagcgacttgcccttggtctcgggcaccaagcgcagcacgaacgggatggacagggccgagaacacgccgaaaatcgcgaacgggccacccacattgttgccgaacgcatcgagcagcacgaggaagaactgggagacgatgaagttgcccagccagttcgccgccgagccgaaggatgagccgatgccgcgcacgctcagcgggaagatctcgccgataagcacccaggcgatcgggccccacgagaccgcaaagccgaggatatagaaagcgatgagaatcatcgtcggcactgccagcacggccacgtcgcccacgaagttcatcacggcgagcaccgcgagcgaaacggtcatcacgatggaaccgaagatcagcatgcccttgcgcgggaaacgatccatgataagcgtggccacgatggtgctcacgaagttcaccacgccgatgcccaccgacacccagatcgcgtcgccttcagggaagccgaagcccttgatgaacacctgcggcaggaagtagatcaccgagttgatgcccacgagctgctggaacagcatgataccgatggcggccaccagcgccggacgagcgatacggaacagttcgcgcacaccacccttggtgtcctgtgcggccacggccttgatttcgtccagctcaatctgcacctgggtctgatccacgtccttgcgaatcagcgtaagcactttgaaggcgttgcgggtgtcgcccttgttcaccagataacgcggggattcgggcagcaacaggccgccgagcagcaacaaggcggccggcaccagcgccgaaccgagcatccagcgccagtcgcggatgccgaagaggttgtggttcaggaatccgaggttggaggcgtaggccagcagaatgccgaaggtgaccatgagctggaacagcgtggacagtgagccgcgacgctccttcggcgccagttcggccaagtacgccggggtcagggcggaggccgcgccgacggcgagacccaggatgatgcgggcgcacaccatcatcgcgaatccggtggaggaggcgcacaggcctgagccgagcaggaacagcagcgcggagacgatgagcagcttcttgcggccgaaccggtcagacagtgcgccgatcgacagcgcgcctgcgcacgagccgatcagcaccgaggaggtgatgaagccggtctgagagacgctcaggccgaagtccgattcgataagcggggaggcgccggagatgatgccggtgtcgaaaccgaacagcatgccgccgagcgcgccgaaggtgaagatgaatgcgctgttgagcgggaagcgcgtggagaagccgtgcgattcggcggcttcgaggttctcgattgcgttggctgccgcgtttgtggccgcgcccgccactccggccacgccggtttcgatggtttcgattgcggtggccgccgcaccggttgcgctggtttcctgcgccgcggatgccgtctgtttcgatacgggtgatgccgttgtcgtcgtcattgccttgtcctttcgccgttgacggaccgcgcctgttgcgtggcccctctgccgcgtgcaaggtcaggcttcgattgtctgcagtcgcccgaaaacaaaaaaagacctggaacaacgtggaattcgcatattacgatacgcaaattccacgtcgctccaggtcttgcctcgttttgagtaacaaccctgctacgcaacgtgtgtgaaagatagaatacgacttccgcagtcgcgacactccgaataggcagcaaaaaacgatgatttttgacaacgattgcaggattctgcatggtggaatgatgtcggaatgggcgctgcggcaaatacggagaacgggtgtggcgaagcatcatcgcggaacattatggcgggacaccatcgcggagcaccgtagcgcatagttgccgtttcgcgatgccttgccggcattgccgtgcttttggggcacccagcgccgataatggaacacagtggcatacggcagcaaggaggaaccgtggcgaacgcatcgaacgcaacgcctgcagtgattgcggcgcgcatcgtcgatgccgtcggcggccccgcgaacattaccagcctgacccattgcgccacgcgactgcacttcgaactggccgatgccggccatgtcaaccagcacggtcttgaatccatccccggagtcctcggtgcattcccgcgagccggcaatcgttatcaggtcatcatcggcggagcggtcgcctcggtgtacgagcagatcgttcggctgcggacggcgcgattgatgccggcagcgcaattgccatcggcagtgatgcagtcagcgtcgcagtcaacgcaacccactcagtcaatgcagcccacgcagcccgcgcagtcagcgcaatccacacagcccacgcaacccgcgcagtccgcgccgtacctttccgacgatgccgcaccatcgcgcgatactgccaccgacgccgaacaaagttgcggcccatccaatacatcccgtcacttcacgcctcgtaccgtccgcgagtggggcagtgccgtccgcgcttgggctgccgcgtttttcgactacctgtctgactcgttccgcccgattctgggtgtactgctcggtgcctcgctggtcatcgccatcgtcaacgtgatcgttgcactcggcatcgtgcctgacggcgagacctccgccggctggatactactcaaggcgatttgggagggtgtgttcaccgttctgccgattatgatcgcctacaatgcggccaagaaactggacgtcgacccctggctcggcggcgcgattatggccgcgctgatgaccccgcagtttactggcgtgatgtccggaatgtccggaatgtccgggacgtccgtatccagcgccctctccggggcgattcaatgctcggccaacgccgtattcggcgccgaaacctgcaccgtgtcggcgttcggcataccgattcaactcaacgactacggcggcaacgtcttcgtgccgttgctcatggctgccgtgctcgccgtggtctaccacgggttgaagcgcgtcattcccgacagcgtacagctggtgttcgtgccattcctctcactggtcgtcgtttttgcgctcaccatactggtcatcgggcctctgggaatatggctcggcggtgggctgggagcggccacagcatggcttaacgcgcacgtgccgttcctattcgcgctcatcatcccgatgctctacccgtttctcgtgccgctcggtctgcactggccgttgaatgccctgatgctgatgaacattcaggcgctcggctacgatttcgtccaaggtccgatgggtgtatggaactttgcctgcttcggtgccaccgctggcgtgctcgtgctggccgtacgcggcaaggattcggccatgcggcagaccgcggtgggggcgttgctcgcgggattgctgggtggcgtttcggaactgagcctgtacggcatccatctgcatcaccgccgcgtctaccgctggctgctcgccggctgcgcggccggcggcgtgaccagcgcggtgcttggctggctgttcccgtccgtgctgccatccggtcagatggtccggggcgtcacgactacggcgttcgccttctcctcgttgctgacgatttcggtgtttgacagaatgtgggtgtacgcgctgtccatcgccgttgcgtttgtaatggcgatggtgctgacggtgctgttcgggtaccgtacgccgccgcgcgccacggaggcgcagatggtctcggcgggcgagaacgtacgctcgcaggatgcggtgagagggattggcgcgacatcgtcggatgcggagtctgcggaagattccccatcgcggcctgcctccgatcggactcctgactccaacgccatcctgtcgccggtcgccggccggttgatgaatctggaagcgactggcgatccggtgttcgcctcccgcgcgctgggggagggtgtaggcgtcgtgccggagacggccggcgagacggccgtgctagcaccggtcagtggcacgctgaaaaccgtggcccggaccggccatgccttcggcattaaaaccgatgacggcatcgaagtgctggttcatgtcggcattgacaccgtcaatatggatggcgagggattcgtcgtggccgtgggcaaaggcgagcggatcgcggcgggagagccactggccaccgtggatttcggcaaagtcgcggcggccgggcacagcgttgtggtggtggtgacggtggtcaacgccgctgaactgaccgtggtcacgccgttgatcggcgacggtagcagcgacgacaacggcggcgactgcaaaaccgtatcagccggcagcccgatcatcgatgtggaacaatgacgttgcgaaaggatgccatggaaatactgcgagtgttcaacaacaacgtcgtgctcgccaaaggcggcgacggcggtgaggtgattctcaccggccgcggactggggttccaggccaagccggggcagacggtcgacgagtcgaaagttgtgcgcaccttcgtgccatcggacgggcgcgaccctgaccatctggcgcagatgctggcggacattccgcccgaaatcatccgcgtggtcgtcgaatccatgcaggagaccggactgggggagcgcgagaccggcagcaccacgctggtcatggccctgtcggaccacgtggcgaatgcggtggagcgggtgcggcgcggcatcgacatcacctacccgctgctcggcgaggtgagcaacctgtacccgcaggaatacgcgcaggggcgtgcgatgctcgcatcgctcaatgcacggctcgacgtcacgctgccggacggcgaggccaccgcgcttgccatgcatctggtcaacgccggcttcgccaccggcgacctgtcctatacgtacacgatgacgggcgtgatccagcaactgcttgacatcatcgaccacagctacggcatcacgttggaccgcagttccgtgaacgtgggccggttcatcacccacctgcgctacctgttcgtacgcatccaccagcaccagcaactgacggacgagccggcaccggtgatgaaggtgattcgtgagtcctaccccgctgcgctacgatgcgcgcgaaccatcgcctccctgctcgaactgcgcctcgacacggatatcagcgacgacgaaatcgcttatttggcgatgcatgtcgcccgagtcaccggccacgcatcgtagtaacggattagcggattggcgaatcagcgaatcggctcgagtgtaccggtcatttcggcgaaattcgaggtggcatttgaagcagcggcctgcgcggtcttttccagcgcggaggcgtcgggcacgcgcacgatcagcgcgcggtgatccaccgagaaacggatgtggcgggtttccggcagcatgtcaccgtccacctgcgctttggccggcttttccaatgtgatttcggcactgacaccctggacctgttcgatggtcgagttcgtggacagcgggttctgttcgggcttgccgatgatcgtctggtgcaccacgtcgccgaacaggttggcccagccgaggatgccgccggtggtgtcgatgatttcgaagtccagcagaccatcgtcataggatgccgccggcatcagcgagaacatgggaatctggccgcagttgccggccatcaccgtgcggaaatcgagattcttgatggtgtgggtcgagccgtcggcgctggtgactgtcagcgtgccgcggaacttcggcgcgaacaggttcttcacgccgcccacgaagtaggcgagccagctgatgttcgccttgagctcggggttggtgtcgtcgatcatggccgcatcgaagccgatgccggcgatgatgaggaaggcgtggccgtggtcgtcctccgggtggtcgagcagggtgagacggcccatgtccaccaggcgggagccgtgggaggtggccacggtcagcgcggcgtcgatatcgtccacgggaacgcccatattgcgggcaaacaggttgccggtgccgatggggatgatgcccagcgcatggccggtgccggagacggcgctcgccaccgtgcgcaccgtgccgtcgccgccgaccgcgatcaccacgtcggcgccgtcctccagcgcctcaagcgcgcagaccctgccgtccttgtcaagctgggtgtcgtagaagcggatgcgattgagccccttggcctcgcagaacctctggatatgcagccggcgggcttcggcctgcggtttggacggattcacgatgaaggcgtactgcacctcgtcgtcccggcgcttctccagcgtctgagccagcttgcggcggcgctgcgcgcgcagggcgatgacgatgacggcgatgagcaccaccacaatggcgattgcggcgatgatcagaaacacggtgagggcaggctgaggcatggctcctattgttatcggtggggaggtcgtttgcggccatggtgcgccgtacgtgaacatttcctgcacgcaacagccccgtggggcgcgattatggttcaatcgcgtctcatctgacgaaattggccgggtggacccgtccgcggactttcccgggcttccctgtgatttccgcgtgactcccgcgcattcggccattgtcggtgtctgcttacgcggctagtctggtgcccatgcttgatattcaattcatccgtgaacacaccgatatcgtcaaggaatcccagcgcaagcgcggcgagtccgtggaactcgtcgacgaagtgctctcctccgacaccgcacgtcgtgaggcgctgaaggccttcgaagaggctcgcgcccagcagaaggaaatcggcaagaaggtcgcctccgccccggcggacgagaaggccaagctcatcgccgagaccaaggaactgtcccagaaggtctccgaatacaagtccaaggccgattccgccgccgaggaatacaccaccgccatgtggaagctctccaacatcgtggagcccgaagctcccgaaggcggcgaggacgactacgtggtcgtcaagaaggttggccagattcgcgacttcgcggccgaaggcttcgagcccaaggaccacctgaccctcggcaccggcgtggccggcatcgacatgcgccgcggcgtcaaggtcggcggctcccgcttctacttcctgcgtggccaggtggcccgtatgcagatcgccatgctcaccatggccgtggaccaggccgaggagcacggcttcacgctggccatcaccccgacgctggtgcgccccgaggtcatgcgcggcaccggcttcctgaactcccacgccgacgagatctaccgtctgcgcgagcccgacgaccagtacctggtcggcacttccgaagtggcgctcgccggcatgcacgagaacgagatcctcgacctcggcaacggcccgctgcgctactgcggttggtcctcctgctaccgccgcgaggccggcgccgcaggcaaggacacttccggcatcatccgcgtccaccagttcgacaaggtggagatgttcgtctacgccaagcaggaggactcctacaaggagcacgagcacctgctggccatggagcaggagatgctcgccaaggtcgaagtgccctaccgcatcatcgacaccgcagccggcgacctcggctcctccgccgcccgcaagttcgactgcgaggcctgggtcccgacccagggccgctaccgcgagctcacctccacctcgaactgcaccgagtaccaggctcgccgtctgaacatccgcgagcgtatggaagatggcggcacccgtccggtctccacgctcaacggcacgctggccaccacccgttggctggtcgccatcatggagaaccaccagcagaaggacggctccatcgagattccgcaggccatgcgcgcctacatgggcggcaaggaagtcatcgagcccactaagtgggaggcctgagtctcatcgtgctttagctccctttaatgggggagctgtcagcgtagctgactgagggagagatcgctaatagccagcaggcgaatccaagaccgaccgcactgccgaatatcaacatccctcccttctgtataatgaatacttgcgcgtgtgaacgcgcatcaggacaggtgtctgagcggcctaaagagacggtcttgaaaaccgttgaggggcaaccctccgcgagttcgaatctcgccctgtccgcgaaccgaggcctgggcaacatgcccaggccctttttctttttctggaacctgtcttcttgatcgccaccggggtgctgatatattggtttgtgatgccgtaacatgcggtgtccccgttgatatgacgggccaatcggcgtgagccgataagaaaaggcccgacgtttgcagcatcgggcctttgcgttgattaccggcttgcgcctttaatcaacaaggttgcaagatgaatcatatcacgatgcacggtagtctgaccgtgaacgggcgcaccgtgatcgtccatgtgggcgatggcgaggcgaacgccacggttgacggcacgcacttcaacgtgcgtagcctgtggcagctctaccagttgctgagactgctcgtgtagcgtctcattaaggcgcggtgccccccctagtcgggtatcgcgccggcaacctgaaaaccgataatgttggcaagtgcttgcaatttgtggtggacgattgcaagctaacgtcttggattgttgccgctatccaatatctcattaggtctaccggtggaccaaaagtacgttgctttgtaaggggagttaatgaaatgaacaaacccgcacaatcgagcatcgaatcggtttaatgccactcacctcaacgggacgcgcggtaattgttagctaagttgacaataaaagagcaaaggcctaaattagcaatcagtcatcacgctgaggtgatgatttcactaggaaggagtagagatatggtatcgcacaacaagcgcatcgtggctgctcttgccgcggtagcagcaatgggtattggtttggccggttgcggcggcagcgacactgccggcgacacgaagtccggcagcgatggcggtgtggtcaacatcacctatatgcatcgtctgcccgattccgaaggcatgaccttggtcaacgacattgtggccaagtggaacaaggagcacccgaacattcaggtcaaggccaccaagttcgatggcaatgccgccgacatgatcaagaagctcgagaccgacgtcaaggctggcaatgcgccggatctggctcaggtcggttactccgaggttcctgaggtcttcaccaagggccttctgcaggatgtcaccgatgaggccgccaagtacaaggacgatttcgcttccggcccgttcgcactgatgcaggtggacggcaagacctacggtctgccgcaggacaccggcccgctgacttacttctacaacgccgctgaatttgagaagctcggcatcaccgtgccgaagaccgctgacgagctcattgagaccgccaagaagaccgctgcccaaggcaagtacatcatgaccttccaacctgatgaggccatgatgatgatgtccggccaggccggcgcttccggtccgtggtacaaggtcgacggcaactcctgggttgtcaacacccagactaagggctccaaggccgtggccgatgtctaccagcagctgatcgacaacaaggccgccctcaccaacccgcgttgggatgcatcgtttgataactccatccagtccggtcagctgatcggcaccgtggccgccgcttgggaagccccactgttcatcgattccgccggtggcactggtgctggtgagtggaaggtcacccagctcggtgactggttcggcaatggcaccaagaccggcgccgatggtggttccggtgtggccgtgctcaagggttccaagcacccggccgaagccatggagttccttgactggttcaacacccaggttgatgaccttgtctcccagggccttgtcgtggccgccaccaccgcggatgccaagaccccgcagaagtggtccgactacttcagcggacaggatgtcatggccgagttcaagaccgcgaacgacaacatgggtgacttcacctacatgcctggcttctccgcagtcggcgctgcaatgaaacagaccgccgccaaggctgccgatggttctgccaaggtttcggatgtgttcgacaccgctcagaagacctcggtggatacgctgaagaacctcggtctgtccgtcaaggagtgacctcactaggtcttgtcaacgggccggcttgaaatagccggccgtccaagacctccgatgcctcgcatcaccatagcgaaaggccggggcacatactccggccttccgtattgtttgggggtattgctgcaggggcgctgtggcccttgtcatttgttttactgttctttgcgaagacaggttttgtattatgactgcatccactactcaggcgaagggcaaagcacctaggcgtgccgccgccaagccgaagcggtccggcgctcagaagcgcgagaaccgcaccggctgggcgttcatggcaccgttcgccgtcctgttcactttcgtgttcatcttgcccatcatctgggccatctattccagcttcttccgtcaggtcaccgagggcggtggcgcatacggcggtggcgagctggtcaataaattcgtaggattccagaacttccagtatgctattacttccggcaacttctggtccggcgtcggcagggtgctgctctacaccctgattcaggtgccgatcatgatcatcgccgcactggcgttggccatcgtcatcgactcgttcgtggtcaagcatgtcaccggtttccgtctgggctacttcctgccctacgccatccccggcgtcgtggcctcgattatctgggtctacctgtacaacggccaaatctcgccgatcgtcaagggacttgccgccatcggcgtcaatgtggacttcttcaacaagaacatcgtgctcggctcgatggccaacatcaccacatggaccttcaccggttacaacatgctgattttccttgccgcactgcaggccatcccgcatgacctctatgaggccgcccgtatcgacggcgccaatggttggcagattgccacgaagatcaagctgccgaacgtgcgtggcgcggccctgctggccatgctgctttccatcgtcggcaccattcagctgttcaacgaaccgcagatcatgtctacggctgatccgggtatttccaagtcgtatacaccgatgatgatggccatgaacacttctcagggcaccattaccccgtctggtgacggtccggcctcggccatcgccattgtcatggctctgatcgcaggtgtgcttgccgtgctgtacaccttggccgaaaggaaggtgaacgagtaatgagctccgcaaccgttgaagaacgcgcccgcaaaaaggccgagcgcaagctcgaaaagcagcgtcaggctgcgcaacacgatttgcctcgctccatgcgaccgtccgcggccgtgaagaccctcaccgtggtgctgctggtactggtgttgatctacttcctgttcccgatttactgggccatcatcgcgtccaccaagacgccggcccagatgaccggtagcaacggcatgtggtttgctgtgccgcttgaccagctgcccaatgccatcgccactaactattccaagctgcttggctggactcgtggcaacttctggcgctgggtgctgaactccctgatctactcgggcgtctcggcattgatcggcaccatcgtgtctgtgatggctggctacgccaccgcaaaattcaacttccgcggcaagaacgcggccatcggcatcattatggcctgcatgctcatgccgtccgccctgctgaccatcccgatgtactcgatcttccacacgttgcacctgaccaacactatgctctcgatcatcatcccgtgctgcgtttcgccgttcggcttcttcctgggccgcacgtacgcacagagttcggtgccggacgaactgcttgaagccgcccgcatcgacggcgcgagcgaggcgaggatcttcttcaccatcgtgctgaggctcctggccccggccatggtgacgattttcctgttcctgttcgtggccacgtggaacaacttcctgctgccgttgatgatggtgtcttccgacaccttgaagcccgtgaccctcggtctgtacggcatggtctcgctggccacgttcaccgatcgcggcgccctgatgatgggtgcgttgctcggcgtgctgcccgtgatcgtgctgttcctcggcctccagcgctactggcagtccggcctcgccgccggtgccgtcaagggctgaccaatccgctgcccggcatgtcgtgtcactccttccggtgccgggcaacgtccctcccatattcagtgacacgattccaatcgtccggcgtcaccgtaagcgtcaaggatctacgcagtcagggtcccagggcccgcgatgacgccggtcattttgtatgcgacgaattcgtcgctttgtagttttttgatgaccaaccccacaaaggagcactcatgaccagcaccggccgcttcacgctgcccagtgaagagaattttgccgaaaagaccaaggaactcgccgaattgtggggtgcggacgccatccgcaactccgacggcacgcatctggacgaggcagtgctcgctcttggcaagaaaatctacagcgcctacttcccgacccgcgcccacaacgagtggatcaccctgcacatggacgagaccccgcaggtctacctgctgaccgcccgtatcctggccgagtccaacgcggtggatgtgccgctgatggacggtttcttcgaggaacagctcaagcctaaccgtgacgccgaccctcataagtactgggaagtcgtggaccgcaccacgggcgaggtcgtggacccgtccggctggacgctcgacccgggcgaggacaccgtgcacgtgaccgctgccgtgccgatgcacgaatacacggtgagtttcctggcctacatcatctgggacccggtcgagatgtacaaccacctgaccaatgattggggagacaaggaacacgagattccgttcgacatctaccatccggccacccgcaagttcgtgttcgatacgttcgagcagtggctgaaggacagcccgcaggtggatgtggtgcgtttcaccacgttcttctaccagttcacgctcctgttcgatgccaagcgtcgcgaaaaggtggtcgactggttcggttgcgcctgcaccgtgagcccgcgcgcattggacgatttcgagaaggagtacggttaccgtctgcgtccggaggatttcgtggatggcggtgcctacaactccgcgtggcgcgtgccccgcaaggcgcaacgcgactggattgacttcctctccggattcgtgcgcgagaacgtcaagcggcttgccgacatgtcgcacgcggcaggcaaggaagccatgatgttccttggcgaccagtggatcggtaccgaaccgtataaggacgggttcgaaaagctgggtttggatgcggtcgtcggctccgtcggagacggcaccaccacccgcatgatcgcggacattccgggcgtcaaatacacggaaggacgcttcctgccgtacttcttccccgacacgttctacgagggcaacgacccgagcatcgaaggcctcgacaactggcgtaaggcccgccgcgcgatcctgcgttcgccgatcggccgtatgggctacggtggctacctctccttggccgccaagttcccgaagttcgtggacacggtgacccatatcgccgacgaattccgcgacatccacgaccgcaccggtggggtggccgccgaaggcgagctcaacgtggcgattctgaattcctggggcaagatgcgttcctggatggcgttcaccgtggcacacgccctgcccaacaagcagacctactcctactacggcattctggaatccctgtccggcatgcgcgtgaacgtgcggttcatcagcttcgacgacgtactcgcgcatggcatcgatagtgatatcgacgtaatcatcaacggcggcccggtcgacaccgcattcaccggcggcgacgtgtggaccaacccgaagctcgtggaaaccgtgcgcgcctgggtgcgtggtggcggcgcgttcgtgggcgtgggcgagccgagctcggcaccgcgcttccaagcgggccggttcttccagctggccgacgtgattggcgtggacgaggagcgctatcagaccctctccgtggacaagtacttcccaccggtggtgccggaccacttcatcaccgccgatgtgccggtcgacccggcggcccgcgaggcttgggaacaggccggctaccgcatcccgctgagcggttgcggcggtggccagtccatcaagccgttgggcggcatcgacttcggcgaacccgtgctcaacacgtatccggtcaatgaaaacgtgaccctgctgcgcgcggacggcgggcaggtgcagctcgcgaccaatgattatggcgaaggccgcggtgtgtacatctccggtctgccctattcggcggccaacgcccgactgctggaacgcgtgctgttctacgcctcccacaacgaagacaagtatgcggcttggagctcgtccaacccggagtgcgaggtggcgcacttccccgagcaagggttgtactgcgtaatcaacaacaccgatcagccgcagcggaccacggtgactctggccgatggcaccaccgaggacttcgacctgcccgacagcggcatcgcatggcgtgaagcctgattcccgcgttttggagaacggacccatcatgaccgaaagcaatgaagttttattcggcatcgcctcgcattttgcgctggaaggtgccgtgaccggcatcgaaccttacggagacggccatatcaacaccacctatctggtgaccacggacggcccccgctacatcctccaacagatgaacaccagcatcttccccgatacggtgaatctgatgcgcaatgtcgaactggtcacctccactctcaaggctcagggcaaagagacgctggacattgtgcccaccacctccggcgccacctgggccgagatcgatggcggcgcatggcgcgtctacaagttcatcgaacacaccgtgtcgtacaacctcgtgccgaacccggacgtgttccgcgaggccggcagcgcattcggcgacttccagaacttcctgtccgaattcgacgccagccagctgaccgaaaccatcgcccgcttccacgacaccccgcatcgtttcgaggacttcaaggccgccctcgccgcggacaagctcggccgcgccgccgcatgccagccggaaatcgacttctatctgagccacgccgaccagtatgccgtcgtgatggatgggctcagggacggttcgattccgttgcgcgtgacccacaacgacaccaagctcaacaacatcctcatggacgccaccaccggcaaggcgcgtgcgatcatcgatctcgacaccatcatgcccggctccatgctgttcgacttcggcgattccatacgctttggtgcgtccactgctctggaagacgaaaaggacctcagcaaggtgcatttcagcaccgagctgttccgtgcctacacggaaggattcgtgggcgaactacgtggcagcatcaccgcgcgcgaggccgaactgctgccgttcagcggcaacctgctcaccatggaatgcggcatgcgctttctcgccgactacttggaaggcgatatctactttgccaccaagtaccccgagcacaatctggtgcgcacccgcacccagatcaaactcgtgcaggagatggagcagaaggccagtgaaacccacgccatcgtagccgacatcatggaggctgccaagtgagccgtcagtcgaaccatacccgaaccagcatgatgggggccgagcaatgagcgatcagctgaccgaggtatacgccagcatcgacgccctagtcgattacgccttggatcatctcgacctcgatccacgcaacgcagactggacccgcaaccaaatcttcgccctcttccacctggattcctaccccggacccaaaaccacaacgtcggcggcgtcagtgtcagacgcagtccaagacattgtcggcagccgaagccaggccccctctgacgaaaagacccccgaccccctactcgccgccttccgcgccgccgccacaaccgccggcctcttcgatccggaggaaggcccggcctacgccgacaccatcatgggcatcctctccgccaaccccgccgatctcgacgaccggttcctgctcatcgagcacagggacggcggcatggccgccatgcaatggttctacgactactgtgtggccaacaattatgtcaagcgtacccagctcgaccggaacccgcgcttcgactcgcacgggctgacggtgaccatcaacctcgccaaacccgaattcaagaacatgaagaaggcggcggccggcaacgccgtgtccggcggctacccgaagtgcacgatctgccatgagaacgagggcttcgccggacgtgacaagcgcacgctgcgcaccctgccggtcacgctcggcggtgagtcatggttctggcagttttcgccctacggctacttcgaccagcacggcatctgcgtgaacaccgaccacacgccgatgcatgtggaccgcgacaccttcggccatctgctcgacttcgtggaccgcttccccggatacttcctcggatgcaacgccgcgctgcctcgcatcggcggctcggtgctcgcccacgaccactaccagggcggcggcgaactgctgccgatgcacaaggccgccacttgggccgccttcacgctcgccgactatccggacgccgtggtcgaaatcctcgactggcccggtaccgccgtgcgtgtggtgtcgaaaaaccgccagagcatcatcgacgtatccgacatcatccgcgaggcatgggtcggttatgacgacgcggcgaacggcatcgccagccatgacgcggacggcaaccgccaatccgccctctcgcccagcgcgatcatcaccgaacgtggctatgagatgagtctcatcttccgcaacaatgcggtcagcgacgagtacccggaaggtattttccatgcacaccccgaatactggccggtcaagcaggagccgattggactgatcgaagcccaaggcctgttcatcctgcccggacgactcgtcgaccagctcggcatcgtcgaggaggcgctcgccgaaggccgcgatttgcccgatgaagtcagcgaattcagtctcgaatggggcgaactcgctgaaacattggccggaaaccgcgaccgcgaggccatccaccaagccgtacgtgacgagctcggcagcgtctgctaccgcatcctcggcaacacggccgtcttcaagcagaaagccaccacgcaaacattcctcgaaagtcttggttttgccgctaggtgaaacaggtcaagtgaagtaagctcaatactgaaggaaaaccgaaggcaagtccttccaaaggaggagatatgactactgttctggttacgggcggtgctggattcatcgccacccacaccgacatcgaactgctcgacaagggctacgacgttatttccgtagataactacggcaactcgtctcccgtggcgcttgagcgcgtcgagcagatcaccggcaagccggtcaagcgttacgacggtgacgtgcgcgatgaggcgcttatggaacgcgtcttcaccgaaaacaacatcgattgggtcattcacttcgccggtctcaaggccgtgggcgagtccgtggccaagccgatcgaatactacgacaacaacctgtactccacgcttgtgctgctcaaggtgatgaagaagcacaacgtcaagaagatcatcttctcctcctccgccaccgtgtacggcacgccgaaggaactgccgattaccgaggagacgccgaccggcggcaccaccaacccgtacggcacctccaagctgttccaggagcagattctgcgcgacgtacatgtggccgattcgtcttggaccatcgtgctgctgcgctacttcaacccggtcggcgcacacgagtccggcctgctgggcgaagatccgaagggtattccggcgaacctcaccccgtacgtggccaaggtcgcggtcggcgagctcaaggaagtccaggtctacggcgacgactacgacacgcccgacggcactggtgtgcgtgactacatccacgtggtcgacctggccaagggtcacgtggccgtcattgaccacatcgacaaggaaggcgtgttcgtctacaacctgggtaccggccacggctactccgtgcttgaggtcatcaaggcttacgagaaggccgccggtcatccgattccgtacacgatcaagccgcgtcgccccggtgacatcgccgcctgctacgccgacgcttccaaggcggagaaggagcttggctggaaggccgagctgaccatcgacgacatggccgcctcctccctcaactggcagaccaagaaccccaacggtttccgcgacgccgagtgatatgagcagatgagctccctctgatgggggagctcatctgtcgtttatcacacaatgcgcctatcggcggcccagcgggtgagctcggtgcgattcgaaagctgaagctttcgcagcaccgagctcacgtgcgtttcgaccgtcttgatcgaaatgaacagttcggccgccacctctttatacgtgtaaccacgcgcgatcagtcgcatgacctcctgctcgcgggcggacagccggtccagctcctcatcatgagcccgtgccgcaccatcagcgccgccatcagaccccgccgccggcacaccctggaaggccgaaagcacaaaaccggccagttttggcgagaacacggcatagccctcatgcacctgcttgatggatgaaatcaaatcagcgccggtaatcgtcttggtcacatagccctgggcgccggcgcgaatcaccgcccccacatcctgcggcgcatccgaaaccgacaacgccagaaacacagtggtaggggagtagggccgcgatttggcgaggatctcggcaccgccgccaccttcaccgccgggcacatgcacatccagcaacaccacctgcggcttggtctgtgcgatcatcgccaccgaaccgggcacgtccgccgcttggccgacgatatcgaaggaatcacgcaacgtggcgattacgcccgcacggaacatctcatggtcatcgaccacggccacacgaatcttggctgtctcattctcgctcatcgatgttctccctgcgccgctttcagcgcgatcggcatatgcattctgacctcggtgccccagccggccctggacactatctccactgtaccgccgcgccgtttgacgcggccgataatcgattcgcggatgcccagacggtcaggcggaatggcgtccatatcgaagccttcgccatggtcgcgcacgaacacttcaaccatcgtgtcgctggcctcgcaatacaaagacaccggctcgccgccatgcgtgaccgcattgaccaacgcctgacgggtggcgtccagcagcgcatcggtctgggcactcggccgcgcgtcgcccacggtgaccacctcaatcggtttgccgtgctcgtcctccacctcggcggcgatctgcttcaatccggctcccaccgaacgatccgatgtggaacgttcctgatacagccattcgcgcagctcgcgctcttggctacgcgccagggcgaatacggtggtcggttcctcggagtgcagctgaatcagcgccaacgtttgcagcacgccatcatgcagatgggcggtcatgtccgcgcgctcctcttcgcgttccttcaatgcctgctcgtgggtgagtcgttgcagcatcgcgttcgcccacggcatcaccgccaccacgataccgacgatcatcatgaatccgctggcaacaatgcgtcgaggagaggtgccccacccaggaatgctgacattatgcacatacaatgcccatcccatgaaaatcagtgcgatgccgcccaacatagacaacagctgcgtgcctcgcggactaagattcatccatgccagtgcgatgccgcccaaccctaccagcagcggaagcacaatctgggcatccgcaccggtgctggtgagcagcagtccggtggccatcaacgcgaaaccggccaatgccacgacggccggtttcggagcacgttggatggcctcggacaatgattccggtgcggcagccgattcgtcgtcatgagcggcaagtggctgattgcctcgcgcaagcggcgcctgatcaacgggcactgtgcgagccgcagccgccaccgggtctccggcgggcatgaacacccacaggaatacataagcgatgatgcctgcgccgtagaggacggtcagagcgatgaacgcaatccgaatccatgccacgccgatgcccaagtgcagggcgatgcccttgcacacgccggtgagccagcggccctgccgggggcgcatcagcggcatgcgcgcgggcagcaatggttcgggagatgacgtcatactcctattgtgccgcgctcagggcgttgcggccggggttttacccggtgttcagggaacaatcagggtgttccccgagcgttgtggcagtggtcgggcggtgtaatggaatcatgagcaatccaaacgcgaatccgtatcagccacagccgcagcctggtccgcaaaaaaacaagacatcgcgacgcttcttcacttgggtgcgatccagtggactggttcgcggcgacgaccggtggatcggtggcgtatgcagcggcatcgctttacggcttggctggagccccacactagtacgtgcgttggtgattgtatgtacattgttcttcggcttcggcgcagctctgtacgcactcggctggtttctgatgccggatgtacgcgatgggcacatcttggccgaggacctcattgccggccaatgggactggaattgtcttggatgcttcctgttcctagccgtggcaatcgtgattccaggtgcggggtgggtttgtattgcgctcgccgccttagcgctatggttgttggccaaaagcggcattcgccagcaggaagggtacggattcggggcatctgcgccgcgaccggtttcacagcctgtgtcgtatccagctccacagcctgcctcatatccagccgcgcaaccggtccctctatctcctttgtattcagctccgcaacctgtttcacaatctgtttcacgaaccgcgcctagtgtttcacaacctgtttcacagcctgtctatcagtcgatgcccagcgtgatgccgggcacagtgcccagcgcgatgcccggcacagtacccaacgggccgtttgcccccgaccgtatgaatgcgacggcttatgcccccaccgagtccaagcgccgcaagccggcgggcccaatcgtggtcttgagcatactgggccttaccttcctctcctttgccggtctgatgggactgatttgggtaaacgacatgggcattatcggcattatgcgtctgagcaccatctggattgccgcagtatgcatagtgatggggctggtggtcatcattctcggattcagagggcggcgtaccggtggtctgattcctctcggactggttgccggtggatgcgcgctctgcatgaccatcgtttcaggcacgtatggcgtgcactaccgtgatcttggtgccagcggcatcaatactgttgtttcactgagccaatctgtcagtgcgagaaacagcgacggcatgaatgatgtgcaaaaggatggcatcttcgttgccgatgccagcgatgccacgttcgaaacattgcagcaaggtgtggcgttcagcggtgaaaactacaacaccgaccaggcgatcattgattggtccgattgggacaagacacatggaccgcacacggtgaagatgctggatggcaaaacctccatcagtaattgcccggtcggtaccatcaccatagccgcaacacaggcgcaagtgcatatcgttctgccggattcctgcacttacgccttcggcaccgccgactcctacttcacttcgagtgacgtcggcggcaaatacgagatggtatacaacaactacatgggtctaagctttgttttcttcggagctgaaagcgccaccaatcccatgaatgggcctgattacgaatggttggataagggatccgccatgccggacaacggcccagaattaaaaatcaatattccctatgcagtggaagcacgtgtcaacgtggtgtacgcctccgattggaaaggctccacgttccagccgcttgccgatatatacgacggcaacagcacaagcaagaacacaaccgggcaatcggaatgatcaagccgttacaaccaggagatggaatcatgactgatgaaaccaaggaattcgcctccatcgaggatgcgacaccgaccacggccataccttccgaaaccgacgagaccaccgagaccacaaccatggtgaccgtcgatgaccgaaccgataccacggtgctgccatccgcagcggatgatgacaaaacggctgtgctacccgtccccgacgatcatgcggatgcgccggtctcggatgtggatacgcaggcaacagctgcctctccatcgcccatcgaaccaaccacagatcggattgccctggaaacagttgccgatgccgtggagggggatggcgggccgattccatctgccgatgatgtaccgatgtacgcagcatcttcagcacaaccttcctatgagcagtctcagaccgccggcaaaccacgccaaactgaggggatcgccaagaacgtccagaatgctaaggatgtcaagagtgccaagaacatccagaaacagagcaccagcgcgcctactgtggtattcggactattaggcgtgattatcggcgtgatcgcgctggttttcgggtacatatctccggatcggatgatttcgctgttctcgccgaatccgcaattgctgacggctattatctgcgccgtagtgggacttattctggtaatagtggccgttgtatgggccatagtcggtgccgtcaagaagagaaaatagcgttacaaccattgcattacggtcccagtagaagcaacattatgacgggagccgaccgataagagccgaccgttctatgctgatggggggaggcatagtaactatgaaacggatttcggcgcggcgggtagcgagcgtcatcgccaccgcgatggcgatgacgctggtattcgccacacttggctgggcgatgatgccgcaatggaacacacggccctacaccaagcacatcgctatcgcttctgccgacaccaccatcacccctgcccatgcgaacattccccacgaggggcgatatagtacgcgtgaaacccgactatccatcaagaccggcgacggcgtcacgctacccgccgtactacgtgaaccggtcgacgctcccgggccacgcccggcttgtctgttcattcacgggtccggtaccagcggtgccgaggatttcggcgatatcgccaacgccatggcctctgccggcatcgtgaccttggtgccggccaagcgcaacgacaactacaccgtgctgcatcgcgactacccgcgttttgctcgcgaatacgggcgttcgctcgacgtgctgcgtggcataagcggcgtggaccccgccaaaaccggcatctacgccgaatccgaaggcacctggatcgccacgattctaacctcgaaacggcaagacattgcctttgccatacttacatccgcaccggtgttcaatggacgtgagcaaatggccatggctgtcagcgcctatacgcatgaggccggcgcgcccaagcccgtggtcaaagacatggccaaattgatgtcgctggactacgcgccattcgatctggcctatgccgactttgatgccgaccggtatctgaaatccctcaccatgccggtgctggtgaactacggcacctacgatacggccatgcccatcgaacagggggcgcagcggatcatcgccacggccaacaagtccggcaacgagaacgtcaccgtacgctattttgccggcaaccatcagatgcgggctggtgagggcttattcaccccgaacctgccattggccgaaggctatacgcaagcgctggaaaattgggtgaacggtgtgactgccggaaccaaagccgatggatgggcaacgccccaagtcgccggtgcgacacctcaccagcgcttcgccgcgccgcaacgtaccagatccggtatcgtcggctcgctcggcgtgctggccggtctgatggtggcagggcccgtgctgatcgtgatggcggcgatattaggtattggcttgactgtgttttcttggctacagacgttgctggccgggcgacgtagtgtggcgactgtgcgggccatgcatgcgacgccgagtgggctgggagccgcccaacagcgtacgttgcacggcattgccggcttatctgccggtatcggcacagcggtgatggtgattaccgtgctgttgtatggctatatgagcgccgtaggcgtatcggctgtattggttatgcctcaaccgcagttgttttcccttgggtggagggcattgcaggtgctgaccgtgctgttggtcatgctgttcgcgtgggaactggaacgtatgtggcggtatcgcgccagcattatcggcgtgcgtcgtgtcatttgcgtgatggtgacactggctgcacttgtcacattgacgatattgtctttctgggggttgttcagtctgtgatattcacggtcgttaccggctccttcccgaatatgtgccactgagtcgccgtgagcgtcacaaattcgggaaggtggatggggcgtgacggcgtggaggcactgtcgtcagcgctgagcggcttcagcctcatccaaagtgtcgaaaccgccgagctggactgtgtgcaacaaggtttcctcagtgatattgcgttgcgggctggctgcggcgcgctcgctaatcatcacctcgtagagctggaaggtccgttcggaatacgtaccaagctcgccgcgcagataggtttcgaatgaggtggcagatggtgtgtcttcggtggtggtgagtacgcgcatcgcctcgccgagcttggggtagcgctcgcggaaatccttggcccaggcgacttgctgggcgatgacctgttcctgacgggccacgcgctcttcagagggacgcggaatatacggctctatgttcttcgtgaaatcttccggcgcggtggaggccatcatgcggccgtatttttcggtcacgaggttgcggcccacgtggtcggccgcgtcaagatcagcggcatagctggtgagtaatggccgctcccatgtgaggaactgggccagccgcatctggtggaacaccggccagttgccttggcatgccgcgcgtccaccctcattgttggtgcgctggaactgatcccattcatggcgcacaatagcctcgcgcagttcatcatcagtcagttcgttggtcatcgacgttcctttcactaatatctccctctgatgagggagatggcacggcgaagccgtgacagagggagcttgaatctacaaacttttaagcaccggatcatcggagacgatgtggtcctcgacatacgggcgctgccattcgaggaaggtctcgccggacgtggtcaggtgttcgcgtttgagttctctgacgatatccgccgcaatctgctccacgatatcgttgattttctcgattgctgtagccgcgcccttgccgccttcgccgaatccggcccctccatagcaggctgccgaactcaatcgcatcacggtttccaactgttcgcccacgttcggcaacagcgcgaacatcgagccagacagcttgcgcaatgctgcgaactgccacttgtaatacggcatatagcccaccaccatcggcacgttaaccaggaacaccaacgaggcggtggcctgcacgaactcgtggatggacagccatgcggccgcgccgtcgccgcgcttcaacgaacgcggcagattatattgaccggcttgggcgatcatgcccaatcgcttggaaatcaaggcaagccgcacgtcgtcgggcatatccttgaacccttggcgtgttttggagaactgcccagtggggtctgcgaatacttcgccattggtggctgcggccagagtcgattcagccagcatcagccactcgtgcggcgcggtttgcgcgggcgcagtgcgatacccggtgatcgactcaaagaagtcaccgatgcggaacacgccgtcacggcggttggcaccttgtgcgcggggcgtggtgggggagaacggtgcatcaatcggagtcgtcatcgcttccgccacatcagaggacgccgcgcctgactcggcagtggcggtatcgtccgtagcggtgccgggggtgggtgcgtttgtcgcatcgggtatgacggtggagcctgcacctgcggaggggaatgtcccggaagcatcggatctggcatgcgcctcgaacgtcacgcggccttgcgcatccacgctgaacttgcgcggcagcgcctcgtaatcggcctcaagttgctcgccgatggccgcgtaatcctcatccgtaagccacaggcagaagcgcgggccgaaatcgtggtcctgcgaatacgcatcatcgaatccgtagcattccgagccatgacccaccagaccggcggcgatacgcccggcatactgcggatacttcgccgcaatcatcggcttgcccatctgcgtccagaacgcgcgggccagcttcagtccggacaccgggcatgcggaaacggcctcggccgcgcccgcagaaccggtcgacaccgaaacggtggatggggaa

SEQ ID NO: 3425 - DNA, 10312 bp, Unknown
  R151_18m  MAG No. k141_42992
caagtgggtcgtctccaccgtgatgggccaggtcaagcgcctgcccgtctaccgtggcgccgtcccgacccagtccctcctgaccatcacctccaacgtggagtacggcaagaacaccggttccttcccgtcccgccataagaagggcaccccgtacgccccgggtgccaacccggagaacggcatggactcgcacggcatgctgccgtccatgttctccgtcggcaagatcgactacaacgacgccctcgacggcatctcgctgaccaacaccatcacccccgatggcctgggccgcgacgaggacgagcgcatcggcaacctggtcggcatcctggacgcgggcaacggccacggcctctaccacgcgaacatcaacgttctgcgccgcgagaccatggaggacgccgtcgagcaccccgaaaagtacccgcacctgaccgtgcgtgtctccggctacgcggtgaacttcgtcaagctcaccaaggagcagcagctcgacgtcatctcccgtaccttccaccaaggtgccgtcgtcgactgatgaccaaccccgcgaaccgcggcaatgactaactgaaggggtggggcacggctccaccccttccttattttccacagactttcgcatcatttggaacaggaggacaactatgcccgcaacacccacgttccgcaccacgaccaggcatatgctcaaggaatcgaagacctatgcctcgcagactttgatgggcggcctgtccggctttgaatccccaatcggactcgaccgacgtgaccgcctttccgccctgaaatccggcgatatcggcttcgtccactcttgggacatcaacacctccgtggatggaccgggcacccgcatgaccgtattcatgtccggctgcccgctgcgctgccagtactgccagaacccggacacttggaagatgcgcgacggcaagcccgtctaccttgacgccatgatcaagaaggtcgatcgttacaaggacctgttcaaggccacgcatggcggtatcaccttctccggcggcgaatccatgatgcagcccgccttcgtctcgcgtgtgttccatgccgccaaggagatgggcgtgcacacctgcctcgatacgtccggcttcctcaacacgagctacaccgacgagatgctcgaggacatcgacctgtgtctgctcgacgtcaaatccggcgacgaggagacctatcacaaggtcaccggcggcaccttgcagcccaccatcgattttggccagcgactggccaaggccggcaagaagatctgggtacgatttgtgctcgtgccgggcctgaccgactccgaagagaacgtcgaaaacgtggcgaagatctgcgagtccttcggtgatgccgtcgaacacatcgacgtgctgggattccaccagcttggccgcccgaagtggcacgaactgcgcatcccatacccgctggagaaccagaagggacccaacgccgccacccgcgaacgggtagccaaccagttcaaggaccacggcttcaccgtgtattaaattgcagggccgaaccgcgcgtaaataccacgattcggcccgttcgcccataccctagagatatggccgacatctacgcatttcctatgggagcgtccaacgacggacgccccgtacgccctcagggtgtgccggatgaagtatgggcagctgtcgaatccgtcagcaccatgaagcgcatccatgacgtgcgctatcgggagattcccgtgccttccaccttggccgattatggtatcggcgtggaactcgaagcgggagagcgtgccctcggcgatgccttttccgccggtcttggcaacgatgccgaatcacgaatcgccacaggctggatcatgatgctttatgctcatgagctgcgcattgaccgggattccaactggcgttgcgtggcgttcgcgcgacttccgctggaaaccgccgaaaacgattctctgacccccggcatgtactgggatgacatgtgcgactatttcgacggcatcgagccggattcggtatccggcacagtcaccgtgacccaaaacacggcttttggttcgatggccggctccaccagcgccgggtgtgagattcgcgtctcatggaccccgcttgacgggaccggaccggacggtactatggacgccggcgcacaaatccgctcgtgggccgcattcatcagatccaccatccgttttgaggaggatgacgccagttgagtgacgtccgtgacaccgaaccccgactgctgaaagagcctcgcgggggagtgcccgatgtcacttcgtcgctggatggctatcatcgtgcctgcgatgcgctggccgaggcgacgggctcgctggccgccgacgccgaacgggcgtccggattccgctatggacatgaggattggctgattcagttcaaacgtgaaggtgcgggcatcgccttgcttgatcccgtcgccctgacacgggccggagctgactggaatgaattcaatgacgccgtgggcgatgctacatggattctgcatgattctctgatggacttgcccggattcgccgaaatcggactcaaacccaaggccttgttcgacacggaaatagcggcgcgattgctcggcctgcaccgcttcggtctggccgccgtcaccgaacactacctcggcatcacgctggccaaagagcattccgccgccgattggtcctaccgtccgctgccgcgcgactggcgcaactatgcggcgctcgacgtggaggtgcttatcgaactcgaaaccttgatgcgtcgtgacctgaaagccgcaggcaaggacgagtgggccgctgaagagttttctcacgctttggttgcgggccttgccccgcgcaaacctcatccgattccttggctgcgtatctcgcgcatcacccagctgagtcgtgatccgaggggcttggccatcgccaaatccctatgggaggagcgcgaccggctcgcccggcgatacgacatcgctcccagcctgttattgaccgattcgtcaatcatcgaggccgcgaccaacaagccgcacaatgccgcccaattccgcgcactccgatccctgaacgagcgtgtgcgcattcataccggcaccgagcaggacaaaatgttcgagcggtacgcgccgattcagcgtacggtcaagccgaaggtctggaagcaggccatcgaccgcgccatggccctgaagcccacccaatggcctaccatgcccgcccccgaacaggacgaaaacggtgtggtgaacgcgccccgatccatgagactgtggcaacagcgccatccggagcgttatgaccgtctgcagcgggtacggcgtgtgatcaaccgcatcgccgaagacacccgcacgccggccgagatgatcatcaagccacagatcctacgcaacctgtgctgggtggaagacccggtggaagtggacgtcgagacgttcctgatcgagcagggcgcaagaaactggcaggtgaaactcattgcaccgtccgtaagtggcgttatcatgtagaggttgccttacggcagaactgtaagaaataacgacttttgaggagtcattagcgtgaagatcagcgttcgtaacctcgagcccaccaaggtgaagctcaccgtcactgttgaaccggaagagctcaacccgtatctggatgcggcccgtaaggaaatcgccaagcaggtgaacgttcccggcttccgtaagggccacgttcccggcaagatcatcgaccagcgcatcggtttcgccgccgtcgccggtgaggccgtgaacgacgcggtcccggagctgtactccaaggccctggatgagaagaagattcgtccgatggctcagccggagttcgacgtgcaggatgttccgcagtccgccaacgacgaaaccaagctgaagttcaccgccaccgtcgagcgtcgtcctgacatcgaactgccggaaatcgacggtcttgagatcgccatctccaagccggaagtcaaggatgaggacgtcgacaagcgcctcgagaccctgcgtcagcgcttcggcaccttggtcggcgtggaccgcccggccgccaagggcgacttcgccaacatcgacctgactgctgagattgacggcgagaccgtcgactcccaggaaggcgtgagctacgagctcggctccaacaccatgctcgacggtctggacgaggctcttgacggcctgtccgccggcgaggagaccaccttcgaaggcacgctggaagccggcgagcacgagggccagaaggccaccgtgaaggtcaaggtcaactccgtcaaggctgaggaactgccggagctgaacgatgagttcgcttccgaagcttccgagttcgacactctggacgagctcaaggctgacatccgcaaggctgccgctcaggacgccgaaggtcgtcaggccaccgaggctcgcgatgccttcatcgccaagctgcaggaaggcctcgagatcccggtgccgaagggcgtcaaggccaacatggtcgaagagcagctcaagggcatgaccccggacccggagaaggccaccaaggagcagaaggctcaggccgaggagaccgtggagaaggatctgcgcgatcagatggtgctcgacgctctggccgagaagctggacgttcaggtgtcccagtccgacgtgttcaacttcctcgcttccatcgcccagcagtacggcatggacccgaacaacttcatccaggccatcatcaagaatggccagcttggctccgctgtgcaggaagtcggccgttccaagggtctgctcgccggcatgcgcgccgtcaagttcaccgctgatggcgaggttgtggacctctccggcttcctgggcgaggccgctgaggacgaagagtccgagtccgtcgaggccgcttccgctgctgccgccgtggccgacgaactgtccgccaaggatgacgccaaggacgctgagtgagcatagcctcatcgcgttagcgtgattgtttgagcccggaatcgtgtttcacggttccgggctcttcctattctggtaaaaggactatttctttggctcccctttggggggagctgtcgggcgtagcgagactgaggggagttcccaaggcatactcgttgcatagcgtgcggaggttgacatgcagccaacggttactatcaaacgccttggttggctcgctgcggcgaccattgtgctcggcgtgctcatcggtgtgggagcaggtctgctgaccctgttgctctacggcgttgaacatgtgctgctcggctacatcgaaggcccagaattgtctggtccattcggcgtgcccgctgcacgccgtgtgatatcggtgaccgtgggactcggcatcgcgggcattatctggtatctgctacgacacaaaacgactgtggtgccctcagtcaagaaggccgtggcgggaaagcgaatgcctttctggcaaaccattgtgcatgtggtgttgcagattttcatcgtcggctccggtgcctcgatcggccgagaagtcgccccacgcgaactcggcgccatgatcgcgcaacgtttttgcgacctgttccatatcgagggcgttgatggtatcgaccggcgcatggtggtggcagtggctgccggtgccggtctaggaggcgtctatgacgcgccgctggccggcatgttcttcgccgtcgaaatcctgttggcggatgtgacgatcgaaaaggttgcgtttggactgggcgtgtctgccattgccgcattcgtggcggttgcgatcaaagggcattgcctgttctacgacatcaccgccatgcaaccggaatccacgccaacgttaatgctgttcgctctgatctgcggtgcggcatgtggagtgggcggcgcattgttccgaaaaggttcgcaatgggcggaagcacacaagccgaccggcaaggccattccgtggcagatgccgctggctggtctcatcaccggtttggtggcgattgttgtgccgcaggtgatgggcaacggccgtgccgcagcgcaacttggattcagcacgttcattcctgaaaccgccggcactgctggtgccatgcagtcggcatcttcagcggccgcctctccatggaacttgctgacgggcggcggtaatgtatccgattcggcctctggcgggggagcgggctctggaatggcctcgttttgggccatgcttcagggtgggagcggctcttctggatccgtgatgaacgccggtttcccgctgtcccagtccaatatctggatgttgctgggtgtgttggcactcacctttgtcgccaaggcgctggtgacgctgatgaccattcgctccggtgcatcgggcggtgtgctgcagcccggcatcgcattaggttccacgctgggtgcgatgctcggcctcgtatggatactgatgtttccgactgattcggtaaccgcgtgtgccttgatcggtgcggcttcgttgctttcggcctcacagcaggcaccgcttatggccatgtgcttggtgatggagctgaccgaagcgccgattaccttcttcgtgccagtcggcatggccgtggccacgtcgtcgttgatatcaaagtggttgctgagtcgtaagtaagtagatgcatatattctggctcccctctctgaggggagctgtcgaacacagtgagactgaggggagccgaggtaaagaaagctatgtcagaaaacaccgaagtccgtgcggcacttgaatcgcttgccgctgagccactcactgagcagattgactactatcgaaagccattcatggtgttgtgggccgccattcaggaggccgccagcgatgtggccgaagactacgacttgcctgcggatatggcccaattatgggtggccgaacagatgcgccaagtcgccgattcactggtcgatcggctcgcggaaaaagccgtggcccatggtgccagcaagtccaacgtggcgcgagccgccggtgccagccccgccaatgccgcccgtcgcttcccgcgtctgggcgacgatgccgcctcccagacccgcctcctcattgacgacgtcctcgacaccttggaataacccgaaatccctacgctacccgccaaaaagcacgcgaaaagccgccttcagtcgcttcaaggcggtagtctgaacaatgttcgagtaattagaaggagaatcaaggtgagcaatacctttgcgaccttgccggtcatggcgggcgatgacgtcccggccggccccgtcgacccgattttcaaccgtctgctcaaagaccgcatcatctggatgggtgaagaggtcaaggacgatatggccaaccgcatctgcgctcagctgctgatgctggccgccgaggacccgaagaaggacatctggctgtacatcaactcgccgggcggctccatcaccgcaggcatggccatctacgacaccatgcagctcatcgagcctgacgtggcgaccgtgggcctgggcatgtgcgcttccatgggccagttcctgctgagctccggcaccaagggcaagcgttacctgacctcgcacgcccgtgtgctcatgcaccagccttccggcggcatcggcggcaccgccactgacgtgcgcatcaacgccgagctcatcatggacatgaagaaaaccatgagcgagctgaccgctgagcagaccggccacaccctcgaggagatctaccgcgacaacgaatacgaccactggttcaccgcccaggaagccctcgactatggcttcgtggacaagctcgtgaccacgccggacaccatcggcaacaaccagcagggggagtgagactcatggcaagtgaagaagcaaagttcgccgcccgtgccgaccgcttggccggccgtcatggcgtagccggtttcatgccggccgccgcccgcgcagcccagcccgcgccgaccaaccgttacatcatgccgcagttcgtggagaagaccccgtatggcatgaagacccaggacgcctactcccgcctgttcgaggatcgcatcatcttcctcggcgtgcaggtggacgacgcctccgccgacgacgtgatggcccagctgctggtccttgaatcccaggatccgaaccgtgacgtgatgatgtacatcaactcacccggcggttcgatgacggccatgaccgccatctacgacaccatgcagtacatcaagcccgacgtgcagaccgtgtgtctcggccaggccgcctccgccgccgccattctgctggcctccggcaccaagggcaagcgcctgatgctgccgaacgcccgtgtgctcatccaccagccggccatcgaccaaggattcggcaaggccacggagatcgagattcaggccaaggaaatgctgcgtatgcgcgaatggctggaggagaccctcgccaagcacaccggccaggatgtcgagaagattcgccgcgacatcgaagtggacactttcctgaccgctcctgaagccaaggaatacggcatcgtggacgaggtgctggaacaccgccagtaaaacttccgaacattgcaataccctcggtcggcaacgaccgggggtattgtatttcaaggatgacaatgataatgcgcagcgtggcggttcgacggtgcggcgcggtcggcaaaggagaatcatgggacgtgtggtgagctacaacgaggacgtaccccgttgcacgttctgcggcaaaaccgaacgtcaggtcagaaaactggtggccggtcccaacgcctccatctgcgatgaatgcatcgccctgtgcgtggacatcatctccgaggagcgtgtcaaagatgccgaggtcaattcgctgagcctgcccaagcccgctcagatcttcgattatctcaaccgctacgtcatcggtcaggagaacgccaagcgcgcattgtccgtggccgtatacaatcattacaaacgcgtcaatatggagcttcaggagtccgctgagcagcttgacgggaataacgggcacggtggccagaccggcaaacaagccaagcaatccgctcccgcccagacgcgtgctacccgccgcaacagtgaccctttggctgacgttgaggtcgccaaatcaaacattctgttgctcggccccaccggtgtgggcaaaacctatcttgcacaggcgttggcccgcgtaatgaacgtgccattcgtcatcaccgacgccaccaccctgaccgaggccggctatgtaggcgacgatgtggaaaccgtgctccaacgtcttctccaagccgcggatggcgacgtaagccgagcccagcacggcatcatctacattgacgaaatcgataagatcgcgcgcaaatcaggtgagaacacctccatcacccgtgacgtgtccggtgagggcgttcagcaggcgttgctgaagattttggaaggcaccatcgcctccgtgccgttggagggcacgcgcaagcataaggagcaggacactgcgcagatggacacacgcggcatcctattcatctgcggcggtgcgttcgtgggactgacggatattgttcgcaagcgattgggccgtcgagagaccggcttcggcgcgaattggcacgacgccgacatgaaagacgaggaattgctcgaacaggtcaatgccgatgatctggccgagttcgggctgttgcctgagttcatcggacgtttgccggtcgccagtgtgctgaaggaacttaccgtagacgatctgacggcgattctcacccagccagccaacgcgctgatcaagcagtaccgtaagctgttcgccgtcgacggcgtcgacctgcagttcaccgaacaggccattcgggcgattgctgatatcgccatcaagcaggggaccggcgcacgcgggttgcgttcgattatcgaacgtacgttgcaggacacgatgttccagttgccgagtttggatgatgtgaagcaggtgattgtggacaaggcgtccgtagagggttccagtacgcccaaactcttgcgcgaagccgtggatgtgccgcagggacgcctcaaagttgcgtagtcggttttgcttgaccgagtccgtacacatgcggcgtgaggccagtaaatacgccgttgcggtggcgattaggatggtgcgactcgccgcaacacgccgagttgcattcatctgaacggcgtgtattatatatcgagttgtctgaaaagacaacatgcgccagtagcccagcggattagagcagctgactacggatcagcaggtcgcaggttcgaatcctgtctggcgcactcccgaaccacggggacaacagtggtatgcgccagtagcccagcggattagagcagctgactac

SEQ ID NO: 3426 - DNA, 25315 bp, Unknown
  R151_18m  MAG No. k141_43451
gcccagctcgtcggcggtggccttcagggacggaacctgatcgtcctcgccttcccacaggttgatgagcgggaaggtcggaatgtccaggttctccaggcgctgcacgtggaacgggtagcgccaggccagctcgggatcgtcgcgccaggtggaggcgcgggtcaccacgatggcggcggacggccactgcgcgccatactcgcgacaggcgatgtccagccacttctgggcaccggcgtcggtgccgtaaccggcttcgaccacaaccacgtcatgcagagcgcaggccatttccacggaaaccagcgtcggaatgccgatggacacgttggcgaacgggccaccgtgcacgtagaccggggagccgttcacggtctcggtcttggccggcttgaccgcgtcggccagaatgccggtgatgcgccacagatccacgaactcgccgaaggtcacggccttgccgtccttggtgccggcgatcatcttggatacacgctcggaaatctcgtccatcgagcgggagagcaccatgatctgcatgagctcgcaggtcggcgtgagcacgaccttctccggcacgttgcccttgccgtagtccacggcggtggagcgcagggagcggctcggcacctcggagacacgcggcacgagaatcgtgtcaagcttgccttcatcgatggccttctcggcgaaggagacgagcaggttctgggccgcctcgatggcgcccatttcgccgcacagaccccagtcgatgagctcggggtgggtcagggatgccttgccgccgccggaggcaccgcccttggaaccggctgcggtgatgcccatgctcggctgacgcagcacggcggccgcatcaatgccacgcttgttcagggcgtcgatcaaggcgatggtcgtggtggtcttgccttcgccgcgcgatgccttgagcggcgtatcggcggtgacgagcaccaccttgccgtgcttgcacggggcgtccgggttctcagccaggtacttcatgtaaccgaatgcgtcgatcttctggaccaggccgtactggctggtgaagtcttcgatggtggtcatttaatgcctttctgtgttgatgatggcggagcggggtggtggggcggccgccgccgcctcttcgcctagaaacagcccactgggctgtttcttaacagcttagcctctcagtccgcttcgcggtcagttcccctcagggaggggagctcaatacggactaaaagtcggacatgtggaagccgttcttcatttccatgctgcgagtgtacagcacggagtcaagcagcttgtcggtttcctccttgagctggtcggccatggtctggttggcggcggcgagaatctcgcgcacctcggggttacgcagcgcggcgatagtctcgtccggggtcatcggctgcacatcgccatccacgttgtcggcctcgaattcctcttcagcggcagactgcgcggcttcctcggcggccgtcaagcccagacgggcgatctgctcgtcggtggcggcgaccaagcggtgacccatcgcaccggtcttctcctggtagcgctcgacggcgttggacgtggagcggaaagcgccatcgcacagggcggcgatgatgcggttggcccagtagaagttctcggacgtcacgcgggtggtggtgtcctcaaggtaagcgggcgtggtgtccacgttcgggaagaacggcaccagcgtgttgaacgggttggagccgtatgccatccactggatggcgcgggaggcctgcgggcggtacgggcggatctgcatcaccgcaagctggctctggcggttgatgccgatcgtgcggtacatgtggcgggtgcgctcatcgcccagctggccgtatggatcgaacggggtgccctggtagtgggagctcaacacgtacttgatgtcctcgatggtcaccttgcgctcgggctggcgggcccacggaatgtcgtcggaggtgggcttgtggtcggcgtccgggccgtcccacacctcgtcgtacgggttgaggaagcgctgcatgtaccaggcgcgcggggtgttgtacacgtggtcggagtcggagtgggagccgaaggcgtcgcgcgggttgaacggggtggtgttctccaccgcgaggtccaggtggttggtttcgatgaattcggcgagatcttcggagcacatgtgcgcttcttggtcgcccagagcgtcctcaaggtcgaattcgtcgataccgagctggttcggcatggtcacgtaggcctcgtccggcactcgcttggcaatccagtgatggccgcccacggtttccagccaccagatttcgttggagtcggagaaggcgacgccgttcatctcataggtgccgaattcctcaagcagcgcgccgaggcgctggacgccctggcgtgcggtcttgacatacggcagcacgatggtcaggaagtcctcttcgccgatgccgccgggcacctcgggctcatcgcccctggccggcgtgtattccacgaacgggtcggcgccgagcacgcgctcgttggtggtcagggtctcggtggcgctcatcgccacgttcgcctcgttgacgccggcctcgccccagatgccttccttgaggtccgcgttcggcacggcggtgtactgcagcgggtcgtccggcagagtgatggtcaggtgggagatcactgatttgtattcgcgcggctgttcctccggtttcacgacgatgaagcgcttcgggttgaactcgccgttcgcggaatcctcgttgcgggcaatgatggtcgaaccgtcatagctcgcgtctttgcctaccagaatcgtggtgcaggccatagtgtgatggtgtcctttctcttattcaagctccccttgtcaggctgagccgttcagcaaacagcccggtgggctgtttgtaggcgagggtgggagataagtcccaccacagatgttgcgggcggtagcccgtccgtaattgcaggacgagctgtctcgcaaagcgagactgaggggtagtcactctagctgtctctcccccagtccgcctacggcggccagctccctcatcagagggagctcacatacgccaactaaaaatcacgccttaccggtcaggaagatgccgtcggtgtcgggcgcttcgccgctgttgcgcagcgcgtgcaacagctcgttgagccagaagccctgattcaagccgggcaacggcttcttggtggcccacacctgcaggtagtactcgtggtccttgtccggcggctgcggaccgttgtaccgcatgatcaccgctgggtcagtgctgcggcccaagaacttggaggccgaagaattgcggccttgcacggtctcgggaatcatggccggcagctgacgggagaagtccggcgggatggccaacgcatgcgaatcattgaagtcgtacatcagcgcgtcaatcggcagattggccacggaccagtgaatccactcgaagccgcagaccggaatcgaatccgggtccacgaactcccagtgcaggtaacgggcctcggggttcacatcaccgatgtagaacgggaaggagacgaccggcacgccgccgttgaagtactcaggcgcggcggccttggcaaaatcgtccggaatgacggtgaaatcggcggaaatcttcatatgtcccagtatcgctcatatgtgtgacgtactgggggctgtgcgttacgggggtctctcccccagtctcgccgcgctcgacagccccctcgtcagagggggctggttgcgtcgggttatggaattagggcgcagaagagggattcgaataccagtagtgggttgccgttgccggctagacgcttgcgggcgtgggccacttcgtccagacgggtcacggcaccggcccggttcaaccgcaccgacaattcggtgatcggcgagcggttctccaggttgatgaggcccaccgaatcctccgcattgttctgcagcaccgccacatcccggtagatggaggcgatggagttcagcgcacgatccaatacgtcgcgcgtacggcgggtgaccaaacgcttcacatcgtctttcttggcgatctggttgaacgcgccacgcagtttcggcgggatgcggtcgttcggtgccagtccgttgatgcggcggaattccgcttcctggccggcggtgatgcggcttgcgtccgcctcggcctgggccttggcattgtcgataaggctgccggccagcagcaccgcgtccgaggcgcgagcgaggttcagtacgcccaccaccaattcgtcgcgatccgtcatcacctgctcgtcagtggcgtacaacttggcgatgccgatgtgtccctcggccagacgggccgcacgctgcgccacttttggctcgacattggtggtggaggtcaggaatccggccaccgcctgggtggagggcacggcgaggttcacgatgcgcgtgcgcgagcggatggtgggcagtacatcctgggcactcggcgcacacagcagccagatgcagtgttcagccggctcctcgatctccttcagcagcacgttggtggtgcgctccagcatgcggtccacatcctcgatgatgatgatgcgccatggtgccgtggcaggcatttgctcggaggcggtgatgatctcgcgcacctggtcgatgccgatggtcactttgttggtggccagcactgtgacatccgggtgggtgccagcgagcacctgttgggtgacgcgcgtgggctcatcgttcatgccgtggtcggggctttccagcgccgccgcgaatgctcgggccatattggaacggccggagccgggaggcccgcaaatcagccacgactgggtgatctgacccgggtcgccctgcgcgatgcgactgagcatgtcgattaccggctgctggccgactagtgaatcccatacgctcatcggacaccgcccatcgtcacggctcctgtagacgccccggatcgcgccatcaccgtatccacatctgcaacattgtcccgcagcagtgtctgaatgtccgcttcgatggcggaccacacctgttcgatggactggctggcatcgatcacgtggaaacgattcggctcggccacggccaagtcgaggaacgcctgacgggtgcgggactggaattcgctgccggccgactccatgcgatcttcggcatgctcaagacgattgtgggaaagcgccggatccatgtccagcagatatgtgcggtcgggcagcaggttgttggtggcccacatgcttaaggctcgaatctcttctggcgtaagttcgcggccaccggcctgataagccaaggaagagtctaaatagcggtcggtgatcaccacttcaccgcgctccaatgccgggcggatggtttcggcaacgtgctgggctcggtctgcagcgaatagcagcgcctcggcgcgcggtgcgatgtcgacggcgcccccatccacaccgtgcaacagcagttggcgaatggccttgcctagcgcagtgcctcccggctcacgggtaacgaccacggtacgcccctgagcctcaagatacgcacgcagccgctcgacttgcgtggtcttgcccacgccatcgacaccttcaaacgaaacaaacagaccgctcatgctattgaccttagcgttaggcgcagagttgtgcccaacaggcagttaaaccagctctacctccgtttcaaggggctgatttggtcttttctgaaggtctacttccgtttcgaggggctgttgcccaagtagacaacgttccaaaacggcggaatgacgttggcgcggagccgttcatactcgtggttcagcagatgaccagccccttgaagcggaagtagatattctcaaaacgagaaatcagccccttgaaacgcaagtagagcaataattccgctcagccacgcttgggaattacggcggggcgctcgtagccctcgttggcggtcagccagtcgacatccttcttgacggtggcggcggtggagctgagcttttcggcgatgcgctggttggaccagcccttgtttgccagcttcttcacctcggcacggcgtccggcgcgcttggcctcggcggcattggtcgcagccgaagcagcgcccttcttggctcccttggctcccgacttcgcggcaccggcacgcccagcaccgcgacggccacgggtggagggaccagccgcacgcttttcggcgagcagtcggaaggcgtcatcaggggtgatggattcaggcgtgtactgacgcggcaccgtgcggttggtctcgccatcggtgatgtacgcgccgaaacggccgtccttgatggtcacgttcttgccggtgttcgggtccttgcccaaatcacgcagcggcggcttggcggcaccacggccacgcccgcggccgtacttaggctgcgagaacagttctttggccttgtcgatatcgaccgtgaagatctcgtcttccgaggtcagcgagcgggtctccgacttgccgtcggcacccgtcttggtcagataggggccgtagcgaccgttgttggcggccaccgtgcattcggatacctcgccggtttcggcgttggtttcctcgtatgtgcccacttcgcgcggcaggctcagtagctttagcgcgtcttccagcgacagcgattcagggctcatcgtcttgaacaacgaggccatcttcgggcgcgacgcggcggcggccgcggccttcttcgaacccttcttggccgcagaagcaccagcagtatcgccagcagcgccagccgaagcctcagccggcggcaccagcgccacatacgggccgaaacgcccattgcgcacctcgacggtaccgccggataccgggtcaacgcccagctcgcgcggtccaccggagtggttgtcgatcaaatcgcgggccacggccaccgtcagctcatccggcgcgatggtgtccggcagagacgcgcgcttcgggttgccttcgacgtccagatgctccatgtcttccagatacgggccgtaacggccgacgcgcacgtgcaggccgtcgccgatgtcgatggtgttgatggcgcgcgcgtcgatctcgccgagctgcgcgacctgctgttgcaggccttcgtgcgcctcgtcggcgttgcgggcggcgccctcgccggaaccgaagtagaagtgggtgagccagtcgcggccggattcctcgccgtgggcgatgcggtcaaggccgttttccatctcggcggtgaactggtagtcgaccagcttggggaagttcgtctcgagcaacttggtcacggagaaggcgagccagctggggatcagcgcacggccacgctcgtatacgtaaccgcgatccatgattgtggagatgatgctcgcgtaagtggacgggcgaccgatttccttggcttccagcgtcttgaccagcgtggcctcggtataacgggccggcggctgggtttcatggccgtccggttcgatgtcgcttgcctcgacctgctggccgacgctcataggcggcagggaggtgttggattcggaggcgtcacccctgacggccttgacgtccgtcttgccggcggcagcagcctggtccgagccagccccagcgccgggagcggcggctttgggcttgcgcccctcccccgtggccttcataaagccggggaattcgatgacagtgccggacgcttggaacacggcctcgccctcagtggggccggccggcgcagacaggcgcacggtggcggtggagccggtggcgtcagccatctggcaggcgagcgtgcgctgccagatcagcgtgtataggcgcagctggtcgccgggaagtttggaagccagctcatccgggtcgtggaagcgcgagcccgccgggcgaatacactcgtgggcttcctgcgcgccagcggttttggtggcgtactgcttgggctcggcggagaggaacttgtcgccgaaatggtaggagacggcgttgcgggcggcggtgatggcctcctgcgacagcgtcaccgaatcggttcgcatataggtgatgtagccgttctcgtacaggctttgggccgcgcgcatcacgacgcgagcacccatgccgaggcgattgccggcggtctgctgcaaggtcgaggtggtgaacggcggctgcgggcggcggcggtacggcttggtttccatcgacatcacagtgaaatcggcggtcctcagcgcttcagccacggcagtggcaccagcctcatcaagctggcgaacgttcgccgcgaacccgtccggggtcagctggccgtcggcaccgaaatccttggagccggcgagtcgcttgccgccgagcgcgatcatgcgggcggagaattcggcacgctcccccagcgcgtcaggcgcggccaacatggcgacgatatcccagtacggcgcgcgcttgaacgccatgcgttcgcgctcgcgttccacgatcaggcgggtggccacggactgcacgcggccggcggacaggcccgggcccaccttgcgccacagcaccggcgacagctcatagccgtacagacggtcgaggatgcggcgggtctcctgtgcgtcgaccatattgccgtccacgtcgcgcgtgttgttcagggaggcgttgatggcgttcttggtgatctcgtggaacaccatgcgcttgaccggcaccttgggtttcaaggtctgcaccaagtgccacgcgatagcctcgccctcgcgatcctcatcagtcgccagatagagttcgtcggcgttcttcagggccgatttgagttcgctgaccgtacgcttcttgtcgccgtcgacgatgtaatacggcttgaacccgtcgttgacgtccacgccgaacttgccgaacttggccttgtctgccgcgggcacctggctgggctgcgcgaggtcgcggatatgaccgaccgacgccatgacggtgtaccccttgcccaggtagtcaccgatcttgtgggccttggtcggagactccacaatcaccagtttggtagccatacccactccttatgtattgcgcgaaacacacgacgtttctggcgtcataatactcatgaatcatatccaactgccaaattccgccgttgtgccgggcaaattcagccgttcgcacctcatgttttaccgtttgggcggtgccggcggagcgccgatcaggcccagcctgcttaagggcgctgcagtgatctgacgtagggccagcaacagtccgaatgcgagcatggccacacccgtaatgcccacaacagcgctgacattcgccccctgaaccgcccaactggcgctgacattgagccccggcaccacctgccagatcacataaccgctgtaggcgagcaacagcaggcccccggtaatcaacacgctgccgacgatctgcacactcactgaggagacgcggtggcccggctcgtccatgccggacttgcgtgtaaccgccagagcgagcagggccaatcccgccaccagcaggatggacatcgccacatccgaagggcgatgccattgcccgtatatcacagagacaccgacggtcgccgcccaaaccacgccgatgacgcccgccaaagctcgaaccgcgcgaggcacggtaagcagcagaatcaccgcacaggctgcggccagcatcgtgtgtccggaaggcgcggaattagcggcaggcgattcagtgttgatgatgaacggacgcggcaacagacccttgatacgggtgacggccaagcagaccacggcgaacacggcgatttgcccggccaaccaccagcggcgtcgaatcagcgccgtaataatgccgattgcggcaattgtgcagctgacagcgataaccagccaggattgtgcgacggcgttcatcatgccggtggtccaggacggtacatcgttgtgcaggtttttccagaccagttcgtcgtacgattgtccgttttcggtaaacacgcacccccaccacacgccgaagccaatagcgatcaggagcagaccgaataccacgcacagtacgcggctggagattcgcgggcgcacggtaagcgggtcaagccgggccaagccacggtcgatatcagatgccccatccgcatcgtccatgcccagcggcctgaaatcccctaaggagcctgatgtggatgccgatgcatctgaaccggagaccgggccgagcgcagccaatgggtcaacaacgttcgacgacgagtcaggctgcgctgcgcctgagccgaccagattgaccgccgcatgcgggtcgcgaattctaggggtctgtgcgtcattcatacgttcgactgtacggccgcgccccggacagggagccgtgctcgtgccagctcacggccaaatccgcacaaatggaaaacctccacgcacccgtcagaggccacttacccttgctgcattcctgccctgggggagttgggtgacatagcgccgcgtggaggctggggataagtctatggagacgtatggaccagcgcagcgacacgaaacgtgcgcgccgggtcgcacggcaggccaaccagcgcattcaggcaatattcatgcagcatcaaggaacgtgcccaattgtaagaattccggaaaaataccggcataaatgcgtgtggttacgctcacgtcaaacgattgttcaaggccaacagttacggtggacaccatggcttcttatactcgtcgtgcacattcgggaggcaatggccccgctctgaggcaaccgcgcaccgcgcaaagcagagccgaccactccgcacaggagggcccctatacgccccaggagagccgttcccgccacgcaagccacaaggcttccaatagccatcgagccccgaacaggaagaaaaagaacacaggaaaaggcaagcaccgtgtactgaaatgggtgctgggcatcttcttctccctgattggactgggcttgctggccggtatcgcagtattcgcatacctgtacaccaccaccgaggtcccgcaacccgaaaagttcgcgttggccgagaaaaccaccgtgtattacgcggacggcaccaccgcgatcggctcctacgcggaacagaatcgttcaatcatctcttgcgaggggctgccggactacatcggcaacgcgattgtggcgtccgaaaaccgtacgttctacacggataaaggtcttgatctgaagggcatcgcccgcgcattcattaataatgtgaccaagggcacgcgccaaggtggttccaccatcacccagcagtatgccgagcggtattacatgggcgaaaccacatcctatgtgggcaaggcgcgcgaggccatcgtggccatcaaaatcgcgcaaaccgagtccaaggacgaggtgctgtgcaattacatgaacaccatctatctgggccgcaactcctacggcatccaggcagcggccaaggcatacttcaataaggacgccaaggatctgacgctgtctgaagcggcgatgatcgccggcattattccgtcaccgtccacgtgggatccggccgataacgccgatatggccaaatcgcgcttcaagcgtgtgctgaacatcatgcaggaggatggttacatcactgccaagcagcacactgatgccaagttcccgcagactgccgcggtggcgcagcaaaacgaatacgcggggccgaacggttatctgctggatatggtgcgccgtgagctggtgcagtccaaggcctttaccaaagaggatttggataccggcggatacaagatcatcaccaccatcgacaagagcaagcaggaccttatgcagtccatcggcgacacccgtctggacgacatgcctgaatccctgcaaatcggcggcatagcgctggacccgaagaccggtgaagtattgtccgtatacgccggttcagattatctgtccaagcagctcaacaatgccgatcaggccgtattcgaaccgggttcgactatgaagccgttcgctttgctgggggccgcgcaatccggcgtcagcttcgatacgttgttcaacggcaattcccaccagcacttcaccggcttggatcaagaggtgaataacgctctggagaacaactggggcaacatcaatctgtatcaggccaccgccaactcggtgaacacggtgttcatgaacgtcaatgagcatctgacgccgaagcgcacggccgcaatcgcccatgaagcgggcattcagggcgatatcgatgaaaactccatgtacaacgtgctgggcatcaacgccctgaccgtgtgggatttggcgcaaggccattcgaccatcgccaacaatggtgtgaagagcaccttgcacatggtgtccaaagtgcttgattccaacaataaggacatgtacaacgcgcccagcaaaggcaccaaggtgttcgatgccaacgactgcgctttggtgcagaaggccatgcagggcaccaccacgtacggtacggcggccggcacatccaacatgctgggccgacccatcgccggcaagtccggtaccgccaacgacgaaatggcttcgtcgttcgtgggatacacccccagcatgatgaatgtgtgggctatctggaacccggacgataagggcaatccgcaggcggtgccggccttctccggatacggcatctcttccactggataccccgcccacctgttccaggagttcatggctcaggccttgcaaggtaccgaggtggagcagttcccgaccgctaaagacaatggcaagatcggtggacccgacggcacttggggcttgggcaagggacagagcagcggcctgtccaataacaccaacaagcagtccaccgaagacgcgcagaagcaggctgagcaggacgcacagcagaaggcggccgaagaggaagccaagaagcaacagcaggcccaggagttcgcccagcagtgcctcgccaatccgagctattccaccgagtgtccgaattatcccggcaccactaccggcggagatggcaacaatggcaacaatcccggcaataccggcgggaacaacgggaacaataccggcaacgataatggtaattccggaggcaccggcgggaacaacggcaccaacggcgtcacccagtagtaagtaagcacagacaacaaagctccctctgatgcaatcagagggagctttgttttgttgttagcgctcagcgcttgcgctgggaacggttgatggcagagataatcgacttcagagcgctggtggtgatcgacgaatcgatgccgacgccccacacgatctgcgcatcatcggcctcgccgacctggcattccacgtacgaggcggccatggcgtcggtgccgacggacatggtgtgctccacgtaatccataatcgaggcgtcaacgccaaagttcgagatggcgttgaggaaggcggcgatcggaccgttgccgatgccggagacctcgcgctccacgggcgcatcgaccccgacgttcacgccgcggtcgagcaggcgagccttgagcacggtatcggagccatcctcaccggagctgacggccaccttgagcagcttcaagcggccccacggcgcgagcgaggcgtcatgagtatcgcccacaaccacaccggcggcggtcatgccggactgttcgatcggcaggtactcgtccttgaacagacgccagatatcctcgtccttgacttccttcttggtcgtgtcagcgtagtcctgcacgatcttgtcgaattcaatctgcagacgcttgggcaggtcaagattgtggttggtcttgagcaggtaggccatgccgcccttgccggactgcgagttgacgcgaatgatggcctcgtacgtgcggccgatgtccttcgggtcgatcggcaggtacggcacaagccacacgaagctgtcgagatcggcgccagcgcgctcggcggccacctgacgagcctcgagacccttcttgatggcatcctgatgcgagccggagaacgcggtgaacacgaagttgccggcgtacgggtgacgctcggagatcttgatctggttgcagtactcaaccgtcttgcggatctcgggcacgttggacaggtcaatctgcgggtcgatgccttgggtgagccagttgaggcccagcgtgaccaagtcgacgttgccggtacgctcgccgttgcccagcaggcagccttccacacggtcggcgccggccagcacggccagctcggtggcggccacgcccatgccttcgtcgttgtgcgggtggagggagagcactacggagtcacggtcgtcgaggtgggtggagacgtactccacttcgtcggcgaacacgttcggcgtggtcatttccacggtggcgggcaggttgatgatcatcgggtgctcgggagtcggcttgataacaccgatcacggcgttgcacacctcgacggcgtactccggctcggtgccggtgaaggattccggcgagtactcgtagtacaggtcgatgcccttggcctcgttctcgaggtccttgcacagttcggcggcgtcggtggcgagcttcttgatctcttccttgttcttgcggaacacgacctcgcgctgcagcacagacacggagttgtagaagtgcacgatggcgcgcttggcacccttgagcgcctcgtaagtacggcggatgaggtgctcgcggcactgggtgagcaccacgatggtcacgtcgtccggaatcagctcacgctcgatgagcatacggatgaagtcgaaatcggtttcggaagcggacgggaagcccacctcgatctccttgaatcccatggagacgagcaggttccagaaacgcagcttgcgctcggaatccatcgggttgacgagggcctgattgccgtcgcgaagatcgacggagcaccagcgcggcgcgcgctgcagtcgcttgcccggccacgtgcgctccgggtaatcaaacgggatctgcttgtcgtaggcggcgtacttgttatacggcatacgactcggcttctgcggatcgccgatgaatcgtgccggaggcagcagcgggtcgttgttccccccattggacgccgcagccactgccgcgagatcaaaaacggatgattgaccctgacccattgttcctcctttactgtgcgaaccattcatacaatcgcttattggatattcgtttacgcattggtaacatgcgtaacttcctccatcctagcgacggcccattccaacaccccgttcatctcacaatatgccagcacacgtagcgcttcccggcgcagtactactagacttgcaactatgcgtggaggcgcatgggcttccacagcgagagaagaggtccattatgacaaatccaagtatgcctccaatgccgcaaatccctcagccgagcggtcagcggcccgcagctccgcaatttacagcctcagcgcccgtattggcgatgagcagcaggcccgcggcatgactcccaccgttaccgcagccaccttctggctgtgggacgtcttgggaattttcatcatcgtgggaccgctggtctacttctacaagctgctgcatgcgatgaacgatctgtccgccgactacaacgcgcgcggctgaaacaatcccgtccttctacacttgccgacatatttgccggggcagtgtttttactgcgcttgccgatggccgcaccagtcagaccattattgttcggctccgcagcctcgttgattcataggagattccatttatgctttgccccaattgccataccgataacgcggaaggtagcaagttctgcgaaacatgcggcacgccgctcaccgccaccgaagcgaatactgcagcgtcgagtgcttccatgacaccgcaggacgcgccggttgcgcccacgccagcgggagcgactcccgctccggctgccgcttcagtccccggccccggcggtgcggcagtgccgccgattcctatgccgcagggtgctgctggcatgtcggctccggcggtcgtctccgcaccggcggctacgcagcccactgcgaccgttgccacggccacgcagacggccccggcaacggcaaccacaaccgccgcgaccaagcccggcccaaacaaactcatcatcatgctggtggcggtgctggcggccctgatcatcgcgggtgtcgctttgttcctgacatatcgttccgaggtgtggggcggcaagtcgctgcctgacccggcatccatcgcctccagcgtcaccgataagaacggcaagaaggcgtcggccgtcaaggccaaggatgtcacggccgcgctgaaggccaagggactcaacgcgaaaacggagaaggtgttctccggcaaggattcgggtgagttcatcggctataagaacgccgctccgggcgctcgtgtcaaggccggctccacggtcgtggtgcaggaatccgccggccccggcgtgccgaaagacactctgggcgcacaggtcaataaggtgactgagacgttcgccgatatgggcgttccggtccactataagaaggtgtttgtctctgacgccaagaagaaccccgaaggttcggttgtggccacctatcctgccgccggcactggggtcaaggacgacgagaaagacaagggcatctacattggcgtggccgccaagggtgacgacaccgctctgcccatcgacgtgatgggtcaggatgtggataccgtcaaatcccagctcgagtctgagggccacacagttaccgttgaacagcgtttctcttccaaggattacgtgggtaaggtttccggcgccagccccgctccgggatcgtccctgtcttccggcgaagacgtgaccctgtatcagggcatcgatgccagcgacaccaaagaagcctttacaggccatgatttggccgaaacaggcggtgacgcgctgctcggtaccacacgcgcagccgacggccagtggtgcactaatgatgggaagtgcatcaccatcgacaattacaaggtgactgaaggcggcagtgataatgctgactataccggcgattacgacggtactctgattgcctgcgacgccattcagcaggcgtactgcaacagtccgaaagccgactacctagtcacacaagattatggcgccttcgagctcatgccgcatatcagcctgaccaacttttgggccaacggcaaaatgtatgacggcaatggcgtgcatatgggtgattcttggcccacatccggcgaataccacatgcaggatctgttcctcgtagtgcctaccggctccgacttgcaggggttggaagataagggctacttcgacaaagacgcgcttgccgcagccaagaagcagaaggcggtggacaccaatcgaccgttcattctgtaccgcgatccgaagctctacgacactaccaccgctccatacaacggtgccgggaacggcgccaatccgttcctgccctacaacggatacaacggcagtaagtccgacatcgtcaagatgaagccggccccaagcgacgccgacgcctactatctggtcgaagcgtccgaacccgattgggattccctgccggacgcggacgtgaaggcgcccagcaccaaggacaagggcaactccaaggattccaaggattccaacaagagcagtaagaaatccggcacaccggatgcggcctcactgaaggtgttttctgatttggccggtgcccaatacgcttacacgattgctggcgatggcagcgccttcaccaccatttcgttggatgatcggggcaacttctccggcactgtggacgaggcagatatgagcagtggcgattccgcagcgaatgcgccacgtatccagaccaagttcagcggtaagtttgcatccgccacatccaattcagatggcacggtaacgctgaagtgtgatgcgtcggctttcaaaattgacgacaagtccaaatccgacaagtcaggattcagcccgtgtggcaccttcaccggatatccatctggaacctccagcgatgcgttgccatctgaagcacaggccatgctcgtcaagcgtggaacgccggatggaccatccgattggatgctgattaacaccgaaggctctggtgtttttatccgcacccagaaataaataacagttaagcagggttcaggcggatccaacgcttaatactcagtgaggccagttcataccggcctcacgtgtttttatcgcttcttcaccaacgagcggatgacggccataaaaccgaggctcatggcaccggccagcactgcgaatacctgcgggcggcgcaattcgttacgcatgctgatggcaccggtcacgcagtggtcctcgaaccagacgcgcacctcgttgctggagtatcggcccaccagatcaccccaggtgagcatgcgggtcacgtagccggccgggttgctttcatggaattcaaacaggcggatgcctcgatagcgcgacttggggccatagcattcgaatccgcaggtgggtgcgtagcccaaatcaatgccatgcgcgtggcccacgaaggcgttcttgtgatcgtgaccacagaacagcgcgaagtagccgcctgcctcacgcaaggcgtccacttcaccgacgttctcgtctgcacagccaatcgcctcacccagccgcgatcccggccggcagatctcatggttgagcacgtagcaatgaccggcgtgggtacgtgcgccttccaccgcgttcggcgtccatgcgggaacctctttgaggcaatcgtagaattcctgcggcggaatgtgctggaaggcgatggcaggcaccggcttaccgtcgccgttgcgttcgccaagttcggactgtacggctcccagccaatcgatcgcctcggggcttggcgtgccatacccatcggaatcagccaaatcaagaccacgcggattgaccacataggccgggtattgggcgtcgttctcttcgggcttgccggcgtaatcgccggaattcaccatcatgacggacatagctacgcgcccggatccgtcggaagcctcaatgggcagggcaaaagtgcctggctcaaggctgtcgactgggttcaggcagccggggaattcgcggtagatgccgtcctgctcgtcggccaggatgccgcactggaaatcgtgattgccgtaggtggcagcgaacggcacttccgcttcgatgaccgggccaaggaagccggcaaacgtgcggcggactttgtcacgggtctcgtccatgagctcgtccaaagtcgtcggcacatcctgcggatcggatgttgtggagtagaccagcgtggacgcggtggacgcggtttgttgggcgtcggaatcgctgccgtcggacttcatggccagcagacgattgttcacgcggtctctggcccgccgcttgattccgcgcagcttggcctcgacctcggtgaccgcacgcacgcgagcgcccggttcctcgccacggcggcgcaggaaagtgtcgatgtaggcaggatcgtaaccgcggatctggtcgccggtgaacaccaccagatccgggtcggctttgcgaatggcttcacggataaggcggatggtatcggggagcacgttggggccgtcttggatgtcggccatttgcagcacgcggaagctgccgtcttcgcggaatcgcaggttcgtcatgcctcaccagtctagggacgtaatgctgtttcgcacagcatacgcgccggtccttcacgttccccgccgctccgcacggcagctgaatcactacgagaaatcgtagaacgtgtatcccttatccgctccgctcgtcacgttgagcaatgccttgccgttcagcgtatcgacgtcgtttcctatgagatagccgtctcccgtggcccccatatccgagtcatggtaggagcctgagaaggtgccatccttattgactttcattacggttccccatgcgccgacaccggaaccgaaactatagttacctgccgcctgtttcatggcctctttgaaggtggcgtctcgtttgccgctgtccttggacttgtcaccggtcgtctcaccggaagcggccttatcgccagtgcccttgacctcggcgtccggcagggaatcccagtcgagatcgccgttctgctccaccagatagtagacggtcgaatcgctgggagccggcttcatcggctccatcttgttctggtagttattgatactgctgttggtcggcacaaacgggtccacgtccttgccccagctggcgctcacgctggtctcactgtacaggctcttgtcgcgaaccagaatgtacgggcggctggtatccacggccttctgcttcttggccttcgccagttcggcggcgtcgaagtatccggaatcatccaacgacttggcatcggaacccgccgggaagtagaccaggaagtccttcatgtcgtaggtcatgccggtcgacccgttctccgcaccggccggtggcgtcatttcgccatcgtcgaacgacgcccgttcatagttgccgttcacgcagtactcgcctatcgaagcggacatcacctttgagccgcagttcggcaaattcatgcccgcgtacagctcgaacataccccagtctttcaacagcagatggttcttcatcggcaatttgtccgcggccatgccgtgttccgaatccgcttccagcatcgcgccgctgatatcctgggagaagttggtcaggcccagcacatcggccttgtcttcaggctcatggcctttgatttgcagatactgataatcctcggatgaggtggagccaaagggattcatcgaagattgctccaacgtgatgcaatccttgttggcgtccgtcacctcgctcttgcagtacatgccaatcattgcggatgcatggatgctggccatcttgaaattgtcatacgagttggttttgctcaacacgtccatgttgctggacttatcgatgccgtaatacaaggtcaccgattgaccggaactcaacgtggaacccggagccgggtacgaaccggaaatcttgcccacgtatttctctgacgagtaatgcggttccaaatccacactgtagccttgcgactccaagtcgctgacggccttgttcttgtccgcaccaagaatatccaccgggataccatcgcccttggaggccacgccgatgtaaatgccgttgtccttctcgtcatcggtgagccctacaccgggagccgggtacgtgacgctgacctgcccttccggagtcttgctgtccggcgaaatcacaaccttcttatagtgaatcggcacgcccatattcgcgaacgtgttcgtcaccttgttcacatccttgccgaccgtgcccttcggcacaccgggaccggccgactcctgcaccaccaccgtggaaccggccttgacgcgagcgccaggattcgtgccctcgtagccgaggaacacaccgcgatcctcgccggagaacaccggaaccgtcttcgcgttcaggcccttggccttcaacgcctcggtcacatccttggccttgaccaccgatgccttcttgccgttcttatcggtgacgctggaggcgatggacgccggatcaggcagcgacttaccaccccacacctcggcacgatacgtcaggaataaagccacaccggctacgatcaacgccagcagcaccgccacgagcgcgataatcagcgtattcgggccacgcttgcccgaaagattcggcaatgtggcggttgcggtcgttgtgccgctcggcggcgtggctgcgcccggagcgacaggagcacccggagcggcctgcggcactgctcccggtgcgatcgacccagtatgacttgctcccggtgcggtcggcgctcctgccacaccgctcgatgtcggcacgccgggctgcccataggcgttcccatcgtttgggccgggcagcggcgggtgatcaagcaccgtcatagtattgtccggcagcggcactggaatcgggccggccgccgcctgaggagcaggagcactcacgtcggttagcggcgcaccacagtgcatgcagaaccggcttcccccatcattgtcagcaccacaattcttacagatcatcattgctcttctctctggtcgaatgacgcactatagcctcattctactgggaaatgaacgcgatggaatagtccccactcagccgccaaccaaaaggcgtggtccgtatacacagttgcatgtgcaaatactgcttgtactatttgcgcaacgtgctatccaccgaggcaagcacttggctcatcagctgagcggcacgatcctgaccttggttttgcgtgaccacagagaccgcggccttgttgccattcacctccacgatggcgaagtaattccacgtgttctggatgcccatgccacgatgtgcatgcacggtcatgccgctcggaatcaccacgccctccgaagcaatatcagtgttcatcagaccagtgccaccgaccgcatcaacggcaaccagcatgcgggccgcgtcacgagcggtactgtaattctcatatccagcattgctggcctgtacatcaccgaaatcacggttgaagctggtgccgctgtacccatgggaactcagccatgaattgacagcactccatccgccaagggccccgacagcctgattgccggcactgttatccatgccggtcatcatcgtatttgccaatccttccgcattgccgttgccttgagaggcaagatacaccggcagatacaggcctgcggcaacgaacttcttactcgactgcgacgtattggcaatggccgagtcttcagacgacgcatcggcgctggaactggagctggacgaatcatcgattacggtggcgctgggagccacatccatcttcactagcgggttgtatccaccgctcatcggtataccgggtacaaacggattggtggtttgctcgccgttcttgtatgcttcgacgcttgtggtcttgtatcccttggggtcgcgcatgatgaagaacggccggtcggtgtctggcttccccgccttgttcgccgcagccagcgccttgttggagaaatagtcggaatcctcgagtttgctgatcttcgatcccaccgggaagtaaacgtagaagtcatccatttcgtaggtggcaccggattgctgaccatcagggatatcatcagtcctcacatattgaccatggtcacacccttccgtctccccatagcctcggtagaccgtgccgtcgcataccggccatccgtagccacggtacatctcgaacatgccccactgtttggccaacaagtggttgcgcatattggtttcattatcgggaatcgaaccatccttgtagtgcagaatgcacccgccaatgtctccggtgggcgtgcacagtgtgacccgatcgttccatatgccattggactcatcgcctttgcgcaccaaatacgggtaaccggacccgtatttcattccgtcttgacccttcgaaatcagcgagatgcatccacccgagccaggtaagaaaccatccttgcaataggtgcccgtaacacgccattcgcccgcagccgagatatacggcaaactcctgtcactcttgctagtgctggcataatccgcgtgcgggtcgaaatcataatcactacctgaaccggtggtcaccacatcttcagtgttgtcggctcccacaccgtagtacagacgtatcggttgcaatattttataatcattttcctcattgctcgcctcaaacggcgcaccaaaaatgtaattggaagctacgattttgccaaaatccttcttggcggaaaatcgcggctcgagaataacctcgatcttgttgttcgatgcgttttctactgcggttttcgcctcatccctatccataccgataacgtcggccggcatgccctcgactgagggatccgggataccaagataaatcgcaccattatcgtccactggctgcccccagccgggtaggtatacacgactttcttcgtatcggccttggatgttgcggctactcgcttggcataaatcggcacacccatatctttaacggccgcagcggccttggcgacgcttatggcccggtaccggcgtctgcggtaccgcgatagtggcgggcgcagacgacgctgggccgaggctagagctgagaccggggccgggaatgggaccggcgggtggcatcggcacaggcggaacatcagtgaccgtattatgtcccacggcaagtttcggtgccagcggagcaccgcattccgtgcagaaacgggacctatcgtcattggcagcaccgcacctatcacagttcatcgcgtcttctctctgatgaaatgatgcaatatgcctttcattgtacagagaaaacgcacactggcggagtcaacggaacagactcaccccgcgacgggccgtgcaatacgcgttgcccagccaggtatggcgggaattgggccagacagctcccagtcgcggtgcgttctggctcatccagatgctcggcacgcggccgtctgcggagcgtgagccgagcagattgaagccgttcttttccagcagccactccgggtgctgggtggcgatggccaagccttcctcgagggtgagcggcaggcgttcatcggagtcgataagcttgcgggccacgtccggctcgcgattgatataacacgtgccggtgtgcggattgacgaccagatagaacgggccttccggcggcatgaagccgtcttgaggcaggaagctggcgatgtcacgcggcggcatggtggtgaagccggccatgcgattgatggaggttcgtgcgatcagtgactcaggcgaaaccagttcgcgcgtgggcaccagcaggatgttcgatcccaaatcggaatgctcgagcgccccgatcaggggtcgggccagcgagcggaatgcggcggcggaaatatccgccacatccggatagccgagagccacgatacggtcgagctgtttttgggcctctactgatgcgatagacatggctaccagtgtagaacaccgccgtcttttcgttagtcaccccgttgtctatttagaagtgcaacatccttgttgttcggttaatgatagcagttcgtcggcgaatgcctcggccggggtgcggtagccgagcacgcgcatgggacggtcgtcggtctcgtccacgatggcctgtatctcgtcggccatggacgggtcgacgcgcgtgcgcttgggcaggtagcggcggatcgcgccgttgcggttctcgttgccgccgcgccggcacgacgggtacggggcggtgcagtaggtggccatgccgagccgttcgcgcagttccgcgtggcgggcgaactcggtgccgttgtcgtgcgtgacgccggtcctggcgcggcggcgtccggccttccggtgcgcggggccggcgatgtggcac

SEQ ID NO: 3427 - DNA, 20444 bp, Unknown
  R151_18m  MAG No. k141_44215
aatacattcatattaagaacaatttcattgaaattgcgtcccattctatccatggaataacatacaatcgtgtcgccctcacggactgcttttgtgaggttaatccatccatcacgattgaaattggttccggttttgcccgcgtccatgaatatgcggttcgcttccacaccagcattaattaatgcctgttcctgctcattcaatgaatagccgcgcattgcctgcgttccagttgaaacccttatataaccatataacatacttattaatcctttcaatagaatatgtgttttcactatctatctatcaaactgtgttcaaaagccatatcatttgagaatccgcattttcgccattgaaatggaaaatgaaaatccagtatttttcagggttttaaaatattaatgaatagcatatataccgttcactggattataacttttgaacggtggtatttaaatacatatttcaacattgaaataacatattattcgaataccatttgaaacgctcatttcgattctaacagcgatttttcatgtttcatgagcaacgcatcgaaaacagggttttccacggtttcaacaaaatacgccgtccacagggctgaatattacgcgctctgtggacggcatcgattttcacggattttcaatattatatattttccttcaaatacaatgaaaccggtgatttgtattctcaccggtttcattattggatctatggattggattcatgtattatatatcaaacaatccatatatgttattccattaattaatcatttttgcggtatcactggcgcttttaattgccgcgctattctgtgaaaagtattccggggcaatatatacaacaacagcaacagcgattccaattgttaagaagttaatgaactggctccattggcgattcaataagaattttaatgaaagtgttcccattaccatgataataatcggcgcaatccattttgaaaccgctgcgttccaaacatcctgtaatgtagcaatgtcataagcataattaataatcataatccataatcctttgtgttaaaataacttgtctatcatctatcaaaggaaacggcgtgccggtttgttccttgctccggcacgccgcaatatattatttgatgacaatgtttaaatatcatggtttcatttttttaaaacgccgccgtcaggtgggcactattctatatacacagttgcgtcttcccgagtttcacgggtttctattaatcgttggattaatacagccatttcaaagggaagctccgccaacatcgccatgtattcctccaagagcaactatccccgtccccttagcccggctctacggccatctcaatcggcatgaaatagcaatgttgccaatcaagattacgaccgcttccatgaggacccatgtttattaacacggtgtctgacggcatacatccagaggttttaaatgttaggaatcacccgtccgtatctttcaaatggaaaacgagccttttattctattatttcatacacatgctttcaaatctcatctgcggcgcatgacagcctgattctcataatttcaatctcattgcggtttatgttaacctgatttgcgtttcattgaaatgctgtatgaaaatgttcattccaatgaatgattcatccaatcaatccatgctttcaaatctcatttgcggcgcatgacagcctgacgcatcccgacaccccttttgattggattaaccatttgtgaagtcgccggtgctcacctctatcaccatgatatctatcaaacatgtgtttgaaacatatgaaatttgaacaaaagcattctatggcggttttaacggcgtttcagcgtgaacatgaatacttatcgtatttcatatgaaaagccgttagaatgccgtttaaatgcgttctaacggcatatacaccattaaccgtgaaaccatgcgtttcaaaccatggttccatacactatgaaatgtgaaaatattgtgaatattcatggcatgccgccgcttttcaaacagggcacatgaaccggtatatttttcggtatacttccggtggttttcaatacgaacacaaccggaaaccattgaaaatagcggttttatggcaacagacacggaatcggactgattccaaccgccattactcatatcaagctacgggatcgagcagagcgaacgctactcgcgcaccaagcggatatgctccacatcgtcgcgccgggagcgacggaacagcacgaaacgattgccgatggactgcaccacttcggcgttcagctgctcggcaagctcggcggcggcttccttggcggtcaggccagaaccgtcctgcacggcgcacttgatgagctcgtgcttctcaatggtttcatcggcctgattgacggccgactcggtcaaatcgttcttgcccacatagaacaggggcttcagcgagtttgccatcgcgcgcagctgcttgatttgcttcttggtcaatgccatgggaatttccttacatctttcgtataaccacaccagcatagcaaccggtgctgtctgtgctgtttgccgccctacagcgcgatgatggcggcgatgtaggcgatgacggcgacggcgaacacgagatcttgcgcggcgatggtcagggcacgccagtgggtgcggcggatgctctcctcgtagcagcgggcgtcaagtgcgaggctcaggttgtccgcgtgacgcaacgtgccggcgaaaatcggcacgataatcgcgctcatcgccttgatgcgctgggccagcgaaccggtttcgatggaaccgccacgcgcggattgggcatcgacgatggcacgggtctcgtcggtcagcgtcggaatgaatcgcaatgccagactcatgaccagcgcgatctcctgggcgtggatgccgagtcggttgagcgggctgatcagggtgtcgaaggcgtcggtcatggcggtaggcgtggtggtagtgaggaacaccgcgcccagaatgattaccaatgcgaaacggcaggcgtacagcacggctatggtcacgccctgatcggtgatgctcagcgggcccagcgccaccaccggcgtgccggtgcgtaccacaaacagattgaccacgcccatcagcaccagcagaatcagaatcggatgaatggattcgagcacccgtaacgggttcaggcgtgccgccgcgataacggccagggtgatggcgatgcccagcgcaagctggaggggtgtgttcaccgcgaacatcgtgaacatggcggccaggaagcccaccatcttcacgcgcgggtcaagtcggtggatcaccgagtgcgcgggtttgtcaggggagacggactcggcggggaaggcagtctcggttgccgagatgctctcagcaccagccgcgccggcaatcggcatacgtaccacgcgatcggcgatatgcttggcctccgctcggtcatgggtgatgatgagcacggtcacgccgcgcgatttgagcgtgcgcaacagctcatggatgcgctccttggcctggacgtccaggctcgcggtcggctcgtccatgatgagcacgtcaggattgcaggccagcacgccggcgatggccaccaatcgctgctgtccgccggacaggtcgaaaggggagcggtcggcaagatgcccgatatgcaacaggtccagtgattcgcgcacacggtcggccacctcggcctcggcgagcccctggttgcgcgggccgtacgccacgtcctcggccaccgtgtccgcgaacaactggtgctccggatgctgcatcacgtaacccacatgccggcgcaattgcgccaattgcctgcgattcgccggcttcggccgtgcgttgctaccgcgtttgccggtcgaggccaccggaacgccggccacctcgatgctgccggcggtcggcgcggccagcgcgcacagcatgcgcaccagcgtcgacttgcccgaaccgttcacgcccatcagtgccacggtttcaccgcgcgcgatggtgaacgacaggtcatcgataaccgcccgtttggccgaaggatagcgataggtcagatgcgagacgcgaatgatggggttcgtcatatcaccgatgccgtcggagagcagcggcagttcggagccgtcttcgcgcttccgctggcggggtctgtcgttcgtaggacgactgggggcggcttctgtgccgataccaccctcggtctcgctttgcgagacagcctccgctagcgggggtcgattatcggcggctgcagtgacaccaacgattcgcccggcctccatgtgcacgatgcgatcggcatgaacggtctcatccggatgatgcgtgacatgcacaatagtggtgccgcgcgcctgcaaatcatccaaaatgcgcataacttcggcgcgtgcggattcgtccagcatggcggtcggttcgtccaataccagcatcgccgggttcatggccagcatgccggcgatggcggcgcgctgctgctgtccgccgctcatacgggtcgggtcggactgacgcaagttcgccaaccccacggcctgcaatgaatcaacgatgcgctcgccgatgagcccgcgctccagcccgagattctccgggccaaaagccacgtcatcctccaacacggtggtgaccagctgatcctcgggattctgaaacaccataccgatgccgcggcgggcagcgcgataggcgtcggcattcgggccggctgcgtacacgcgctgttccagtagcgtcacttcgccaccgtccggcgcggtcaatcccgcaatcagacgggccaacgtggacttgcccgatccattcggaccgaccaagcataggcgctcgccggcatggaccgtgagcgaaacgccatccaaagcccatgaagtgccgcggtcatagctgaaacgaatgtccttgagtacggcggcggggggagcgggctcggcggaatcgtggaactcgtcggcgtcgaaggaatggggtgcaacggtcatgaaacagcaatccgtaactgataggcgaaaacgcagaatcccggcaagggccggagttctgcgttcttgttctttgagtggtcgttgagtggtcgttgagtggtcgttgagtggtcgttagtcgtggcgggcagcggcccatctcaggccggtcactgctgcttggacagcaggttggagaccggcttgtagatcaggaaggtgatcacggcgtgaatcgccatcttagccacgttgaacggcagcagaatcggcagaatcatcgcggccacagcctggtagggcatgtgcgcgtaaatcggcgtgatgatgaggttgcccaccagcgccaccacgatggccagcaccgcacccaccagaatgccgatggcggcacccttgcgcgtacggatcttacggtagatgaacgcggccggcacagacaggaacagcgccaccagcacagccatcagcgaaccccacgggtcggcgaacatgtgcggcacaaagccgagcacagacacgattgcggcggcggccggaccgtacgcaaagccggcgatcaggcagacgatgccggacgggtcgtacttcagccaagtgaccggcgtaatcgggaattcaatgaagctggtgaccatcgccagcgccacgaacagcgcatacatggcgatacggcgcgtggaccagcggccggaatcggccacgccagtggtgtgtgagccaagtttggcgttggtgctggcggtggacgcgctggccgaaccctcggcctcgggcgccacagaacgaacaacttgcatgcggatacgcgaagatacgctcataatgagccctcgtttcttccatccggactataccgttggctccggaatctcaccggatcagccgcttgcgcgggtcgcgggcttcccgccatccccgttatgaaacccggggtacaggttaccgccagtaaggaattgcaccttccctgaaactgacaggcttattcatacgccatgcgccggacgtacgcaacccgcgtttcactgtgcagaaattcgtcttgtgccggtcaagtgcaacaatgggagccatggctgaagtgaagaaacccaacaacaccatcgacaagcttgccctgatcgtcaccacctacaaacgtcagcagctgctcgaggtactgttcgattcgattctggcgcttgagcaggcaccgtggcgcattgtcatcgtggacaatgagcagtccgatcagacggcggacatggtcgctgcgtttgccggcaaggtgaccggccagtggggcaccaccgtggccgaccagtccggcaacgaagagcgcgtggtctatgcgccgcagaccgagaacctgggtggtgcgggcggtttctccgccggcgtggccaaggcgtatgatctgggcgccgcatggttctgggtgatggatgacgatgtggccgtgctgccggacgccattgccaagctgtccaagtggaccgacaagcacgaggtgattcagggatcccgattcgattacgatggcggcccgttctactggcagtacgacttcattgtgccgctgggcattccgaacccgatcgcgcccgccgcattcggcccggccggataccgagtgatggacacgctgtgcttcgaaggcggcctgttcaaccgccgtgtggtcacggaaatcggtctgccggacccgcgcttcttcatctactgggatgacacgatgtatggctaccgcgccagcaaggtcaccaacccgattgtggtgcccgacgtgatcctgcgccgtacgcgcgaaatcggcaattgggatatcgccggcgtgcgccagctcaactccacatccgacatgaaccggtatcacatcatgcgcaaccgcggatacatggcccggtacttcatgacctatggtgacttccgtccgctggtgtttggactgggtaccgtgctcaccgcggccaaggaagtcattcgcctggtgatggtggatcgcgagcacctcaagaccggtttggtgcagattgccaagggctggtgggactcgcgcaagctgatgcacgaccccacctggaagcccatgccgtcgcttgagtgacggtcctgccccggcccgtccggcgcgtccgcgtgatggtcgcgttagactgggcgcaaccctacgaactgatgaaaacgtatggaaaggaaggtcaacgatgattgaaactgcacaggctttcggtgttgacattggcggttccggcatcaaggccgcacctgtcgatctgaccaagggcgatttcgccgagccgcgattgaagattctcactcccgaggtctccacgcctcaggccgtggccaaaatcgtcaagcagcagctcgaccacttcgaagtgcctgaatccgcacccgttggcatcgccttccccgcgccgatcaagcccggccagaagctcgacttcatggccaacctcgaccagtcttggattggcgtggacgttactgaagtgttctccgaagcctgcggccgcccggtcgtcgtggtgaacgacgccgacgccgccggcctggccgaagtccagttcggtgccgccaagggccaggatggtctggtcatcgccaccacactgggcaccggcatcggcaccgccttgatctacaacggcgtgctcatcccgaacaccgaactcggacacatcatcctgagcgccaagcatctggacgccgagaagtatgcctcctccgcgattcgcgagaacgaggaactgggctacaagaagtgggccaagcgtctgaccaagtactacggccttatggaaaagtacttcaacccggacctgttcaccgtcggcggcggcgtgagccgtcagagcgaaaagttcctgccgtacgtggatatcaagaccccgattgtgcccgccaagctgcgtaaccaggctggcatcgtcggtgccgcctactacgccagtaccaagcagcagtgagctgagttatttctgctggcgcaggagccgtattgaccatatgtaaggccgtccaagtatttcgggcggccttttttaatgagtaattcgttcattaggtcgattatgtgttcattaggtcactcccattccaaacctgaattgcaatgggctcggaatggcggcgtttcaagcatcaacaattgtgaggctcgactagcagtgacctaatgagcgcgaaaatgacctaatgaatgtagctaggccgttattcgatgtggattgaagtcatagtatgtctgacgactccgctgccgtgccgcacgattgtcgtagtgctggatgctggtggatatgaggcctcgatatacctggctcggcaggggtggttctatcgtgggagggtatgagcgtgcatttctcttctcgtgtggatatttctgcgccgaatcccattgcggcggccgaggcggcagccaaggcaaacggcatcgcactcagcaaactcaacgattccaatccgacccgccacgggttggcacccgaattagtgccgagcgtgtatacggccgacccgcgtggaccgcgtgcggcacgagaatcattggccgcattcctcaatacggcaaacgtggtagacgcaagcagccctcagttggcttcgcccgccgccggcgagggcaggaacgagcgccatgccgctttcaccaatgtgaataccgccatcgagggcgccgacccggacgccctgtacctgctgagctccacgtccgaggcgtattcgtggctgattaagttactttgcgatgccggcgacgcggtgctggcacccaaacccggctatccgctgattgagtcgattgcacggcttgaatgcgtcgatacggtcgaataccagttgcaattcgacggctcctggttcatcgacatcgccgaactcgagcggctactcagcgagcccggtggcgaacgcgtcagagcattggtactcatcaacccgaacaatccgaccggttcgtacgtaaaaccaaccgagcgtgcacgtatcgtgacattgtgccgtgagcacggcatcgcccttatcgccgatgaagtgttcttcgattactctctcgaacctttccccggcgacgcacggctcgcgggggagcgcggcgtgctcaccttcgccctagacggattctccaaaatgctggccgcgccgcacgccaaagtcgggtggattcaggtgtccggacctgccgaggacgttgccgaggcccagcgtcgactggacgtcatcgccgacgattatctgccgatgggcgacatcatcgccgaacggattcccgcattattgaacgccgcgcccgcacagaccagacgggtgggggagcgcgtgcgcaataacctggccaagttgcacgagttgcttgacgccgatcccaacgggctggtcagcgtgctacgggccgaaggcggctggaacgtgctgttacgagtgccttccgtcatcgatgagaacgaactggtgttgcggctgattgacgagcaccaactcaccggacagcccggctacttcttcgacatgacctccaatggatacctggccgtttccctgctgcccgaaccggacgaattcgagcgtggcatccgcgccgtgctcaataccgtcgccgctttgctgcgataggccggtgtttgccggcaccacacctgtactccacgtacaatggcggcatgggattcttgtttagaccgaaagaactgccacacccggcatcgctgacgttcactttggaacaggccgggcatacgtatgatgatgggcacgtgggacttgctcccacggacatcaccatcagcgagcggcgggtggccgtgatcggactgaacggcgcaggcaaatccacattgctgggtctgctggacggttcgttgaaggccaacgccggcacggtgaccattgcgggcggtgaggaacgtcttgacccggctgtgaagaaggacgcgaagcgcatcgataatctggtcggcaaagttcgccgcgaggagattccgaacagtttctaccaagcggcgaatatttccgaggctgtttccgaagcgttgaaaaagcacaaggtgcccgagtcagaacgtcatgcgcgcatcggtaatctgttcgcgcattttgatttggcgcaggtttccaaggccaaggccggcgaattggactccgagaaacggcacctgctggctattgcggccgcgctgagctttgagccgagtgcgattgtggcggatgagccgagcaagggattggatgagattggcaccgcgcatgtggccaaggcgttgttcagctacaacaagcaggtgattttcgccacgcatgacacggatatgatccgccggcccgaatacgccatcgaccgcatactggtgctggacgagcacgcggtcgtgtttgacggagcgccggctgaggctgtggcgttttatgaggatctgatccgacgccgatacgagactagagcatcgtgaaccatgcctgaacctgatgccagagcgccggattgttgtcgatcatcgaatcgctgcgcgactgcacgaagcagctcagtatggctatgcccagcgcccacaatacggccagcaccacgacccagcgcatcagccaacgccacggagtgacgcgggcgatgccatcgcctgaagcggcgtcgttggcccccgccaatgaccggctcggttcgcgcccattgaccagccacagtagccccggtatggacgccagcgagatcagccagccgaaatcggcggaataccgccatcccaaaccgccgacgcggctgtcgaatacgaccagcaccgccgctacggccaagcaagacatcagccatggccgcatgccgtgtgtttccaatctgcgcagcaggggcagcgccaaagccatcaaggtcagtggcgtggccgtgaaaatcgcgccgaccatcacctcgtaataaccccattgtggcatcggggcgggagagcccgccagccacgggaaacgatccatgaagcgcagcggcaggaacaggtaataccagatgttggcgggcatatccgcggacggggtggtataccgggtcatatcggatacggagaactgatacgcattgccgaaattgaacggggaatcgaaccgaaccatgttccacgccatcagaggcgtcacgacgagaatggcgggaatgattaccgccagcggcgcgcgcaacgcctgcaacggcttgatgcggcgtgtgcgcagaccggtgcccagcgcgcgaatctgcggccagaacagggggaacgcaagcaatgcggccaaggtgaacgtcggtcggcatccgaaattcgccgcaatgcacaaggcgcccaaggccagtcgtggcagggagagaggcttggcatcgcccgcctgccatcggtccgatggtctcagcggacggcgggacgtgtccgcgccgagccatagccatagtcccagcgacgtcaacgtcagcgatgcggcgaacggtatctgatagaagttcgtgcgatacagcaaataccccacttgcgcgctcaccaacgatgagaccactactaacgacgcggccgccaccgaagtcttcggcatcacacgatggatgacgcgcagcaccagcaaggagaagaagatgatgaacagcagcacgagaatatactcggcggcggatgtcggcagattatgaccggccagcagacgataggggacgaacagcagcactgcgggcaacacgccaaaataggaataccagtgaccgtcataatacgcgtaatcccagtagagcggactggctccattggcgagtagctgggcacgtgtggctacgtcataggggtgctcggtggcggccagttgttcgggaaccggcaagtcgagccagggccggccggcgaccagcgcatcggccacatgcccatactggtcgaaatcataggtgtaatcgccggaaacgtggaagacgagcgaagacgcgtaccacagttcgtggatgatggatacgccgataagcagggtaggaatcgccagaagccccacgaaagcaagtcgttgccgagtgctggacgggtcaagcgtgatacgccacaggcgcgatcccggcctccagacggcaatcatcagcaacaccaaggccatggcgagcacgcgcatccaattgatgacgaacggtacgcgcacgttggcgcgggcgtcggtgaccggtacgatcgcgccgcgctcttcctgaatccaaatacgcacgatgccggcacccggcgccttgacataatggctgcgaatagcgtcgggattcatcgactgggccttgccggtgatgccatcgacatccgcgcgcacatgaatggtcgccagcggtttgaagacttccttatcgtcgttcgctttggattcggcctcggcctgctcgcgggccttatcgatgaccttgctgctctcggtatcgatgcgtaggtaatccgacgtgccgtccgcggtcagttcaagataggccttggtcggatcggtgacggtcaacatgccatcattccggcgcgtgagacccgaacccagcgtgttatgcacggcgttcgtatccgtgctcgctccgagcgtacgccagaacggcaggttgaacacgatgcactccatggcggcgatggcggcgacggcggccagcaaggcgatcagcaggcgcaccaaacgcagccggtgccgggtatccgggcggctgggcaggtgccgttcatgattcgacggcatcggacggtctgcgcgagtgtggtctatggaatgcacgcatttattctataggctttattcgggcttgatgtcgggcaaacaagagacaatgtgaatcatgccaaaacgtacatcggaccatgggaagcacaaccgcacgccactgctgggcgggctgaaggattcgatgaacgcgctcgcggccgatctgggactgtccaagccgaagaagcacgatacgaatccgttcggcgatgccttgcgggagaccagtgagcgtaaaggcggcattatcgacgaactgactcgccatgcagtggcgctgagtcctgtaatcaagcggcgcaccttccccgaattggagaacgtgccggaagggctggtgcttggatgggcgcagctgccctccaccagaggccgtggcttttcgcttggcattttccccgaccgcgatcattttgcgcaggtggcgttcgccgatacgcatggccgcgtattcgtgggcaccgaccccaacatggacgtgcaggatatgcaggcgcgattcatgttcggcaaggaaaaggaagtgactctgccggacggtgagcggctgggcgaaagcgacgagccgcgttcacgttccggtttctcccgtgcaggccatggcctgggaagtgcgctgcatcatgggcgtggtttggggcgtggccttggtcatggtgctgacggcgtgaaggccattaccggtggcgtggtggggcgtgacgacaccggacgcatgacgtggctcgcctcatggctcaaggccggcaaccggtacacgcttgagcagatgcgtgccaatctgccgcctgtgatgcgtcatgatttggaataccgcgatgccattaccatcgcgttcttcgccacgtatatgttgccgcagatcaatggtctgctcatcggattcggttccggcaatatcttccgccgtctcaaccgtgaggcgccaatcggtgcgattcgccgttcggtgcgtgacactttggcggcacgagcccacggcatgcgggcctccggtctggaggatcacttcgccgatctgatgcgcgaagccggcgccctcgacaccacgccgggactggaagcggtgcatggcgccgaaccgttgcacctgtacacctcgacgtattcgagcggctatttctttacgtgggataagtccttggcattcgggcaggcgctgaaatccttgaagatcgaaggcaacctcaaccgattcgctgcggtgagcgcttggctggagcgcaacgcttccttggggcgcaaccctacggaagatacggtgacccgtgccgaggccgcgcaaatcgacatgaaactcattgagaaccctgcgattatggcgcttgacccgtatgatggcgagcaggagcgtcgggccgtgctgagcctggtcgatatcgccgcacgcacggctgggcagattcgcagtgaattccctgatcctcgagatgtgctgacccagcagaacgtgccggattcgggtgtgacgaatgctgcgggcgctgaaagtactgagagtgttgagggcgctgtagagcggaccaataagagcgacaccaacactcaagccgctcggccttcgtattcgccggcgaggagcgacgaatgggtgtatcgtcagaccctctcctcactgttgcgccggttacggttgccgtatcggtttgatgtggagttccggtcgcgcttggattcgggtgaagtggccattggcttcaccactgccggcacctcgatgatgcccgatagccggtatgacaccactcgccgtacgtggcgtgcgctgagcagcgccgaacgcgcgtcgatgagcgccgcctacaacctgcgtgtcggcctgatgatggcagcgctgagtttcggcaccagcgaatccgtgcgccaggtgtcgttgcacatcgattccattggtcttgaagaggcgattgccgaacaggattccgccatcgaggcgatgatgagcgaggccctaagcgccttcgaacatctgcgcagtggcgatttggggcgtgtgggttccaaagccgaccccaaagatggtgatttccatggcgacccgacccgccccatcacccatgaggagacgttcgggcaggcggcgtccggtgacgaacgcggcacggccgggggaacaggcaacggtaccggaccgtctgcggatgctacggatcaggccgcggccgaatccgctgacgccgatggcgccgcgtccatcgattcgcagttcgaagacctgatgaagggcgtcgatatcgacgaaatggcgttcggcatgccggacgataccggcgcaggcgacgacctgggcggtatcggcggcgagggcgtcggcactgacgatgctgatggggccgccggcatggacgatgatccgatgagcgtgctgcgccgcaatcccaccgtgcgcaatatggtcaccgtcaccttcacccgtgatgccttcctcaagcgactggacaccgatgggcttgacaatcccgaggaaacctaccgcatgttcggtgccgtgatggacgtggacggcgaaggcggcctgaaacccatcagcgccgacttcgacttggcggacagccggttctctcccaccggatcccaggaggagcccgaactggccgaccgtcaattcagcccggcgaccgctcacgtgctgggcgcacagaatagtgccggactggctatccagcgagtggacttactgcagcatggcgtcaacgaattccacgatatcgccaggaacacgtcgctcggctccgtggaaaaggcccagcgagccatgcagatcatcgaatcgatatgcgatcccgaactgaccggtttggcctctcaggtcaccagtgcgttgatcgatggcaaggacaccccggacttcacgttcacgcttgccgacgatcttgacaaggagcgtctgcgcgcccgagacatgctgttctcgggccaagccgatcaggccatcgaagcggccgaagcggctgtggcccatttggatcaggtgtatgcggcaggccatggcgtacctcgatacttcaactcctatgccgagcgcgtggtctacaaccgactgttcgccacattggacgagcgtacggtgctcatcccggacaatctgttctacgcacacatggagctggctgacgtgttgagccagatcaagggtgccgaggcggccatcccgcacctcaaccgtatggtggcgtacgcgcccgcctacccgctctcacatctgaagctcgccatccaactggcccgcaatgaggattgggattcggcacgcgccgcctgcctgaatgctctgcgcgtggccttggaccgcgacgatgccgcgttcgcctactaccggttcgcgtacgccgaatggatgcttgaccggttcgacacagccgccgcagcctacattatgagcgatcacatcgctcccggggccattggttcgctggagagcgaactgcaggaactggtttcccgtgcggactcgcagtgcatgccggtgcctgaatcggtggagacggccgcccatgtgcttgccacgcatgatctgccggtctggccgcataacgaagtggccgacatcgtgcgtgacgccgcccgcgtgtgcgtggatgaaggcatgttcgtgccggcccgcacgctctcggtggccgtggcccgcatgaatgacggtgaaggcgacaacatcgacatcatccaagcccagttcctgcgctcgctatccgcgtagccgcctgaggggagttgacggtatagccggccgaggggagccgagcccgctaggatagacaaccatgagcacgaatgaacaattggcatgggatttcgacgatggggatgtggccgaggtccggcctgataccggtattgcacgttttgcccctggctccgaacaatggatagccgcactgcagcccactgacgacgacgcgatacgcctcgaccgtttcgacgtgaacacgatgaccgctgaggccgccgcccgcctgtgggctcgcgtggccgcatgggtggaatccgatcagatcgcctactacatcgacgactcacccgtcagctccgacgccgcttacgatgcgcgcatgcgttgcctcgaacgactcgaagcggcgttcccctcattggacaatccacagtcgcccacccatcgcgtcggcggctccttctccaacgacttcacctccgtgcgccaccccagccgcatgatgagccttgacgacgtcttctccatcgaagagctcaaggattggtacgactcggtgattcgcgacctcgattggcccgaatccaagcccctgcccatgagctgcgaggtcaaaatcgacggcctcgccctgaacctcatctatcgcaacggcgtgcttgaacagggcctgacgcgcggcgacggcgttaccggcgaagacatcaccctgaatgtgcgaaccatcggctccattcccgccaacctcggcggccccaaggaagacgttccggacttcgtggaaatccgaggcgaagtgttcatgcgctgggatgacttccacaccctgaacaacgagcaggaggacgccggacgagcgcccttcgccaacccgcgcaacgccgccgccggctcgctgcgtcaaaaagaccctcgcatcaccgccacccgtcgcctgagtttctatgcgcatggtctggggcagctcacctgggggccggaccatccgcgcggcacccatgacgtggtcgccgaccagtcgcaggcctacgatctatacaccaggtggggcgtgccggtctccccgcacaatcgtgcggtgacctcattccaggagattctggacatgatcgagtactacggcgagcatcgcggcgacatcgagcacgcgctcgacggcattgtcgtcaaggtcgatgacctgggcctgcagcgcgccctcggtgccacctcgcgcgcgccgcgctgggccatcgcctacaaatacccgcccgaagaggtcaacaccgaactgctcaacatcaccgtgcaggtggggcgtaccggccgtgtgacgccggtcgccgtgctcaaacctgtctacgtggccggctccaccgtggctcgtaccacgctgcacaacggatttgaagtcaaacgcaagggcatcctgatcggcgacaccgtggtggtgcgcaaggccggcgatgtgattcccgaactggtcggcccggtgcttgaacggcgcaaagggcgtgagggccagctgcgcgaattcgtcatgcccgagttctgcccttcatgcggcgcgaaactggcacccgccaaggagggtgacaaggacatccgctgcccgaatgtggaaagctgcccggcccagttgaccgagcgcgtgatttcgctggcctcacgcaaggcgttcgacatcgagcatctgggtgaacagtcggccatcgctctgaccaacccggaggagaaccggcctgattcggtggcgacctacgcgccgaacatcaccgaggttctggtcgcccccggcgaagagcccgaaccgtacgagccggtggaggggctggaattgccggccgtgcagaagccggtgttgtccaacgaatccgggttgttcgacctgacctccgccgatctgcgcgacgtgcgtgtgtggcgtgaggccgcaatcgtcgaagtgcatgagacggtcgatgcgaacggtaagaagaaaaaggtgcgtaagcgtgtcggcggctctggcctgtggcatcaggtgcctgccttctggaccgcgcccacgccggccaagaagctcacggccaagcagttggccgaacgcgcgcaagaagaggccgcaatcgaatccaccggaacacagggaggtgccgccagcgagacgaccggcgcacctaccggggctgaggctccacttggtactatgccgggctttgccgcagcctcctatcccgagtatgacgtgccggccgacgcggtcatcgtgcgcgtggaccacaagaccacgcgcaccggcgtcacggatgtgccggtgatcattcggcccggcgaaaacacgcgcaagatgttcgacgaaatggacaaggcccgtcacgccgacctgtggcgtgtgctggtcgcgttgtcgattcgccggctcggtccgcctaccgcacgcctgatcgcctcggcgatgggctcgctagcagccatcgaaaacgccacgattgaagatctgacggccatcgacggggtgggcccggaaatcgccgaatcggtggtgaactggttcgccgccgcccgcgagcccggcgactggcgcggcgcgactttgcgtgcttggcaggccgccggcgtgggcgtcgacgaggccgagaccagttcgctgccgcagacgctggccggcaaaaccgtggtggtcaccggttcgttggagggctattcgcgcgactccgccaaagaggcgattatcgagcgcggcggcaaggcggccggttcggtgagcaagaagaccgattacgtggtgatcggcgcaaacgccggctccaaggccaccaaggctgaggaactcggcatccccatgctgggcgaagcccaattcgcccagctcctagaaaccggtagcatctaaaatagccccctcagacgcttcattaaccccctctgatgagggggctgtcagcctttaggctgactgggggagagaaaaagcgaatcccgccccagtgtgacttactccactccctctggcatgccgccgcatcacacgctagggtagaacaggccctaaaggaggatacggatttatgagcgacgcacgtcagatcgaagccgacatctacgaacgcctgagcaaggtcatcgaccccgagctcggtcgttcggtcaccgacctcggcatgattgccgctatcgaagccgcgcccgcatcgtcggacgccggcacttacgacgtcaccgtgcacgttgagctgacggttcccggatgcccactgagcgagaccatcaccagccagatcaatggcgcggtcagctcctatccgggcgcacagctgctgcctcatatcgaagtcggttcaatgagtcgtgacaagctggccgatctggtcgccgacctcaaggctgaacgcaagcggaaccccttcagcaagccgggcgtcaagacccgcatcttcgccatcgcctcgggcaagggcggcgtcggcaagtcctcggttaccgcgaacctggccgccacgtttgcggccctcggcttcgacacggccgccatcgacgcggacatctatggcttctcactgccgcgcctgttcggcgtgcacacgcagcctaccaatctgaacggtatgcttatgccggtcaccgcgtggggcgtgaaactgatctccatcggcatgttcgccggtgccgaccgggcgattctgtggcgcgggccgcgactgcagcgctccttggaacagttcctgtctgacgtatggtggggtgagccggacgtcctcttgctcgacttggctcccggcaccggcgacatggcgatttccgtggcccaggcgctgcccaacgccgaactcgtggtggtcaccaccccgcagccctccgcctccgacatcgccgtgcgctccggactcgtggccctgcaggtgccgatgaaggtgcgtggcgtggtggagaacatgagctactacgagcacaagggcgagaagctggagattttcggtgccggcggcggtcagcgcgtgtctgaacagttaagcgcggcgcttggctatgacgtgccgctgatggcccagctgccgctggaacccgaagtgcgcgagatcggcgaagcaggccgtcccgcggtgctggatgtcgatgg

SEQ ID NO: 3428 - DNA, 8638 bp, Unknown
  R151_18m  MAG No. k141_46958
catgccggtgctggaaggctacggcatgacggaaacctgtggtccggtgtgcgtgagcttgccggaagacaatcgcatcggcaccatcggcatgccgatgtgcggcatcaccgccggcatcgccgaggatggcgagctggtgatcaagggaccgctggtgtgcaaggggtaccacaacaaccctgaggtcaccacccagcagatcaccgatggctggctgcacaccggtgatttgggcgatatctccgaagacggattcatttccatcactggccgtaagaaggacctcatcatcaccgccggcggcaagaacgtgtcgccgggtctgcttgaggcttccgtgatgacctcgcccgtggtcaaccagtgcttggttattggcgataagaagccgttcgtggccgctctggtcacgctggatctggcggatgccaacaactggttggaatcccaaggcgccaaaccggaacccgatctggcctcgctggccaagaacgccatcgttcatgccgaggtagagcgtgcggtgaacgccgccaacgagggcgtttcccgcgccgagtcgattcgtaagttcgagattctgccagacgaattcaccgaggccaacggcatgctgaccccgagcctgaagacccgtcgcgcgcaaatcgttgagcactatcgcgagctcattgacgacgtgatctacgtgccgttgaagaagtagctatcaactccctctgatccaaaaaataagctctctctgacgagggagctgtcagccgcaggctgactgggagagaccgcggctagcccgcgaaacaacaaggccgggtgcgacttgcacccggcctcagcttattcagtccaaaatcgccgaaacataatcggcggcggcctgatccagctccgcatcgccgatggtggcggtgccctgcaccaggaacggctcagcatagttcatgccgatcttgtacgccacgacctcaaacgggctcagcagctcctccatggtgcggctgtactcgccatccttgcggtacttggcggcgtcggaaccagtggtgaccaccagcttgagctccttgcccttgagtgcgtggcctccaccgtaggcccagcctgcggtgatgacctcgtcttcccattccttgagcagcgcgggggaggagtaccagtagaacgggaactggaggattacgcggtcggcggcctccagtagctcgtgctccttgtcggcgttgacggagaagttcggatattcggcgtattcgtcgcgtacgatgatgtcgtcctcgccttgtgcggcgagttcggcaagcagacgggcgttcactcgcgagccgtccttcaggtgcggatggaatacaagaatcagcgttgacatgggatttcccttctataactgctaccaatgtggcctaatcaccactatcgtatgccgggaagcagaactcagtccagtccggattcagatgcgagccgcgggatgccgcggatgagtaattgacgcgggaaaggatgctgactgatgatttggcgctgaagcttcagtgggccgcatatacgagtcctaaagcggataggatgggatatgacgcggatatcgtcggtggactgaataacgggaggcgcacatgaccatgaaccgcatgctgatgtgccgtacccatccggtaatggagttcgagtatttcgaacgcggcggatacgccctgagggcaggggagatctacgacgagtcccgaatcccgatcggcatgtatgtggacggcaaacctgagcccaccggtgagtcgattaccgggtggtggcgttctcgcggcattcccatgacccgtgacggtatgcgttccgtatttgccggttcgggtatcgcttcgacgaacgatctgctggaccgttccttgggactcagcctgtcggaccagtattgggtgcggcctctcgaccggcccgatctgacgtgggaaaaactgaactttttccacaacgattttgacgaacgacttgggcaggccttattcttcggtaattcgtcgcgcatcggcaacgtgaacaccccggatgtcaccagtgccggtgacctgccgaaacgttggattatcggtcccgatggcgtccgcagcctgatcaagggagggcgcaccggtcaggagccggacaacgagcgcatcgcctggcatacggcacgactgttcggcatcgaccatgtcgaataccgcatcggccgcgccaagggcatccgggtctccgtctgcgatgaaatgctcgaagacacgcaagagctgattcccgcagggcaggttatgcgcatcttccgacgcggcgacaacaccgaacgcaagatgatatggctggacgcatgtcagcaactcggcgtaagtcatgatacggcaaatgcggcgaccaacgattttctgttccttgattttcttctgcgcaacaccgaccggcattacaacaacttcggtctcatccgtgacgtcgaatcattcgagattcgcccggccccgatttttgacagcggcgccagcctgtggaacggcatggaccccgaagccatcaccaacgaagactacccggcgaagccgttctgggtcgacgactacggcgatgcggacaacgcctactggcagttgggacttatcgacgattgggaccgttatgatttggggatgctcgacgaggtgcctgaactgatacgggcacagctcgccaccaaccgccggctgtccgctgatgtgattgacgccatctgctccgccatgcaggagcgcatcggcatcatccgcaagcttgcacgatgatgccgcgccgggaggcaactcagtcgaggttggactgcgtgcctgcggtggcttcgttggcggcttgctcggcttgtgcctggtcgagcttggctcgtacgtcgttgagcaggccctgggcgcgcttggccaaggcctcgccgatttcccattgacgcatcgactggtcaagattgaggccgccggtttccagtgcctggacagcctgaatcagcttgtcgcgcgcctcctcatatggcatctgggcgatgagctcgcgttccttgtccgtcagggacgaggcgggggtgttcttgtcggtgggtgtggcgttctcggtcatcttgttctccttatatatacggtatatatgcgtgaatgcatatggtgcattacgcggttgcggttgcggatgtggcggtggcggtaatgacgccctttttcagggtgacggtgatgtcatccccggtactgacccgcgaagcgtcatccagcacgtggccatcggaggactgcaccaccgcatagcctcgattcaatgtggattgcgggctgagtgcggtcagtgaggcgtgagctcgctcgacggtgagctgggcatcgtccacgatgcgtcgcaggccgatgtcaagccgctgcagggaatcgtcgatcagccgctgatgcggttcgagcatggtatgcggttgggtcaggcttggccggttcgcatatccctcgataagtcgaatctcgttctccacgcgcgaacggacccgcagtcgcatacggtcgatggcaccttcgatgagctgcgactgctcacgcacatccggcaccacgcgcttggccgcatcggtgggggtggaggctctaagatcggcgaccagatccagcaacgtccagtcatcctcatgcccgatggaggagattaatggtgtggtgcaggcatacgccgcacgaaccacacgctcatccgagaaaccgatgagatcctcaaacgagccgccgccacgggccacgatgatcacatccacgctcgggtcggcatcgagttgtgcaatggcctgaaccacttcggccgggcattgctcgccctgaacatgcacatggaccaccttgaaggttacggaaggccaacgaaggttcacattggtgatcacatcgccttccgcgcgtgcctgaggtgcgcaaatcaggccaatagtcttcggaaactccgggagaggcagtttgtgatcggcatcgaacaggccctcgcccttaagctgcttgcgcaattcgtcgatcatggccttgaggctgccaccggctccgaccttgagaatcgtgtccccgcgcaacgacagcgaagtgcgcttcatccacaggttcggtttgccatgaatcaccacgcggtcgccctgaacgaactggctggccgcggccgcgaacctgccgaagccattgacttccatggcgatatcctcgaagtcgtcgcgcagcgtgatgtaggccgagccggcgcgacgggtattgatctgcgtgatctggccggtgacccacgcggacggccatcgttccacggcaccgtagaacttctggctcagcacacttaccggccacggattttgcgcgctggtttcagcggcgcgtgcaggcagctgatcgatagggcgaggctcattcggcagattgatggtgccctgatcaggcgcgaaagtgccttgacccggctcaaagccagccgaggccagtgaagcggcggtcggtggacggccggtagatgggtagcccattgcagtagtcatgcactccactataagtgcgttggttgatgacggtaaatatttaccgtcgcctgaaaacggtgtgatgatgaatgcgagaaccgtacgaagcgatgtatcagccgatgatggagatggtctggtgcatcagaagaaaggagtcattatggcgaagaaacgggtgctatgaagaggagtgagatatgcgttgcgctgacgattgagagtcgttagtgagctcgctgtgcgacacgcgagcagaaaacagttacgctaatcacacacttgtggttttggcggaaaatagccgaaaaccctataaatagttcgacacaccactgttgagcactagatatagtggtggagatgccgtattcttctagaggttcaaaaaaacgacatcaatgtaatttcgtgtggcccacgtcgagtgtggccaaaatgcggaactcaggagagtgttcgccttataggaaaggggtgcccgatgggcgcacaggtgttggaggaaatcgtcaccgataacgagaccaaggtggccgccaaggcctccaccgtgctcgttgagaagcgtgatggtcgtgtggtcgacttcgaccccattaacatcatctctgcggtcaagtctgctttcggtgacctgaacaaggaagtcggccccgaagaagatgccatgatccgtggtttcgccaaccaagtcgaaggcgaaatcaaggggcgttacgccggccccgccaagatcgaggacatccagaacctcgtggagcacgccctcattgacgcccacctgtacgatgtggctcgcgcctacaccaactaccgtctcgacaaggacattcagcgtgccaaggccactgatgtcaacgaggccgtttcccgcttcatcaaccacgacccgaccctgattcacgagaacgcgaacaaggattccaacgtctactccacccagcgtgatctgctggccggtgccgtgtccaaggccgccgcgttcaacatgctgccgccggcggtgtccaacgcccacatgaagggcgacattcacttccacgatgccgactactcgccgttcactgcccagtccaactgctctttgccgaacttctgggacatgttggccaatggcttcactcttggcaacgctccgatggcttccccgaagtccatcgccattgcggccacccagattacccagatcatgaaggacgtggcctccagccagtatggtggccagaccgccaaccgtgccgacgagcatcttgcccagtatgccaagaaggattacgagaagttcctcgaggaagctcgtgagaccatccccgacggcatgccagttgaattcgcccgtcgtcaggtcgagagcgccaagaggaacgagcccgccaagctgcatttcggttcccgtgaaccgctgccgatggacaccccgttccacaccgacgttgacgaacttgagcaggagcgtgaaatcctcgccaagattcgtacccgcaaggccatctatgatgccatgcagaccatggaataccagatcaactccaaccgtgtgtccaacggccagaccccgttcgtgactgtcggctttggtctcggcgccgactggttctcccgcgaggtgcagcgcgcgatcctgttgaaccgtattcgcggcctcggcaaggaacaccacaccgccatcttcccgaagctcgtctttactgtgcagcacggcgtgaacgccgacccgggtgacccgaactacgatttgaagcagctcgccctcgagtccgccaccaagcgcatgtacccggatgtggtgttctacgagaacatcgtcaagatcacaggctccttcaaggctccgatgggttgccgctccttcctgcagggttggatcaacccggagaccggcaaggacgaggaggatggccgtatgaacctcggcgtggtcaccgtcaatgtgccgcgtatcgccatcgaatcccacggtgacaaggctcgcttctggaagctgttcgaggagcgtatggaagtcgcccatcaggccctccagttccgcatcatgcgctgcaaggaagccaccccggtcaacgccccgaccctgttccgcttcggtgcgttcggtcgtctcggtgccaacgacaacgtggaccagctgttcaagaacgagcgtgccaccgtgtcgctcggctacatcggccttgccgagaccaccgcggtcttctacggcaagaactggattcgcgaccacggctgggatccggaaggcaaggagttcgcgctgtccatcgtcaagcgcatgaacgagctgtgcaagcagtggagcaaagcggagggctaccactattccgtgtactccactccggctgaatccctgaccgaccgcttcaaccgcatggaccgtgaaaagttcggccgtatcgaaggcgtgactgaccacgacttctacaccaactccttccactacccggtgtggttgcagcccaccccgatggagaagctcagctacgagaaggacttcccgtactacgcttccggcggcttcatcaactactgcgagtacccgtgcctgcaggacaacccgaaggcgctcgaagccgtgtgggattacgcctacaacatcggcatcggctacctgggcaccaacaccccgatcgaccactgcttcgtgtgcggcttccagggcgacttcgagccgaccgaggaaggcttcaagtgcccggagtgcggtaactccaacccggacaagtgcaacgtcaccaagcgcacctgcggctacctcggcagcccggtccagcgcccgatggtgcacggccgtcacgaggagatcgcccaccgagtcaagcacatgagcggcgaaaccggtcgtgtgacgctggatgacggcaccacccgcgagtggttcgaagaggccaagtagggttattcgtgagtaggctcccctctctgaggggagctgtcagcaaagctgactgaggggagtccgaagagctattccgaagctcccctcagtcgcctacgacgacagctccccctcaaagaggggagctaatgctttccgcaaggagggaatcatgccggagttgcatacgaccaagcccgaacccaagcgccatgactttgcggccggcgagaccgggcgtggcccctccgtaccctccaacggtcttgccaacgatccgaaagccggtcaatgggatggccggcgcatgtccaagcggatgatcgccgactacaaaaccttcatcgtcaccgacggagaaggcgtgcgcaactccctttacgtctccgggtgccccttccactgcgtcgactgcttcaacgcctccatctgggacttccaagcaggccacgaatacacgcaaaaacttgaagacaagatcatcgaagacctgaaagcgccatgggtgcaaggcattacgttccttggcggcgagccattcctcaacactcccgtgctggtgccgctcgcacaacgtatccgccaggaattcggtcataccaaagatatctggtcgtggaccggctacacatgggaagagcttatgcgcctcggagaaacaccagacaagcttgaattgctgcatcttatcgacatcctcgtcgatggccgctacctcaaagaccagaaggactcgctgctgcaattccgtggctccagaaaccagcgcatcctcgatgtgtccaagtccctagaagccggcgaaccggtcatctgggccaagctccacgatcaagaacgagatatccccgaaatctatttgagagaccgcgaagccggcgaaggccaacaggcctcgtagtagcaggtccggaatgccgcactcagcaatatcgtcggaactgttggggaacgcccttcccgtgagcgaaatcaccatgcccggcgtcacgttgggcaggtggtcggactaatattccagaagaagtagccgggcgaagccgtccgcaggtatctgccagccgtcccgaaacggctcatgatgcctgaaggcgcacatacccggaagtcggaattaagaggaacacatggttgacatcgtcactgacgcgagcgtaaagcccgcttcacacccgaagcccctgcgtgtgggattggacatcggttccaccaccgtcaaggccgtggtgcttgatcagtcc

SEQ ID NO: 3429 - DNA, 33917 bp, Unknown
  R151_18m  MAG No. k141_47321
ccgtctgcgcttcgacttccagtggtccaaggccccggccaagtccgtgatctccgcagtcgaggagcgcgtcaacgacaagctgcgcgacaacctcgccgtgaccaccaaggaaatgaagttcgacgacgccatcgccctcggtgccatgcacctgttcggcgagaagtacggcgacatcgtacgcgtggtctccatcggcgaagacggctggagccgcgagctgtgtggtggtacccacgtggaccacgtcggcaagatcggcatggtcaacatcctgtccgaagcctccatcggctccggcgtgcgtcgtgtcgacgccgtcgtgggccagggtgcctatgacttcaacgctcgtgagcacgcgctggtctcccagctgtccgacaagctcaacgctcgcccggacgagctcgccgagcgtgtgaacgccctgctcgccaagctcaaggaatccgatcgtcgcttggcctccatgtacgagtcccagctggccgcctcggttccggcgctggttgctgacaccaagaactccgcggccccggtcaaggtggctgtcaagaacgtgggccacttcggcgcggtcgacgccctgcgcaagaccgtactcgacgtgcgcgcccagctcggtgaagacgcccccgtggtggtggccctcgccggcgtgaacgaggatgacaagccgatggtcgccgtggccaccaacgaggccgcccgcaaggtcggcatcaaggccggtgatctggtgcgtggcgcagccaaggtcctcggcggcggtggcggcggcaagccggacttcgcccagggtggcggtgtcgatgcctccaagatcgacgaggccctcgaagcgctcgagcacgaggcgcagaaagcctgattccgccagtggtgtggttaggcgttgatttgggtaatgcccgggtcggactggcactgtccgacccggagcttacctttgcacaccctgctggcaacattcatgttgccggcgactatttctttgctattgacgaggtcctgaacgtcatcgaagacgaacatgtggaccatgtaatcgtcggactgcccctgcagatggacggtacagaaggcaaaagcgccaaaaaagcgcgcaggtgggcggccaatctggagaagaggctgcaagcagagagtgaagacagtgattctacggagtatcagattccgcaggtgtcattgatagatgagagattgacaacagtcagtgcgcatcgtcaactgttcgaggcccataaagcttcgaacaagcacaggccggtggttgaccagcagtcggcagtggtgattttgcagacggcactcgaccgtacccgggagcagtgaggtatcggttatgaccgatgattttaacgagttctttgatgacaacacgcattgggtcgaacaggggtcagaaccaatgcgcggggccaagccgccagaaccgccgaaatcccgcaaggagatgcgcaagcgacgtgcacagcgcaagcgcaagcgcgtcagtggcattatcatcgctatcgccatcgtcgccctgcttatcggcggcggctatttcggcgtaaccaagctcatcgcatggcgcgacagccggagcaaccagtcgacggccatcgcggactatcggggaccgggctatggcgaggtcgaattcaccgtgagcgagggccaaggcgcggcggagatcgccgataatctgctcaaggccgaagtcatcaagtctactgccgcgttcaccagcgtggtcaacgccaatagcgcgacactctatccgggaacgttcacattgaagaagcatatggccgcatccgatgtgatcgccgttctctccgacaccaaccaggcggcgggcttccttgaggttcatcccggtgaacgtgccaccgatgtgttcgccgacgccgcgaagctttccggcgttgcccaaagcgaattcgacacgattatcaagaacaagggtaaggatattctgcccaatgaagcgggcggtagctttgagggatggctggagccgggaacctacaacgtcaagagcatgaagagcgcttcggaaatcctcaaggccatggtcgataagcgtatcgccaagttggatgaattgggcgtgccgaccggcagtgaccgcgaacgggtgatgatcatcgcctctatcgccgaggccgaggtcaacaaagccgattactacggcaaagtgacgcgagtcatcgagaaccgtttggagcagggcatgtcgttgggcatggattccaccgtggcctatggcaataacgtcaagcccgcgcaggtgaccaccgagatgacccaggacgagtccaacccgtacaacacgtacaagatctccggcctgccgcctacgccgatcagcaatcccggcgatagcgccattcaagcggcactgcaccccgaaagcggcaattggctgtacttctgcacggtcaatctggacaccggcgaaaccaagttcgccgcaaccgccgatgaacatgaccagaacgtggccgaactacgcaagtggcaagccgaaaaccagtagtcacctcattggctcccctcgccgaggggagctgtccgcaaagcggactgaggggagtaatacgggattaagccccaaccaccaccgccacaatcgcgcccgccaatatcaccggcacatacggcaccttgcccgcatgtgccggtgatgtgcgttgcgggtcgaatcgcgtccacaaggcaagccatgtgatgccggcaacgcccatcgccagccaccagaccaccacaggcaacaggccaaacagtccgacagacaatcccataggtatcaaggcggtcacatcgccgaatcccaatgaccgcggcaccagcaacgccaacgcgaactggatcaggcaacatagcacggtgaacaacagcgcctgcaacagcacgaacaggtcgttcgccaccactccatgcgcgaaatcggcggccaactggattaacgcgcccacggccacccatgcgatcggcacccgccgatgacgaacatcctcaatggacagtgcaagcccacatagcagaccgggtagcgtgaacaggtatggcatggcttaacattaacccctagttagacgtacacatagacgtacacacatgaaacgagggaagttatgctgcgttggcagacggcaggggaatctcacggagaagcattggtggccatgattgaagggttgccggccggcgtgcgcattagcacggacgatatcgtttccgcactggcacgccgtcgacttggatatggccgtggtgcccgcatgaagttcgagcaagacaaggtccgtctgctgaccggtgtacgccacggcctgaccctcggctcgccggtggccatcgaaatcgccaacaccgaatggccgaagtggaccgaggtcatgagcgccgatgcactcgaccatgacctgccgcgcgaaggccgcaatgcgccgctgagccgcccgcgcccgggccacgccgatctgaccggcatgcgcaagtatggttttgacgacgcccgcccggtactggagcgctccagcgcccgtgagaccgcctcccgtgtggccttgggcgaggtggccaagcagttcctggatcaggcgttcggcattcgcaccgtagcccacgtggtggcgctcggtggcgtgcagaccaaccctgatttgccgttgcccacacctgacgatctggaagcgttggatgcctctcccgtgcgtacgttggataaagaggccgaggcccgcatcatcgaacgcatcaacgaggccaagaaggccgccgacacgttgggcggcgtgattgaagtgctggcttacggcgtgcctgccggcatcggcacctacgtggaatccgaccgtcgtctggacgcggctctggcctccgcgattatgggcattcaggcgttcaagggtgtggagatcggcgacggcttcctggaagcctcccgccccggttcgcaggcgcacgatgagatcgtggtcaacgccgacggccgcatcgaccgtctgtccaaccgcgcaggcggcattgaaggcggtatgtccaatggccaggtgattcgcgtacgcggtgccatgaagccgattccgtccatccccaaggccctgcgtacggtcgacgtgctgaccggcgaatccgcacaagccatcaaccagcgttccgacagcaccgccgtgcctgcggcatccgtggtggccgaggccatggtgcgtctgactttggcgaagtacgcgctggataagttcggtggagacagtgttgccgaaacacggcgcaaccttgagtcgtatctcgcctcgtggccggagcacatgcgctgaacgaagtggagtatggttccgagacgactgccgcggaaccatcagcaactgtacccgccaatcgtcgagaggattcgtagattatgaccgcatgcccccgcgccgtcatcatcggcatgatgggagccggcaaaacacgtgtcggtaaggaagtggcgcatatgttgcgtctgccgttcgccgatgccgatgtggagatcgaacgtgaagtgggcatgaagattcccgcctacttcgatgaatacggtgagccggcattccgcgaggtcgaggccgatctcatcgccgatatgcttgaggatttcgacggtatcttttcgctgggcggtggcgctcccatgacgccatccacccagcatgccctcgcctcatacatcgaccatggcggtcgtgtggtctaccttgacgccgatccggcggaggccatggaacgcgcgaaccgcgggggaggccggcccatgctcaatggcaatgccaactcccgttggaagaaactgttcaagcagcgtgacccggtattccgcgaggtcgccaacgttcatgtccatacccgggggcttacgcctcagggcgcagcgaagaaagtgattgatatggtatctgagcgagcagtgcatgttaccggatcggcaattgagccgtatgatgtggtcattggcgaaggtgccatgaatcatctggtcgacgtgctgggacccaagcccgccaaaatcgcgcttatccatacccagccggtgcagcgacactccgatcgtgcccgcgccctgttgcgtcagggcggctatgaggtttccgacatcgtgattccggatgccgaacccggcaagaccattaccgtggccaacggcatttgggaacgccttggcaacgaaggtttcacccgatccgatgccgtggtggggcttggcggcggtgccgcaaccgatttggccggttttgtggctgccacgtggatgcgcggcgtgcgctatgtaaactgcccgacctcgctgctggccatggtcgatgcctccaccggtggcaaaaccggcatcaacaccccgcagggcaagaacctcgtcggctcgttctacacgcctgccggtgtgctggccgacaccaagacgctggctacgctgcccaatgacatcttcattgagggtctcggtgaagtcgccaaatccggtttcatccgcgaccccgaaatcctgcatatcctcgaagaccacgcagctgaactgcgcgctttcgacggctctacattcctcggctcgccgctcgaagacgtggttgccgagctcattgagcgcacggtaaaggtcaaggcctaccacgtctcctccgatttgaaggagaagggtctgcgtgaattcctcaactacgggcacacgatgggccatgccatcgaaaagctcgagcacttccgctggaggcatggcaatgcggtggccgtcggtatggtgtatgccgccgagctggcccatctgatcggttacatcgatcaggatctggttgactatcaccgttcgttgctcgcttcgctgggtctgccgacgtcgtggaatggcagctcgttcgacgacgtgctcgcattgatgcatcgcgacaagaaagcccgtggcaacgaactgcgtttcgtggtcctcgacgagattggtcacgtcgtacacctcgacaacccgcccgccgaagccgtagaagaagcattccgtcgtatccagcagtaattgaacggccgtaggccgtgccgttcgccatcccctcagaaaaagtacttggctcccctctaacgaaggtgccccggagtcggatttaccttctacctccctctgatgagggaggtgccccgaaggggcggagggagagaagcacaaacaaaaggagtcccaatgaccaaagtcattgttgtcaatggccctaacctcggacgtctcggcgtccgccagcccgacgtctacggtcgtcaagacctcgacaccctgcgcaagctctgcgccgaatggggcaaggacctcggcctcgaagtcgaggtgcgtcagaccgacgacgaagccgaaatggtgcgctggatgcaccaagccgccgacgagaaaaccccggtggtcatgaaccccgccgccttcacgcactattcgtatgctctcgccgacgccgcgcacatggtcattgatgagaacctgccacttatggaagtccatatttccaacccgtccgcccgcgacgagttccgcaagcgttccgtaatcagccctgtggccaccggcaccatcaccggcatgggtttctacggctacaagctcgcgctcgatgctgtggcgcacttgctgagcgaatagaaccaagccctccagccaatcccgggtatcagtcgacgttgagcccgggattcctgttccgacgaatcggaccagaatcctcgtcctggtgcgccttatggacccgaagtacgccgtgtattcgaccatatgctggccaaggcagaacgagatgggctgcctacgcacgactacaccggccacgtcatgaacacgccgggtcatacacggatgatagagtgaaattccatggttagaagaacacatggtaattctcaagaacacgtcaccaagcatattttcgtcactggcggcgttgtctcctctctcggcaagggcctgaccgcatcttcgctcggtcgtttgctgcgcagccgcggtatccatgttctgcagcaaaagctcgatccgtacatcaacgtcgacccgggcaccatgaacccgttccagcatggtgaggtctacgtgaccgaagacggtgccgaaaccgatctcgacatcggccactacgagcgtttcctcgacgtcttcctgagccagaaggccaacgtcaccaccggtcagatctatcaggaagtgctgcgcaaggagcgcgccggcgaatacctcggccagtgcgtgcaggtcatcccgcacatcaccaacgaaatcaagtctcgtatgcgcgcccaggcttccgatgacgtggatgtgatcatcaccgaaatcggtggtaccgtcggcgacatcgagtcccagcccttccttgaggccgcccgcgaagtgcgtcgcgatctcggcccggacaactgcatgttcgtgcacgtttccctggtgccgtacatttccgccgcccacgagctcaagaccaagcccacccagcactccgtgatgatgctgcgtcagctcggcatctccccggacgccctcgtgttgcgttccgaccgcccgctcaaccagtccatcaaagacaagatctccctgatgtgcgacgtcgatgccgaaggtgtggtcaactgcgtggatgcgccgagcatctacgatgtaccgaagatcctgttcgaagagggccttgatgcttacgtggtgcgtgagctcggcctgccgttccacgatgtcgattgggatgaatgggcagacctgcttgagcgcgtccaccaccccaagcacgaggtcaacatcgccatcgtcggcaagtacatcgatctgccggacgcctacctgtctgtcaccgaggccatcaaggccggcggctttgccaactgggccaaggtcaacgtcaaatgggttgctgccgaccgttgcgaaaccactgaaggcgcggccgccgctctcgacaacgtcgacggcatcgtgatccccggcggctttggcattcgcggcatcgacggcaagatcggcgccctgacgttcgcccgtgaaaccaagctgcccgcccttggcctgtgccttggtctgcagtccatggtcatcgaatactcccgccacgtgctgggcattgaagacgcgaactcttccgagttcgagcccgattgcgccaacccggtgatcgccaccatggaagagcagaaggacatcgtggccggcaagggcgacatgggccacaccatgcgtcttggctcctacccggccgagctggaggaaggctcgctggtcgccgaactgtacggcaccacgcatgtcaccgagcgccaccgccaccgttacgaagtcaacgtggcctacaaggatcgtctgcgtgaaggcggcctgcgcatctccggccagagcccggacggcgagctcaccgagttcgtggaactgccgcaggacgtgcacccgttctatgtggccacccaggctcacccggagttcaagtctcgcccgaccaagccgcacccgctgttcgccggtctggtcaaggcggcgctcggccatcaggcggcccgctgaccgtggatcccgcgcggtcggtccgcgcacgatgaaggcgtgacggcacggcatctcaggatgcttcgccgccacgccttcgccgtttggcgccatccgtgatgccgcatggcccgatggcgcccgcatgtaatcaagcccacagccaatatgcgtcaggacagctagtgtttgcacttgggttctgctaggttttcataggattaagtgtgatacaaggaaggcaggatggtgaccgaaaacacagcaccaaacgccgccgctgacgtggagatgagccagtatgtggctgatcgtacccgcgtcaacgaggacaagatcaagaaggatgacgagatcatcagccagttcggcgactacaactatggttggcatgattctgatgccgccggcgaagccgcaaaacgaggcattgatgagaacgtcgtacgcgcgatcagcgccgacaaaggcgagccgcagtggatgctcgacatgcgtctgcgtggattcaaggcgttcctcgaaaagcccatgcccgattggggcgtggatctctccggcttcaacgccgacgacttcaagtactacgtcaagccgatcgagaagcaggcgaagtcgtgggaggagctgccggacgacatacgcaacacctacgatcgccttggcatcccggaggcggagaagaaccgcctcgtctccggcgtggctgcccagtacgagtccgaggtaatctacaactccattcgtgaggacctgaagaagcagggtgtgatcttcgtcgacacggacaccgctgtgcgcgaataccctgaactcgtcaagaagtacttcggcaccgtcgtgccccctgaggacaacaagttcggcgccctcaacaccgcggcatggtccggcggctcgttcgtatacgtgccgaagggcgtgcacgtggacatcccgttgcaggcatacttccgcatcaacaccccggccatgggtcagttcgaacgtacgctgatcatcgcggacgaaggctcctacgtgcactacgtggaaggctgcaccgccccgatctggtccgaggactcgctgcacgccgccatcgtcgagatcatcgtcgagaagcacgcccgcgtgcgctacaccaccgtgcagaactggtcgaacaacgtctacaacctcgtcacccagcgtgcctacgtgcgtgagggcggcacgatggagtgggtggacggcaacatcggttccaaggccaccatgaagtacccggcctgcatcctcgccgaaccgtacgccaaggcatccaccatgtccctcggcttcgccggcaagggccagtaccaggacacgggcgcgatgatgattcacctcgccccgcacaccagctccaccatcgtcgccaagtccatctcgcgcggcggcggccgctccgcctaccgcggtctggtcaaaatcgtcaagggcgcgtacggttcgtccaactcgaccgtgtgcgatgccctgctggtcgacgacttctcccgctccgatacctacccgcacgtcgacgttcgcgaagacgacgtctcgatggcccacgaagccaccgtttccaagatctccgaagaccagctcttctacctgatgagccgaggactcacggaagaagaggcgcgaggcatgatcgtgcgcggcttcgtcgaaccgatcagccgcgagctgccgatggaatacgcgcttgaactcaacagacttgtggaacttcagatggaaggatcggtgggctgattccgatgaccgacaacacaacacccgtcaaggaaatcaagattccggtcgccgaccccaacgacccgtacgcgattccggccgccatgccgtcctccgtggaccatgccgtgcgttcgttcaacgcaggcgactatccggagcccagccgcaagcaggacgaatggcgctacacgcctatcgagcgcatcaacgagttcttcaccgtgttcaagccttccggcgaaacgcagatcgaagtctccatgattgacggctcgccgttggccgaaggcgtgaagctcagccagatcaagctcggtgagggcctgtccggcactgtgtccaagcccaacgaccgcgtctccgcagtcgaatgggaatccggccacaccgcaaccattctggaactgtccggtgagatcgcccagcccgtgctcgtcaaggtgcacggcgcgggggaggacctcgacgccttccatctggtgatcgccgccgccgacaaggctcatgcggacgtcgtcgtggaacacgacggtgacgcacgactggccgaaggcgtggaaatcaccaccggcaaggactcgcacgtctccaccacgttcgttcaggaatgggccaaaaccgccaagcatgtggccaaccaccgcatccacgtcggcgaaggcgcatccctgcgccactccgtcgtgaccttgggcggcgacatcgtccgcatccgcatggatcaggacttcggcggcgaacagggcgacctcaacatgctcggcatctacttcgtggaccccggcgagcacatcgagcaccgcacgatggtggtacacaaccaccccgactgcaagtcccgcgtggtctacaagggcgcgcttgacggcaagggcgcgcactccacttgggtgggcaacgcgctcatccagcccaccgcccccggcaccgactcctacgagctcaaccgcaacctggtcctgaccccgggtgccatcgccgattccgagccgaacctcgaaatcgaaaacggcaacatcatcggtgccggtcacgcctcttcggtgggccgcttcgacgacgaggaactgttctacctcgaatcccgcggcatccccgaaaccgacgcccgcaagctcgtggtgcgcggcttcttcggcgaactcgtcgaggagatcggcattcccgccatctccgaacatctgatgaccgtgattgaccgccgactggcccgtggcgaaaacgacgccatggcacaggtcctcgaagacaagtaagaacagcatttttaggagcacaacaatgtcaacactcgaaatcaaggacctgcacgtccacgtcgaaaccaaggaaggcatcaagccgatcctgaagggtgccaccctgaccgtccactccggcgaaacccatgccatcatgggccccaacggttccggcaagtccactctcgcctacacgttggccggccaccccaagtacgtggtcgactccggcgaggccctcctcgacggcaaggacatcctcaagatgactccggacgagcgcgccaaggccggcctgttcctggccatgcaatacccggtcgaagtgccgggcgtgtccatgaccaacttcttgcgcaccgccaagaccgaaatcgacggcgaggctcccggtattcgccagtgggccaaggacctgtccgcagccatgaagcgcctcaagatggacccgaagttcgcctcccgttccgtgaacgaaggcttctccggcggtgaaaagaagcgcgccgaagtgctgcagctcgaactgctgaagccgaagttcgccatccttgacgaaaccgactccggcttggacgtggacgccctgcgcatcgtgtccgaaggcgtgaaccgtgccaaggaagccaaccagttcggcatcctcatggtcacgcactacacccgtatcttgaagtacatcaagccggacatcgtgcacgtgttcgccgacggccacttcgtcaagaccggcggccctgagctggccgacgaactcgaagagaacggctacgaccagtacctgcccgaaggcgccgactccgagtccgcgctggcctgagtccgtgaccgtgggagtctgacatgccctattctcgacacgctccgggccactcaggccaagtctttacggtcgcgaacaggccatgtccgactcccactcgtttcgtacaattgttacgtaagtaggggaacatactggttgattttaaggcgattcgggcgcagttcccgattctggatcaggagattcacgggcacccgctcgtgtacctggattctgcggccacctcgcagaagccgaatgcggtgatcgacgccgaggcgaacttctaccgtacgatcaacgccggcgtgcaccgcggtgcccacgagctggcggcccgtagtaccatggctttcgaagaggcccgtgccaaggtcgccaagctggtcggcgcgaatgcagcggaaggcgaagaagagatcgtcgccaccggtggtgccacggccggactgaacctgctcgccaccgcgttcggcaatgcatcgctggggcgtgggggagaagccgccaagcgttttgccctgaagccgggcgatgagatcgtcgtctcgcgcgcggaacatcattcggtgctgctgccgttccaggagctggcctaccgtaccggtgccaccttcaagtggatcgacctgaccgaggacggtcgcgttcgcacggacaacctcgacgaagtcatcaccgaacgcaccaaggtcgtggccgtcacccacgtgggcaacaccacgggtgccatcaccaacatcgcccctatcatcaagcgtgcgcatgaagtaggttcgatcttcatcttggacgcttgccagtccgtaccgcacctcaaagtcgatttccatgcgcttgatgtggacttcgccgcctggagcgcgcacaagatgtacggtcctaccggcgtcggtttcctgtacggtaagcgcgaactgctcgaagccctgccgccggccaacttcggcggctccatggtcgagctcgcctacatggaccacgaggcccaatacatggcccctccggcccgcttcgaggccggcacccagccggtcgcccaagtggtggccgcaggcgtcgccgccgaatggatgatgaacatcgggctcgagaacatcgaggcccatgagaagaccatcgccgccgaactgctgaagctcggcgacatcgatggcattcgcatcctcggaccgcgcgaaaacgtggaccgcatcggtaccgtggcgttcgacgtggccggcgtgcacccgcacgatgtgggccagttcatcgacgcccagggcatcgcgattcgcgtgggacaccactgcgcccagccggtgcaccgccacttcggcctatacgcatccaaccgtgcctcctccggtgtctacaattcggtcgaagatgcccaagcattggtcgaagcggccaagggcatccgtaagttctttggagtggagtaaaacagaacaccatgaacgaattcggtatgagcggggatgacctcgaacagatgtaccaagaggtcatcctcgaggcgtcaaaacatccgcatggcaaggaatcctttgcgcccaacgcggcggtcgaacagtccgcggacgcggcggccaatgtcaccgtgcaagccagccacgaatactgcacgcccggtgaatcgcaccagttcaacccgacctgcggcgacgaggcgaccatccatgtcgaagtctccgatgacgaaccgcacaccatcaagcgattggtgtgggacggccacggctgctctatttcgcaggccagcctgtcggtgatggtcgatctggtggacggcaaaaccgtggacgaggccatggatctggaacagacattccacaagctgatggaatcgcgcggtgccggtctggacgacgagaacctggaagaaaagctcggcgacgccgtggtattccaaggcgtgtcgaaataccctatgcgcatcaaatgcgctctgctaggctgggaagggctgaaggactccatcgccaaagccctcgctgcaaagaactgaggaaatatgtccaacgataatttggtccccgaaccacagccgtccgttttcgatgccgtcaacggcgtcctgcaggacgaggaggccgctcgccgcgtgatggccaacccggccttggccaagggcttcccgaacggacgcccgatcgagcactctgctgcgtccggcgatgacacctgtgcgtgtggcggtcaccacggcaaatgcggttgccaggatgacgaacagtccgatggcagcgagattccgatcaaggcgattgacgatatcggccgcgccactgccgaagacgtgcgcgaggcactgcatcaggtgattgatccggagcttggcatcgacgtgatcgatttgggtctggtctacggcattgagatcgatgagctaggccgcgccattattacgatgacgctgaccacgccggcctgcccgctgaccgaccttatcgaggacgaatgcgcatccacgctggccggtctggtcgaggagttccgcatcgactggacgtgggacccgcgctggaccatggagcgcatcacgcccgaaggccgcgaccagctcgccgcccttggcttcaacttcgacaacatgccaaagtactgatagcgcttagtaagctccctctgatgagggagctctatacgagaaaagccccgcatgatgcggggcttttccaagtctggactggtcaatcagtcatcgacgatggtgttcttcgggacaaccgtaatgccgtccggcgtgacggtgaagccacgggccagatcgtgctcggtatcgatgccgacagtggagttttcggtcaggaccacgttcttgtcgagaatcgccttgtacacgcgggcgcggcggttgatgatcacaccgtcgaacagcacggaatcgacgatctgtgcccacgagtggatacgcacattgggggagagcacggagtggtgcacttcaccgccggagacgatcacaccgggggagacgatcgaatcggtggcgtggcccagacggtcgcggccggcgtgcacgaacttggccggcggcaggttgccggacatcgtgtaaatcggccaatcctggttgtacaggttgaactcgggcacataggcgatcagatccatgtgcgcatcgtagaactgcttaatcgtaccgacgtcgcgccagtaagcgtgatcagtgaccgtggaacccggaatctcgttcgagttgaagtcgtagacgccggcctcgttgcgggaagcgaagtacggggcgatgtcgccgcccatgtcatgcttggtgtcggcagccttctcatcgagagccagagcctcgaacagggccttggtgttggcaacgtagttacccatggaagccagaatctggttcggattgtccggcagaccggtggtggtggccggcttctcctggaagttcctgatcatgttcgggtgatcgggatcgacctcaattacaccgaactggttcgattcctcgatgggctggcggataccggccacggtgaactcggcgccggactcgatgtgctgctgtaccatctgctcgaagtccatgcggtagacgtgatcggcgcccacgatcaccacgatgtccggctggacgtcctcgatgatgttgatggtctggtagatggcgtcggcggagccgaggtaccagtgcttgccgagacgctgctgcgcgggcacaggggagacgtacgagccaagcagcggggagaaacgccagacctgggagatgtggcggtcaagcgagtgagacttgtactgggtgagcaccacgacctgacggtacccggagttcaccagattgctcaacgggaaatcgatcagacgatacacaccaccgaagggaacggcgggcttcgcgcgatcgcgggttaacggcatcaggcgggtcccctcaccacctgcaagcacaatcgacagaatcttgggattcttggccatcgtaactgtcctctctgttactgagcgtctttcgacaccgcactgctgggccggatgcttccttgcattcggtttacatagttaataattgcagaaaaattcgaacatgcaaggctttcccccccgcgtgccgtgaacttgcgatgaacagtttcgtagatttgtttaaggatccggccttttcggagcgcgtgcgattccttagcgtgtcgcgtagaacgccactgcgctggatgccgccacgttcagactatccacgccgtggctcatcggaatcttcacggtcaaatcggcgcgggcaatcgtatggtgggacaggccgtcgccctcggtgccgaagatcagcgcgagcttgtcgatatgcgtcggatcttcgtcaggcgcgtgcagacggcgtgtcagttcgtccaacgaaatcgaacgatcctccaatgccatggccacggtggtgaagcccagcgacttcaactcgtcgatgccctggaacggccagtaatgcttgttttcggtaccgtcgtcgttgaacccggtgatacgggtccacggaatctggaatacggtgcccatcgacacacgagcggctcgtcggtacagcggatcaccgcaggagggtgtgaccagcacggcatccacatcgagcgcggccgccgaacgcatcagtgcgcccacattggtgtggtccacgatgttttccattactgccacgcggcgggcgctcctgcagacctcggctacggagggcagcggccagcgtcgcatcgcgcatagggcgccgcgatgcagacgatagccggtcagtcgcttgagctgctcaggtgaggccacgtagacgggaatatccgcgccccagcgcccgtcgatgaagtcgaaggtgtctttcatgccctccagccaaggttcctcgaccagcagtgacagcggttcgcggtcagcggccagcgcgcggtcgatgactttgggggactcggcgatgaacacgcccttggctggttccaagcgattgcgcaactgcatttcggtgaggctcacatacgcttcgacgcgcgggtcgtcaacggtgtccagcgtgatgaactgcattggtggcctttcgtgtgtgcagataacgaaaaaccccttgcaatgcaaggggtttatctgtgcccgagacgggacttgaacccgtacgcccgtataaaataggcactagcacctcaagctagcgcgtctaccattccgccacccgggcaggtgtcgtttggacaacgagtaaatagcttagcatgaaattacagggatgcaattcgcgcgtgtgcccggcgtgtcgcgtgtagccttgaagtcatgactgatgccctttttcttttcgacccgcaggtcgacgatgtcccggtgaacagcgacgaacttcacgccggctggaagctaaccctgcccgcgcacatcaagcgccatgctgtgcaggccatgcgactcaaggcgggggacagcctgcaactttccgacggcaacggcttgagaatccaggcagtgatggccgatcctgaagccggacttgctgaagttgtggaagtggggcgcgaacccgagccgctcacccgtttggcgctgattcaggcattggcgaaaaccggccatgatgagcaggccatcgatatggctacgcagattggcgtcgaccaagtggtgccatggcaggcggaccgatccattgccaagtggaaggtcggccgtacggacaagaagtggaattcggtactggatgccgccaccgagcagtcgcggcgcgcttttaagccgcaactggaggcgtgcgcgtccagcaaggaggtcgtggccatctgccgcagggcctgcgtgcatggcgatgtggtgattgtgctgcatcaggatgctaccgatacgtggtccggcgtggaggagaaggttacgcagttggtggaacgcacgctccaggacggccggccgcggactgtcagtgtggtggtcgggcctgagggcggcatcagtgagcaggaggtagctgatttcgtcaaggccggagcggtgagctgcgtactggggcacaatattctgagagccgcgacggccggtcctgtagcgttgtcgctgttgtctcgggtgttgggacgttacgagtaacgcccacgcgctaagctggtgcgtagcaacatcaaaccaaggagcatgatgagcgaatccgacgattgcctgttctgcaagatcatcgcagggcagattcccagcagcaaggtctacgaggacgagacgacctacgcattcaacgacatcaaccccaaggccaaggtccacgtgctcgtggtgcccaagaagcactacgccaacgtcgccgaacttgccgccgacgacccgaccgagctggcccacatcgtctccatcgcgcagaacatcgccgacaaggaatttcacggcgcctaccgactggtgttcaacaccggtctcgacgccggccagaccgtcttccacgtgcacgcgcacgtgatgaccggcgaaaagctcgacgagtagtaggggaatatccgcttcgtggcaacgactacacgtaccatcaccatcccgccccaacttgaccccgtcgccgtgctcggcccggttgacgaggtcattcgcgaggtggagcgcgcctttccggacctgacgattatcgtgcgcggcaaccgcgtggcgatcgtctcccgctccaagcagaccgaagcccaggccgcacaggccgaggatttggtcaacaccatcatccaagccgcctacaccgcgcctatggacgccgacaccgtgcgtcgcatgctcgaccagaacgtgctcaagaaccacgtgcgcctcgaacatccaggtcacggcccggtgcatgacaaactggcgcaatcgacctcaaacgaacgcgcccatgcacgttctgccggctcccacgacccgacgtaccgcaagcccacggttcccggcgtcatcacctttgccgccggcgtgccggtccgtgcgaaaaccgccggacaagtggcctacgtgaacgccatcgaatcgcacaccatcaccttcggcattggtcccgcaggcaccggcaagacgtatctggccgtggccaaggctgtgcgtgccttccaggacaagcatattcgccgcatcatcctcacgcgcccggccgtggaggccggcgaaagccttggctttctgcccggcacgctgaacgacaaggttgacccgtatctgcgcccgctgtacgacgcgcttggcgacatgctcggcgccgaccagctcaagcggtacatggacgacggctccatcgaagtggcgccgctcgcctacatgcgcggccgtacgctgaacgacgcgttcgtgatcctcgacgaggctcagaacaccaccgaacagcagatgaagatgttcctgacccgtctgggcttcaacaccacgatggtcatcaccggcgatatctcgcaggtggacctgaccgtgccgcgctcgggactggccaccatcgaacgcatcctgggcggcatcgacgacatcgcattcgtgcatctcaaaaccgaggacgtggtacgtcaccagctggtcggccagatcgtggccgcctacgaccgtcactccgccatcgccggcgaccaccgcgacatcgaacgcaagggccgccgcaaccataccgacttcgatgcccgccagcaaacggattcaaccaaccaaagtgagacagacgatgagcgttgacgtcaccaatgaaacccagtgggtcatcgaccccaaggtcttctccgatttgggtatttgggtactcgaccagatgcgcgtgagcacccagtccgacctgaccatcatgttcgtggatcccgatcccatcgccgaattgcacatgcgttggatgaacctcgaaggtccgaccgacgtgatgagcttcccgatggacgagctgcgcccaggcgacggcaaaaccgtgatggaaggagtgctcggcgacatcgtcatctgcccgtgggtcgctgcccaacaggctgccgcagccgggcacagcaccatgcaggagatgctattgctcaccatccacggcatcctgcacctgctcggctacgaccacgtgacccccgagcaggagcgccagatgttcggcctgcagcgacagctgctgctcaccttcttcgccctgcgccacgatgccaacgtgcaggccacgctgcccgccggcacacccgacgcgctggccctgtacgacgccgcgcacggtgctggccgcgacctcgattccaaataaacttccaaatcaatcacaccaaattcggattattctataccgttcaaggacattcaaggacaccgaaaaaacattatggagtattccagtaccacgctgatcgccgtcaccgtcattctcgtacttgtggcggccctgttcgtctggctttcgctgaccatggccgccgctgaaggcgccgtggcccgcgtaacgcgagccagcctcaacaatctcatcctcgaggtgcagaccgactccgaagcaagccagttcctcaagatgaagaagatcgacaagattcatcgcgtgcaacggctcatcgccgaccgttacgccaccgccggcagctgtgcgttcttccgcatcgcctgcaatgtgctcgacggcgtactggtgtcttccatcgcatccctgtggggtgcggaactgtgggttgaactgctcgccggattcctgttcgcgattatcgtagccgtggtctccgtactggtccgcccgcgcaccgccggcatgaccaagccggtcgacatcatgatttccaactcgcgcatcgtgtcgttggccaccaagctcacgccgttcgcacgcatcggtggcgacaagtccggttccaaggggccgggccgccgctccaaggactccgatctgtccgatgacgaggagcttgagaagattcagctcgagcagggcaaggccgccatcgaccgactggtggagtccaacgacttcgatccggaagtctccgaaatgttgcgcaacgtgctcaccctgtctgatacgttgactcgcgagatcatggtgccgcgcaccgatatgatctgcatggagcgcgactccacactgtcttccgcgctgaaactgttctcccgctccggtttctcccgcgtgccggtgatcggtgaggatgtggatgacctgatcggcgtggcctatttgaaggacgccgtgcgcgccaccgccttcaacccggcggccatggagcgcacggtcgaatccatcgtccggcagccgctgcttgttcccgaatccaagccggtggacgacctgttccatgagatgcagcgttcccgccaacatgtggccgtggtggtcgatgagtatggcggcatcgccggcatggtgactatcgaggatgccatcgaacagatcgtcggcgagctggaagacgagcacgaccgcacccagcgtaccgagccggagaaaatcggcgacaacaagtggaagatgcccgcccgtacgccgattgccgatctggaggagatcttcgagatcgacattgatgaggacgatgtcgataccgtgtacggcctgctgaccaagattctgggccgcgtgccgattgtcggtgcttcggccgtgacgcgcggtctgcgactgaccgccgtggactccgccggacgccgcaagaaggtgtccaccatcgtcgtcgaaccggcgcacgtcgagggcggcgaggaaaatagcaggacccatgaggaaactgacggcgagcccgtcgaaggcgatgataccgccagcaaggagtgatatgaccgaccagaacaacagcacgaacgacgtcgatgacattgacgtcaccgatgcttccgatgttgccggcgttgccgaagtcgacgcgaccggtgaaacggagaatgtgaccaagcaggacgtgccgtatcgctccggattcgtggccgtggtgggccgcccgaacgtcggcaaatccacgttgatcaacgcgttgatcggcaagcagatcgccatcgcatcctctcgcccggaaaccacccgtaaggcgattcgcggcatcctgaccgccgaccacgcgcagctcgtgctcgtggacacgcccggtatccaccgcccgcgtacgttgcttggccagcgtctgaacgacgtggtcgacgaatccttggccgatgtggacgtggtggccttcctgctgcccgccgaccaggaaatcggccccggcgacaagcgtattctttcccgactgcgtaccgacttcgccaccaagcgtgaggacggtacgttcaagtggcgcatcccgctgattgccatcgtcaccaagatcgacgagcttggccgtcagcaactcatcaacaagctcatcgaaatcaacgatttcgccgatttctcggacatcgtgccggtgagcgccctgaagcacgacaatctggctgaagtgaagaacgtgctcattgagcacacgcccgagggcccgcagatgtacccggacgatcagatcagcgaggagcgtccggaagacaccatcgccgaactcgtgcgcggtgcgttccttgagaccctggacgacgagttgccgcattcgctggccgtggtggtcgattccatcgactatccggaagacaacgagaccggtcagggctatgacggcaaggcgcaggtcaacgtgtccatttacgtggagcgtgactcacagaagccgatcatcatcggcaagggcgcctcgaacctcacctacgtcaagaagaagctacgcaccccggtcaaccgcatcgtcggccaaaatgccaagctcgacctccacgtcaaggtagccaaaggctggcagtccgaccccaagcaactagaacgcctcggcttctaggaatcggccttcggccggttataacaaagggagattccaatggaatctcccttttgctgtactcgagtcctccttacttcttcttggtgtacatctgggtgttgaggagggtggagtagcgcttgatgaccttggggcgaatcaccttcatggaagcggtcatgaggccgttctcctgagtgaactcctcgggcaggatgatgaacttgcgtacggattcggcgcgggagactccctcgttggcccgatcgacccactgctgcacttcggcgcgcacggcggcgttccttgccgcgtcctcgagggacatgttctcgtcaagccccttggcggcgagccacgggcgcaacgacttctcgtccaacgtcaccagggcggagataaacgggcgtttgtcgcccagcaccaacgcctgggagacgatctcgcaacgctggatgacctcctcgatcgggccgggggagacgttcttgccgccggcggtgatgatcaggtccttcttgcgcccggtgatgtacaggaacccgtcgttgtcgatgcggcccagatcgccggtggcataccagccatcttcggtgaacgacagctcagtggcctcgtcgttcttgtgatagcgcgggaacacagcacgacccttgacctgaatttcgccgtcctcggcgatgcgcagggagaatccggggaatgcgatgcccacggaaccagcgtggaacggcgtacccagcgggttgaacgcgcacggtgcggtggtctcggtcagaccatagccctcgtatacaggcacacccgcgccacggaagaaagccagcagttccgggtcaagcggggcaccgccggccacaatccacttgacgcgaccgccgagcacttcgcgcagcgaagagtagacaatcggatcgaaggcagcgcggcgagtgcgggtcagtgcacctgccttgccattggcggagacttccttcatatagttctgcgcggccaccacggcggaggcgaacaccacgccctttggaccgtgtccggccttctgggacgcggcgttgtacaccttctccagcacgcgcggcaccacgatcatgagagtgggcttggccacctgcagatcgctgatcagcgtcttgatgccggtggcgatgtagatgcggacgttcgaggagacgacgatgtagttgatggcgcgggcgaaggaatgggcctgcggcaggaacagcaggatggtgttcctcttgtcgtgcagcagatcgggcatgtaggccggcagattcagcgcggtctggcagtagtgctcgtgggtcatctccacgcctttcggcgcggccgtggaaccggaggtgtacacgatggagcacaggtcggtcttcttgaccgaatcgatgcgctcgtccagctcctcgtccgagaccgtggtgccgtaggccttgatttcgtccaagccaccggtctcgatggtgatgatgtgctccagggacgggcactcttcgacggccccatccgccttcttacgcatgtccgtgtcctgcacgatcagcagtcgggcatcggagttgttgacgatattgcgaatctgctcggcggaatcggtgtcgtagatggtggccagcacaccgccgcacgccatgatcgccgcgtcggtcaggtcccagtcgtaggaagttcggcacatgaatgccacggcatcgcccttcttcaggccgtaatgaatcaggcccttggccacggcacgcacatcagccaggaactcgttggcggtgacggtcacccaatcgttgccggacttgtaggtgtacagcggctcatcgcccatgcgttcggcgcggtccgcatacaggtcgtagatggacgtaccttcgtccagcggcggattgccttcggtggaggtggtgagcaggccggtggcggggtcgatgtcggtgacggtcaggtggccgtcgtcccaatcgtcgctgtgaggcaaagcgatattggtctcgaccggcacgtcggcattggacaggtaatcgggctcgtccggggtgtcgtcgtggaccgggtggacgaagtcggatcccaacctgagcgccttacgggtgagattgatagtgtgctgcgtgaaggaattgataaccgacaagtcttgctcctgtaaacctttcagtgtcgtccagccatgaggcgaacgcttctcaaagttcaaattgtaatcgcccaaaccgaactcgtcaccttacgcaaccgtaggattctggcgggttaggggagtgcgtggcaaaatattgcacaggtcccgatattgttgagtaaccgtgagctacgaaacggtgattgtcgataattactgagcggttggttgctgatcgatgccgggtgattgttggacgacttccgagcaattcatccgcaatgcacatggatacattcgtatttctcactaatttcgggttcgtttctgtttcgattggcggaatctcaagtcatggtctttaccttccgactacactttctatgcggataaccatgtccattttgaagtagaacaagaaagggctctcatggcgcaaaacccagaagccaccgtggtgttcggcgttttgaacgaaacgtccgaaacggaatcccgcgtcgcgctgacgccggatatcgtcacccggctgaagaggagcggagtctcctcgattattgaggccggtgccggcattgccgccgaatacaccgatgaggattacgaaaaggccggtgcgaaggtgaccagccgcgacgaggtgctcgccgaagccgacgcgctcggttttgtggaccgaccgtccgccgagaccgtggccaagctcagggccggccagtgggtcattggcatgctcggttccttcaccgatgccgattacgtggccgcgctcgagaaggccggtctggtgggcatcgccatcgaaaagctaccccgtaagctttccagcgcccagtccatggatgagatgacctctcagaactccgtgatgggctacaaggcagccatcaccgccgccgatgcttacggctccttcctgccgatgatgaccaccgccgccggcacgattcgcccggccaaggcgctggtgctcggtgccggcatcgccggcctgcaggccattggtacgctgaagcgtctaggcgcggtcgtcaccgcgtacgacgtgcgtcccgcctcccagggcgaggtcgagtccctcggcgcgaagttccttgatctgggacttgacttctccaagggccagggcgagggcggttatgcccgcgcgctgagcgccgaagagcaggctcagcagcaggctgccgtcgatgagaaggccgccggctttgacatcatcatcaccaccgccaaggtcccgggccgtaagcccccggtgctgctcaccgcagccggcgtcaagggtctcaagcgtggtgccgtgatcgtggactgcgcagcatccgacctcggcggcaacgtcgagggctccgccgtcggcgagcaggtcaccgagggcggtgtcaagctgattggcgctccctacctggcctccggcgtcgccaccaccgcatccaacctgctttcgcgcaatgtggccgacatcctcgtgcacttcgtgcgtgacggcaagctcggccaggatctcaccgaagaactcgacgacgcgctggtggttgccggccgcgccgccgccccggcagctgctgccgatgccgagaagtccgagaagtaaggaagaaggaataccatgcctactctcgtcgtttccattaccctgttcgtcctcgcgctgctcatcggtatcgaggtcatcggcaaggtgcccgccaccctgcacacgccgcttatgtccggcgcgaactccatccacggcatcgtcatcgtcggcgttgtgatcgtggcagccgaagccaatagcccactggcctacgtgttcatcttcctggccgccgtgctgggcaccatgaacgtcgttggtggctacgtggtcaccgaccgcatgcttgagatgttcaagtccagcaagaacgagaagaagggggagtcgaagtaatgacctccgcaaccgttggcgccatcgacatcgtcgcatggttcgtctacctgttctccgccgtcctgttcgtggtcggcctgcacttcatgaactctccgaagaccgcccgcaagggtaaccagatctccgcgttcggcatggtcgtggccgtgctcatggcgttcatcgtgcttttcgccaagggcttcgtgaacattgtcgccgtggtggtgctggtcgtcggcatcctgatcggtgccgtggccggtgtcgtctccgccaagaaggtgaagatgaccgacatgccgcagctggtttccgtgttcaacaccgtgggtggtggcgctgccgcactcgtggccctgaacgacatcctgaccaaggaaggcaccccggacatcgtggtgctcatcaccgctggtctcggtattctcatcggttctgtgaccttcaccggctcgctcatcgctgccggcaagctgcagggtatcaagtgggtcaagaagctgaacctgccgggcaagggcgtatggaacattctgttcgccgtgctgtccgtcgcttcgctggttatgctgtgcgtccagcccgaacagcgcctgctgtggtcgattctgaccaccgtgttcgccctgtgctacggcctggtgttcgtgattccgatcggcggcgctgatatgccagtggtgatctccgtgctcaacgcatgcaccggtactgctgtggccatgtccggtctggcgattgacaacgttgccctgatcgtggccggcgcactcgtcggttccgcaggtgtgaccctgtccatcctcatggctcaggccatgaaccgtccgctgctctccgtcttggccggtggcttcggcggtggtgctgacgccgccgctgctggcgacggtccggaaggcaccatgaaggagaccacgccggacgatctggccgttcagctcgtctacgcgcagaaggtcatcttcgtgcccggcttcggtctggctcaggctcaggcccagcgcgagctcgccgacctcggcgaactgctcaagggccatggcgtggaagtctcctacgccattcacccggtcgcaggccgtatgcctggtcacatgaacgtgctgctggccgaggccaacgtgccctacgaggagctcgtggatctcgatgagatcaacccgcagttcccgcaggccaacgtggctctggtcgtcggcgccaacgatgtgaccaacccggctgctcgccgtcctggcaccccggtttccggtatgccgattctcgacgtcgacaagtcccagaacgtcgtggtcatgaagcgtggccgcggcatgggctacgccggtatccagaacgaactctacttcgaggacaacacccagatgctgttcggtgacgcgaagaagagtctgcagtccgtcatcgccgccgtcaaggaactgctcgcgtaaccattcttggctcccctcacagaggggagccaagcttctatatctactacagcccaaacacccgcttaacaaagccgttaacgcgacgccaatagtggtccggatcggtgctggcgctcatcgtgtggtcggcgccgggaatcagcagcttctcgcggtcgatgctggcgcaggcgttgtaattgatgtccagatacttcgggttgacaaaagtatccgctccgccatgaatgaacatcatcggaatagtcgcgtgccgtaatgccttcacacaggaggcgtcctcaaaccggtatccagccttgcgtttagacacatgactggccactttgaccagcagcacggccaacgagtgcggcaaacggaacatcgcctcggcattatccgtaaactgcgagaccacggaactgtatccgcaatcggaaatcgcggcgacgacgttgcgggggagtcgcgcatcgccggccgccatcatcaccgtggcggcgcccatcgaattgccatgcaacagaatgcgtgcatccggatcagctgcggtgatcagcgaaacccagcccaacagatcgtcgctttccagcaatcccatacccacgtaacgcccttcgctcaactcatgggcgcgctgcgcgggtagcaggaccgtaaaaccgagttgcgaatagcgatgcgcccatttggccatttccgcgggctctccggtatagccatggcagcagatcgcgtatagatgcggctgtgggtcggaacaatccgggtccaacagccagccgtggagtttccatccatcatggctgcgcagcgtgaccgattgcttggcctcctcgaaccaccggccggcctcaagctgctcggacatgtcgaattcgatgcctttcggcgtctcctcgtgcggcatgttgaacatcgaacgtttggccttggtgtccagcgcgaacatgaacatgacgttggcggccgcggctgtgacgccggctcctgtggcggctatcgcggcaagtgccgcagccatgcccctgacaacgcgagtgtgtgcggcgatgacgtcatggccatcctcattgatgacgtcgtccgaacgagtcatatcaacctcccgatatggtactcaccatcgtacgttattatcgaaatcatccccaacttcgtgaaagaccgtacactgagtgtcgctgagcgtacggttttcacgaaatggcgaacgatttcgtgaaaaccgtatgatgagaacgggtaagcgtacgttcttcacaaagttagggattatttcgcggaaaccgtacgttgacgtagctgggacggcctatatgcagtgtcatcgaagcatcattacgcaaagtccggggttggcgtatacttgacaattgttgctttggcgagggaagtgtgcatgctgacacatgacacagattccgttatcgactcggcgtatttcactccttgtagggtgtctttcggcgcgtcgtggcgtctgagcgagacagtacgaaacgaagatacaaggagtatccattatggctaccaccattaagcttgagggcgaggcccgttccgagttcggcaagggcgttgctcgtcgtctgcgcgttgccaacaagattccggccaccatctacgccggcggcgaagagcccgccttcgtgaccttgccgatgcgcgagaccaccctggccctgcgtcacaccaacgccctgttcaccatcgccttcgacggcaacaccaagatggccgtcgtcaaggacgtgcagaagaacccggtcaagcgcatcatcgagcacatcgacttcctcgaggtcaaggccggcgagaagatcgacgtcgaggtgccggtgttcgtggaaggcaccccgaagggtgctgccgtggcgttcgtcgacattcaggagctcaaggtccgcgccgacgtcaccaacctgcccgagaagatcgtggtcagcgtcgaaggcctgaccgacggcaccaaggtgttcgccaaggatgtcgtcctgcctgagggcgtcgagctggacgtcgaggatccggaagagtccgtcgtcaccgtcgaggtgccggaggatgccaccgagtccaccaccgctccggaagctgctgccgccccggctgacgccgccgctgctccggctgccgacgccaagtgagtcggtcgcttcgatagcgaacaattcagaacataactgaaacgtggaagcccgcagccgttgagaacggtgtgggcttcttcgttttttcaccatgtgaactctgccacacgagtaacacatgggtgtgcaaaagtatgcaacagagttcgcgccacaagcgcacagcacacaccccatatggtggctttcgggccgccaaagtcaagaagaagtagctagtgatgactgaaaacacgcaccacgatccggcagcactcgacaagctcaccgaaccgttcaccgtactgccgaacgacaaccccgcatccgatgagaagcgccagtccctcatcgacaagccggctttcggccaggtgttctccgacaacatgacccacatgacttggaccaagggcgaaggctggtccgaccgccgcgtcgaaccgtacgcaccgctcaagatggacccgggtgcttccgtgctgcactacgcacaggagtgcttcgagggcctcaaggcttaccgtcatgccgacggctccacctggctgttccgcccggatgcgaacgccgagcgtttccagaactccgccaagcgtctgtacctgcctgagctgccgattgacgacttcctcggttccgtggccgcgctggtcaagcgcgacgccaactgggtgccgtcccgccgcgagtacacgctgtacatgcgtccgttcatgttcgcttccgagccgttcctcggcgtgcgcgccccgcaggaggtcgactactgcgtgatcgcctctccgtccggcccgtacttcccgggcggcgtcaagccggtgagcatctgggttgaagacaagtggttccgcaccggccctggcggcactggtttcgccaagtgcggcggcaactacgccgcctccctgctcggcgagtacaagggtgttgagaatggctgcgagcaggtgtgctttgtggacgccgccaccaagacctaccttgaagagctcggtggcatgaacatgatggccgtgcacaaggatggccacgtggagaccccgtccctgaccggcaacattctgccgggcgtgacccgtcgctctctgattcagctgttgcaggacaagggccacgacgtggtcgagaccatgatcgccctcgaccagctgctcgaggacatcaagtccggtgaagtcaccgaggtgttcgcttgcggtaccgccgccatcatcaccccgatcggtcgcttcaagtccgagaagttcgacgtcaccgtcgccgacggcggctccggcaagctcacctgcgaactgcgcgacgagctgctcggcatccagctcggcgaagtcgaggacccgcacaactggatgtggaaggtgtgctgaactagcaccttttgtttccgactaagaccccttagaatgtcaacaattccaaggggtcttggcgtattggaaatgttcttggctagagaggtacagatggatttagcaacatttcgcaacaaataatatgatttaggtcttctgcacgttgcgggggttggttatggttcatccagatgagaacaggagcaaacctatgagcaagatgagtgacatgacggaatactatgcttcagcctaccgtttgccgtcaggcttcgagcattgctcgaaactgaagccggtggcagaggcagcgacggcgttgcatcggtggtgagacaagacatgagcttctggcgacgctgggggatgttcaatgtcagtaatggttcaaggtttggactgctgacgtcgctgagacagcttagcgtcgttaacgggtcaggttctggcgatcaaacgacggtaaaaaggggcttagcgtcgttagctgtacataagttggcacggcaacgacactggagcgcgtgatcgtcggtgccgtgccaaactttggccaacctccgacaaatgagaaggactaacgtcggtggctgctcaaagtttggcgcgctggcgacgctgtaagaaaaaagtgtggagtcgaatcggcaatagcatttattcggtttgttctctagtccaattgcgtcaggcaaggcctgttgtaggctcgggtacgacgggctgtagcgccgaataaggatgaacgggaacagaacgaagacggactgagacgaaccgaagcggtaccagaggggagcggctcatgcaggtggtgttggagaacaacatcgtttttgtggtcatcgagtatttagcaatcctgtgttggggattgtcgggcggacttgccgccattcgcaagggctacgacatcttcaccatcatgctgtgcggatggcttaccgcactcggcggcggtcttgtgcgcgacgtgatgctcggtgccctgccgccggtcggcatcaccgacaaaggctatgtgctcaccacgctgttctctggcgtcatcgcggtggtggcccacccggagatcaccaaactcaaatggacgatgactgtcatcgatgctctgggcctcggactattcgcagtcagcggcaccgcaaaagctctggcctacggttcctcaggcatgacagccgtattccttggcatgttcacagcactggccggcggcctcattcgtgacatcttcatcggcgatgtgccaatgattattcgagacaaacacctctatgccgtgccctcgttcatcggttgcattctgaccgtgcttgtatggcgtggtgtgcactacggttggttcgacatgtgctcggaaatgctgctcgacgtgctgatcgtcatcatcgtggtggcgctgcgcctgctctcggtcggcttcaacgtcaccttgcccggagccgtcgagcgtcatcgcgtctacctgcccagcgaaagccgatatctcaagcgcccggtcatccatccgcacgccgataccgtcgatcccggcgataccaccaaggacgaagaagacaagcctcaggatgattcaagaccgcctcagggctaactgccttcaaagaggtacatttggccttctgcaaaatgacaactgctttcaaagaggtacctgaagcacgaaacgtcgagtataagcgttgcaatgacggcgtttatacttgggctttctcggattcggtacctttctgaacggagatgtcatttcgcaagaccgccaatgtacctctttgaacggagatataaaaagtcccgcaagccagatgacttgcgggacttgctaaaaccttaagaggcttatgctcacagagcgttgatcgcaacagcgaggccggacttgcggttggcggcctggttcttgtggatcacgccagcgccagcagccttgtcgagcttctgggcggcaaccttgtaggcggcctcggcggcagccttgtc

SEQ ID NO: 3430 - DNA, 3364 bp, Unknown
  R151_18m  MAG No. k141_47981
atcaagattctctcaaattggctggaaacgattaggcaagtccgcaacatggttgcacatcatgatcgtttctggaacgagaccagtacccgtatcgttccgaagctgcctaagcatcggagcggtttacacgccaatgaatggtggggcaacgattgggacgctttcagaacggactctaccggtcccgccgctttcctcaccatggaaaactacctgctgcaacaaatcgatggctccgcatggaagaacaaattcatcagcctcatggaccgctatccggaaattcctgcaacggaaatgggattccccgaggattggcgatcactcgcattgtggtcatgacgacaggcgcgcaccgtccgtggttccatgcccccttgatcatgatttgcaagcgcccccggaggtcggcgaccgcgcgattgcttgacgcgatcgtagttgaaccagtggatgcactcgtcgatcaacgcgagcaccttcccacgggtgcgctcctcccaccgctcggggtagacggacccggccctcatcccgccgaagaaaccctccgcggccgcgttgcctggcgaacagcccttcgcgcccgtcaatcccgccagcccgaaccgctccatgagttccggccatcccggccacccatggtgacggccgcggtcggaacgcaccagaggacgcgcgccctcggacaacgtggcggccgccttctccagcatggtgtcggcgagccgcgcgtcggggccgtatccggctgcgtaagcgactatcttgccgtcgtggcagccgatcaccggcgagagtgtctttcgtcaaataaatctgcgtgtcgtcaccagttaatctgaacaccatcggcgttcaaaatggacaccgtcaccggcggtccggctggttcccctctttttgtttatctcatcagggagtggctgtcgcggtacgactcgccacggaacctgacgatccttccgtggtgcacgatgcggtcgatgaccgtggcggccatgtcgccgtcgccgaacacctcgccccaccgtccgaactccaggttcgtggcggacaccacgctccgcttctcgtaggaatccgcgacgacctggaacaactacgctccgacctcaacgactatgtgtggtggttcaacaaccaaagactccactccaccctcggataccggagtccgaaggaattcaccgaacagggactcgtcctctaagaacctgtccaacacaccgttgccaatccacccgcgaacctgccggacccgcgggtccgacggctacgccccgcacacgcatccggcgggcgatcttgcctatgtccgcgtcgggcggaggctgagcgtacgtgtgcctgctgatcgacctgtcgaacaggggcatcgccggccattccgccgggcggacccgggacgcgggcctggtgccgggcgcgttcgccacgttcgacttcccgctggcggacgtccaggtgttccacgccgaccggggcggcgggttcgacaacacgaggatcgacgagccgctcgacgtgttcgacatcaaaagatcgctgccgcgcaagggcaacccctacgacaacgccgtggtcgagtcgacggacaggctgctgaggaaggagcacgtgtgccggaaccgctacgccacggtcgggcagctgaggcatgaccccgacgactgcgtgtggtggtccgacggccggcggctccactccaccatcggagaccggagtccgaaggaattcgccgaatagggactcgtcctctaagaaaccgtccaacacaccgttgccaatccagtgcagttccgttccctgaccgaatcgatagacacgagcacaccgggcggtacgctcatgttcaacatcttcgggtctctggcgcagttcgaaagcgacttgatccgcgaacgcacccgcgccggactcgaagccgccagagcaagaggacggaagggcggacggcccgccaagctcgacgagaaacaggtcagggaggtgcggaggctgtactggtccaggatggtgacggtggatcagatcgccgcgatgatgcacgtgggacggtccaccgtctacaggtgtctgaatcttggccgacaaatccgatgatggcgattggcaaagggcttccgcagtatgagcatacgacacgccggttcatagaaaataaacgtcgccacgctatccttaaaggtgcacttttttcaagaaaggagatacagcatgacgaccctagtcgaaactattgccgaaaaccccagcatggtctggccaatcatcctcatcatcttggcgatgcgaagttaaccagttactagctagatagttctcttatttagtttttcctagtctccagagctttggaatattcaatatttcaaagctcttttcatattgaatattaccacacttggagcatcaaaagacaaaacttagtcaagaatttgaaaaaaggcaatttctggcgtgtcgtgcacttatgcagcaccttgaattctgtgttttagattctggtgtccgccgtggaacattaacccttctttggaatctcgccgatatcctatgatcaaacgtgtggatttgttgcccatgtactccggtatcaatttggctgcgctcctgccggtcatcgccgatcacctagtaaagatgcgcgtgtgactgtcgaccggtctcgcaatacgatttctctgtaggttacgccgtaattggcagacttgatttcacgttggcgcatatggccgaatgaaggcatccgacggcgtattgggaacccggagcctagggcttggcgcgtccggcatcgtaggcctgtatgtctcctctctctggttccatctggcaattttcataaaagtgcagaaatgcagtaaaacacactttcaaaaagtgcagaaatgcggtcaaatctggttttgaaaaacgtggaaatgcgaaagccggaagtgaggtgtggtccgccatgctcagacggaagatgtacgacgtcctgcttgattggaaatcacggtcctagggcaggacggccatgctggtcgagggcgcgcggcgcgttggcaagtcgaccgtcgtggaggagttcgccaggcgcgagtaccgcagctacatactcgtcgatttcgccgaggcgtctcgcgacgccgcgaactgttcgacgacgtgtccgacctcgactacctgttcctccagctccagctgaggtattcggccaggctgttcgacagggagtcgctgatcatattcgacgaggtccagatgtgtccgagggcgaggcaggccatcaaacagctcgtcagggacggccgctacgactacatcgagaccggttcgctcgtcttgatacgcaggaacaccagggacatcc

SEQ ID NO: 3431 - DNA, 10165 bp, Unknown
  R151_18m  MAG No. k141_49486
gtgatcttccgggcggtaaaacggcatggcacaactttggcaaaaaccattgtccggcatttccataagcctcgccatcggcacctcaaaacgggtgctgatcagccgaatcatgtcgatgctcggctctgccgttcccttctcccagcgggaaagcgcctgttgggtgacgaacagctcgtgcgcgaactgcgactgcgtaagacctcgctcctcgcgcacgactttgataacctgaccgatcgacatgactacctcccgacatcggaaaacgattcgcgcgtctcgctgtgcgcttgctgattccagtctaagggcatgtcccgttcgccaagcgcgggtacaacaaaccgttgttcgcacttgcatcccggaggaagaaacggctcggtcgaacctatttcctctccgcacccttcaatgctcccggttcctctgactcctttgcgagcgccgcggatgggatgagcacgcttacgtatggggttgcgccagacaggacgtcgtcgtagaagcgctgtttggcgtcgatgaagtcgatggaatcctggatttccgcgagctgctcgaccagccgcgcccgcttgccggcgagcatctacttgcgttcggggatgctcggctcgtggaggagcgtaaggggcgcgagtaggggttcgcggctttgctgcggtctctccctcacccggctatactgggagctccctcgtcagagggagcttaaattcggtctggttataggcccctgggcttcttgggctttttgtcgctcatgagcatgaggaagctgcgggactgggcggtgatcatgaagcccgcctcatagctcagttccggcccattcgggttgtgcgtatccacgaccagctgccatttgcggccgtatcgctcatccggcagggtgaacataatcggctcgtaatgcgcgttgaagatcaggatgaagtcattgtcgaccatccggttgccgtaccagtctacctccggaatatccgaaccgttcagatagatcatcatggagaacgcatgcgtgttctgccagtcgtccatatccatgatcgaaccggtgtggtcgaaccattcgacctgcggaatcatgttcgaatcgtcgccgggctcacggcctgtgaagaagcgacggcggtgcaacaccggatgatccaaacgcagatgaatgagtttggaaacgaaggcgagcagttccttgcgtcccttgtcaagatgccagttggtccaggagatctcgttgtcctgacagtaggcgttgttgttgccctgctgggtgcgggccacttcgtcgccaccgcaaatcatcgggataccctggctgaacagcaacgtggcgaacatgttgcgcatctgacgctgacgcaagtcgttgacgtccggaatattggtcgggccttcaacgccgcaattccaagagcgattgttgctctcgccgtcgcgattgccctcgccattggcttcgttgtgcttttcgttgtagctgaccaggtcgttcattgtgaaaccgtcatgcgcggtgatgaagttcacggacgccaccggtcgacggccgttgacctgatacagatcggaactgcccatcaggcgcgaggcgaattcgggcagcgtggagggctgcgagcgccagaagtcgcgcacggtgtcgcggtagcggccattccattcggaccagctggacgggaagccgcccacctgatagccgccggagcccagatcccacggttcggcaatcagcttcacgcgcgagatgatcgggtcctgctccacgatgtcgaagaacgcggacagcttgtcgacctcctggaactggcgtgccagcgtggcggccagatcgaagcggaagccgtcgacgtgcatttcggtaacccagtagcgcagcgaatcggtaatcaactgcagcgcgtgcggcgagcgcataagcagcgagttgccggtaccggtggtgtcgaagtagtgctgctggtcgccttccaccagtcggtagtaggaggcgttgtcgatgcccttgaagctcagggtggggcccatatggttgccttcggcggtgtggttgtacaccacgtcgaggatgacctccatgccggcgtgatggtaggccttgaccatggacttgaattcgttgacctgctcgccgcgctctccggaggaggagtaggcgttgtgcggcgcgaagaagccgatggtgttgtagccccagtagttcgacaggcccttctcctgcaggaaggagtcgttgacgaactggtggatcggcatgagttcgatggcggtgacgccgagcttcttcaggtattcgatgacgctcggataggccaggccggcgtaggtgccgcggatgtccggcggcacgtccatgttgaggttggtcatgccgcgcacatgcgcctcgtagatcaccgaatcgtggtacgagatgtaggggtgctggtcgttgccccagtcgaaatacggattgatgacggccgacttcatggtgtgggcggccgagtcaaggtcgttcatcgccgaggtgtcgtccgggcttttgaaccagtaggagaacaggctttcgtcgccgtcgatgttgccttcgatggccttggcatacgggtcgagcagcagtttgttggggttgcatctgaggccgtgcatcgggtcatagggaccgtagacgcggtagccgtagcgttggccgggctggaggccggggatgtagttatgccatacgtatgagttctgttcggtcatttcgatgcgcgtttccgcatcgtgctcgtcgaacaggcatagctcgactttctgcgcaacctgtgagtacagcgcgaagttcacaccggcgccgtcatagctggcgcccagcggatacattgatccaggtctgatctgcatagttttcagtatcccactttcttgtgtcactgatgtgccggggagttgaacgtcaggagaacagcgacggcttgtctttgtcggagttcctggcgatgagtctgcgtaacgcctcatgctggatggcgatcatcgaattggatgaggtgatgcgcgtggcggcaaggtcgctccacggaatccacgcggattccacgtgctcgtccgcgtcgaaatggcgctgctcccgtctgaacgggcccaaatgcaacaccatgatgtgggccagttcgtcggtcatgccttcggacgagtagaaatcgcccacgaagtcaacacccatggtgtcacggtccggcaccacgccggtttcctcggccagttccctcagggccgcgtccatgatgtcctcgccctcgtccatgagaccggcgggaagcccgtaggcgaacatgtccgatccggcacggtattcgcgttcgatgaggtaacggtcggtggacatgtcgtgcacgagcatgaccacacagggggcgtgacgcagcacctggcggccgatctcgtgttccttgccctgcttgtcggtcagagcgatgcgcatgtcgtccacgtggaagatgcgcccggtataaacggtttcgctactgatcactttggcgggcacgtccatgtcgatgccgtccgaggaggcgttcagcttatggtcgagccgatgctccagttgttcctgcttgcttcccccaaacatgtcatctcctcggaaaaaacgttttcgccacgtcactatagcgccttaatcccgatgcgcggtaatggacagcgtccatggatcggtcgtgtcgtggaaccactcgacttcaggccttgctccggtcgcttgttcgatggcggccggcacgtcatcgatcgcgtagttgaaccacatggattcgatggcggcatgaggggtgttgatgaagcagggacgcacatggctctcccccgccattccatggccgagcatgatgccttgggtcctcatacgggcttcataccgggcttgttcgatggcgtcggtcaccgggtggtgacgcaaatcgctggttacgtacacgtccgcaccggtggcacgcacctcgttgaacagggagtcaccggagccaggcagaatggccacatactgaacaaaagtgtccgaatcgccgcatacctggatgccgagcgcggtggtcatgccatgatcggacacttcgtcgaatacacgctgagcgaaatccttcagggcaacaggcttcggcaaacgacccacacgccccaagccgaccggatgagaggcgttggcatcgtcaatcggcacgagtggtttctggtcgatgagtccgaagtagtcggccgccgcctgccccacgccgcgatacgcagcgtcagcattggtgtgccctacccacagcccgcagccttgctggtagagcctgcggacgatgtcgccccggaaaccgagtccgctcgtctcgtgtacggaacggaagaacaacgggtgatgggtgatgagcaggtccgcgccagtagcgatggccttgtcaatgatggcggaggtcgggtcggcggcgaacacgatgcggtgcacgtcgtggctcagatcgccgacgatgagacccggctcatcccattcctcggcgtagcgcaatgggtacagggtctcgagaacgtcgatgacttgcttgagattcggcatatgtcccattgtagtgggctattgcggcaagggactcattctgcaattgcggacaagccatgctcgtgctcttcattgctcgactatcggctcgccttcgcctacaaacaatccactggactgtttgctcaacggctcagcctcctcacccgaggggagctagaaattgtcagtgtgcggcgagctgccagtcggaaccgataccgcacgatacgtccagcggcacggcaaggtcgacggcgtgttccatggcgttgcgtaccagttcggtgacctggtcgccttctcccggcgcgatttccactaccagttcatcgtgaatctgcagaatgatacggctcttgacgtgggcctctgccaaggtctgctcggcgcgaatcatcgcgatcttcatgatgtcggcggcagatccctgaatcggtgcgttgagtgccgcacgttcggcggcctctcgcgcaacacgattggtcgaatgcagggccgggaagtagcgacgccgtccgaaaatggtttccgtataccccttctctcgggcattggccaccagcgattcaaggtaatcgtgcaccttgccgaaggtatcgaaataccggtttttcaacgcttccgcttcacgtggcgcgatcttgagttgctgggcaagaccatacgtgctcagaccataggccaatccgtagctcatggcttttacgtggctgcgctggtcgccggtgatctggtcgaccggcagcttgtagaccatcgaggccacgtatttgtggaagtcggctccggagcggaacgcttcgatcagcgcctcatcaccggacagatcggccatgatgcgcagctcgacctgtgagtaatcgcaactcatcagggcctcgtacccctcccccggcacgaacacgccgcgaatctcacgaccggcggcgttccggttgggaatattctgcaggttcgggtccacggagctcaatcgaccggtggcggcaacggtttgctcgaaagtggtgtggatgcgctcatctgatgtgttggtggcatcgatcagcgtttggacgatctgcttgagcttgttgatctctcggtggcgcagcaacgccccgaggaaaccgttggcccgctcattgtccactgatttgacatacagatcctgcaatgcggccgcattcgtggtgtatgagccggacttggtgcgtttggtgggcttcaaacccatatcttcgaacagcaccttctgcagctgcttggggctttgcaggttgatttcggtgccggcatactcccaagccatttcctgcgcctgacgagcctcggcggcaaactggtcacgcatggaaacgagtcgaacgctatcgactttggctcctgtgtgctccatgccgtgcagcacgcgggaaacaggaagttcaatcgcgcgcatcagccagcattgttcacgctcgtcgataatcggcccaagcgtgacggcgaggctgcggataatggccaaatcgcgcagacgatgttcgttcggatcttcttcgacctgatcgtcatcgaagtccaacgtgccttgcgaaggctgttcggtttcggtgaagtggatgtcgaggaagtgctcggccgcctgcttgaggctatcggcgtggaaatccggttgggtcagatacccggcaagcttggtgtcgaacatcggcaggtccatgtcaagatctaccgcgcccagaagatgcagcaattctttatacccatgcacgatggtgcgggagtgttcgctttccaggaaccgcgcaagctgtgctcgcagggtatcggtgattggaaggggcactatggccgctgatgttgccgtggcaacggcaatggcttgtgccgtggcacgacccggcctttcgtcgccccatgcggccacggtccaagcgtggccgaccgcgtcgccgcagacggtatgccgctgcgatccatcgccatagtcggaaaccgtgaaatcagcgatttcaccgggaactttgacctcggcgcgatgggccttgacccattcgtcgaactgctccgaagaggtgatgctcgtgggttccggcaggttcagatcgagactgttatcctgctcgtcctgttcattattcgtagactcgccggctccgtatgtgttggaaaccttggcaccggtattgaaggttttcagcacgcgactcctggtacgcggtccgaattcaagctccttgaacagggcgtcgatttgtgccacgtccacggtgccgaatgtcagatcctcgatatcgacgcctaaatcgacatctcgtaccagtgcgttgactttgcgattgagcttgacctggtcgatattggcccgcagcgattcgccttttttgccgccgatttcatcggcgtgctcgcaaatgccgtcgagggaaccgaattggttgatccacttggccgcaaagccatcgcctacaccgggcacaccgggaatattgtcggcggtttcgccgcggagcgccgccagatccggatattgtgcgggagtgactttgtatttgtcgacgatggactgcggcgtcatatgcttcaggtctttgaagtgatgacccgggtacaacacggtgacgttgtcatccaccagctggaaggcgtctcggtctccggacaataccagtgtgtggtagccggccttgtctcccatggtggcgagggtggcgatcacatcgtcgccttcgaatcccggcttctcgatgtaggtgacgccgagggccgtgagcatgcgttgaatcaatggcagctgggtgagcagctcttcgggagccgcctcacgggtgcctttgtattgcggaagcatctcattgcggaatgtgccgcccttcacatcgaaggcgacgcccagatggtcggggttctccgcatcgatcacctgcgcgagcatggtggcaaaaccccagacggcgttggtggcctggccgctggaagtactgaagttgtcgaccggcagggcgaaaaatgcacggaaggccagcgagtggccgtccaccaccagcaatgtttcattggtgggtacggtcacgctggcctctcccatagtgtgtttgtgttgctttacgactcagcacggtgatgccgataatcagcgttcgcccgaatcagaaggcttcggatcgccgtacttggcgatgatggcctgagccaggcgcttcttggggatgcgctggtccatggaggtcttctgaatccaacggaaggcaccctgctcggagaagtcagccttgtccatcagcagacccttggcgcggtcgacgagcttgcgctcctcaagcgtgtcttcggccttcttgagcttctcttcggtttccttgagctggtcggtggtttccttgagcttgcgttcgctgcgctccacgttgtccagcagatcgttgatctcggcgaaacggcccatggccacctcgagggtcggcagcaacttggattcctcgtacggcttggtgacgtatgccatggcgccggcaccggtggccttcttcaccagatcggtctgggagaatgcggtgagcatgacgacaggggcgatgttctcatcgcagataatgccggcagcggcgatgccgtccatacgcggcatcttgacatccatgcacaccacatcagggcgatacttgcgggtcagttccacggcttcctcgccgttggcggcctgaccaacgacctcataaccgttgtcttccagcatggcgaccagatccatgcggttcacggcttcgtcctcggccacgacaacggtacgcggaccgtcctcgggcttggccttgcgctcagcaggttcgctttcatcggctacggccttgagttcttcgtcggtcagcacctcatcgacgttgatactcggttcttcggacttcttccttgcagccatgccaacctctttcttgaattacccaacaatggggttcgtaataatttcagcgaactcctagctaaagtgccctcggtgggactcgaacccacactgcgcagattttgaggctgcttcctctaccaattgggatacgagggcgtgcctaagcactctgaagagagtagcataccgattcgactcctgcgacacaagacacgcgccagtcctccatttccccccggtaaaacaggcgaaacacgtcgatatcgtggacggcgtacccgtgtgttgcccgttcttctgcgtggtttcaccgcttacaatgggctgtagtttcgatgtatcgcttttgttaggagggcttatgagcaacgaaacttaccgtcagttcgatccctggcgcccttctccggtcaaggagatttcccgtagacagattgtggagacgcattatttcaatgtcgatcacgtctcctatgagtcgaatcagatcggttcgtttgaacgctactttgttcaggagaacaatggcgacactgtggctgtgctggccgtcaccgatgacggcatgattccgctggtcgagcagtatcgcatcgccaaccatcgttggacgttggagattccggcaggccacgccaacaacccgtccgaacgcccgaccgatgtggctaagcgcaagctggccgaagaggctggtttcgatgcctccaagcttacgcagttcacccgttttatgaacacgccgagctattccacccagcacaccgcaatcttcttcgccaccggacttaccccggcttcccgtcaggaaatcggcccggagactccgcgttccgacgtgcgtatggtgtcggtggacgatgcctatgagatggtggtcaatggcacgattgtggatgccaagaccatggtcgccattctgcgtctgaagagcggcacgctcgatcatctcaacgactagtcaccacgctcgatcatcgcggtgactacgtgccattgcaatcaccgcacaatcgcaacataacggataacgaaagccccccatccactttctggatggggggctttcgcgtgctatgtgctagcagtcagcagctaccagcggcctgaaatcagtcgcaagcgccaacggtgtgcacgtagatggagtcggtgcggcccggctggtgatcgccctgagcagagctcaggatgacgatcttgtcgccgtcagcaaccttgccggcatccttgaggaccttgtccgtgtagatcatcagatccttgcgggacttgtcgtggtagtcctccttgagcaggaaggcttcggtgccccaggacagagccagccagtggtaggtgtgctcgttgctggtcaggccgtagatcggggcggccggacgctcacgggagacgcggtgcacggtggcgccggtctgggtgtaagcaacgatggccttggcgttgagcttgtcggccaggtccacggcggcggaggagacggcgccggtggaggacatgtcgaggttcttgagctccgggatgcggtcgaagccgtggtcggtggcgtagccggagatgcgcgacatgggggccacggtcacatccgggtacttgccgacggcggtctcgttggaggtcatggtggcgtcggagccgtcgaggacggcgttggcgcagtcggaggcctctgcacgggtcgggaccggggagttcaccatggagccgaggacttcggtggccacgatgaccggcttggcata

SEQ ID NO: 3432 - DNA, 25846 bp, Unknown
  R151_18m  MAG No. k141_49583
cggtctcgttgatgacgtccttggcgaggcgcgcccagtcgtcttcggtgtagcctcgcgtgttgatggcccagaggtgatccatggtcaggccggctttgcttcggccgttgatgacgtcggtgaatttcgcgccgacgtgcatggtgttgttgtagccgccgacgatctgccagaaggcgcggtccgagctgacctgcgcctccttgtagtcgggcatgctgatgccggcggcttcggcccatgcgccgcgcacgttcctgtagtagtcctgtgcgatgaggttggccttgcgcgcgtagtcctccagttggcgtcgggcttcggtggtgggatcatcgccgaagtagaggctgttgggcaccatcgtcttggcttcgatgatgaggtcggcgagctcgtcctgatagtcgtcccacatgtcgttgaggtgcccgttgaacgctttacgctgcgccgggctgaggttgctcagcggcaggctgttgctgtccattggctgcggcctcctgcgtgtcggtcttggcggtggcgatcttggcgcgtagttcgtcgatggcgtcctgcgtgcgctgctgtttctcgtaggcgcgatgggcggcgatctcgtcccatgtcaggccggcgcggctcaggcccacgtcgctgtcggcgaaggcggggttggtggacgcgaccttctggtaccagtcggcgcgggcggcgtcgctggcttccttggtgggtgcccagatcggtcgcagttggcggatgtcggcttcgtccgcgccctgggcggcgagcgccatggcgaggatgcttttgatgctttcgccgaagcgtttgttttgccggtcggcggtgcgggagagtttgcgttcggcttcggccatggcttcggcgctggcggggttgtccatggtgatgccgaggtcgttgacggggatgtcggtttcgctgctgaccatgagggcgacggttctgagcatgtcggagtgtggctgcatcgaggcctgtgtgagttggcgcagttcgggtttttcgccgttgcggccggcggggatgccgttgatgacgctgacgatgctgccccatgtgtcggggcttacctgtcctttgttggctccgaggaaccatatgcgtggtgccgcgtagaattctgcggtcgcttccatgcgcacgagggtgcgcagtccgaggtcggtgagggccatgagcgggcgggtgatgcggctggagccgagggggcggtagagctgctggtcgctgacgatcggcacgacggtggggcggtcgaagccggtttcgatgcgttcggcctgccatgtgccgctgttgcggcggcacaggtagaccttgccgggcagccatacgtcgaagcgggtgatgtagccgtctttgtctttgtcgcggatggtcatggccgcgccgatcctgtcgttgccccagtcccatagggcgctgctccagtcggcggcgcggggcgtgatccgtatgtcgtcgtcgtcgccggagatggtcatgaagctgcatccgtgcgtgtatgcggacacgatggcctgctggattttcacgccgaacgtgttcgccgcgacgaggtcgtctacctgcgtctggagggtttcgggcgcgtcgatgccttcgaacacggaaaggtcggcgagcgcgcggacggctttgttgggccagccgatcattggtttggcgagggctttcatggccggtgggatgctgtaggcgacgcctttgtagtggtagtgggcgaggtagtagctggtgcgcagggtgttgcgcgtgtagtggcgtcgccattgtttgaggagttcgttgatggtgggctggtcgtcggggtccacgccggcgatggtgttggcgtaggcgctttcgatggcgagccagccggcttgtccgcgcaggatggggacgtcgtcggtgttcatgattagtaccatgcttcctgttgtgcggtggggtctcttctggtggtcatggccccgtggagggcgagggtgacggcgttgagcgggctgatgtcggtgtcgtcgtcgggtcggttccatccgaagaggccgtttttgccgatggggcgtgtggtggctttggcggcggcttgccagagtggttgttggccgtcttcgggcaggtgggtgagggtgccgtctctgagcatgtcctggaggcgtccgcaggcgcggcccatgtcggtggcggcggtgacggtgacggtgacgccggcttcggcgaggtcgggcaggagcgcggtggcggggctttgcccgtcgatgacgagcgcggcggtttgttcccagaccttgtcgatgaggttgacggcccacatggtgccgtcgtggttggtgtccctgtattcggcgagttcgatgtgggcggtgccgtcgtcgtagcgcatgcatgcgccgatggtcaggcgtgtgcgtgtggggttcatgtcgatgccgaagctcatgacgccgcctgggcggcgggcgtcgatggtggcttcctcccattggcggcggtcgatggcgcggctgagggcgtgttcgtcccagatgccgagggcttcgcgccggaagtcgtcgccggtgaggttctcccacaggttggcgatggattcgtcgctggtgtgggccgggtagctggggttggctttcctccattgttcgcggtcgagggggtcggcgtcgcggtcggcggcgaattcgacgtagagggtgctgtgggtgcggcccgcgcgcgttttgtccctgaggcgggtgaacgcttcgccgttgtcccttggcccgggcggggtgcccatgtagatggtctgggggttgtaggcgcggttctgggtcggcagcatcgacgccatcgccgagtcggacaggtgctgggcctcgtcgatgacgagcagggcgatcttcttgacgcctcgcaatgcgccgcgttcgcgggcgcggaagaagatacggctgccgttgcggaagcgtatctcctctttgccggcggcgaggctgatgccgtggtcggggtccacgaggccgctcatctccggcctgagcacgatcgcgcacaggctttcgaacgtgtccttgatgacgctgaagtgctgcgccgtccacacgatgcgcatgccgggggttcgggcggcgcggtggatcgcgacccagccgatgtcgtaggtcttgcctgtctggcgcgggatcgacagcaccgtgttgcgggcgctccagaagccgtcggcgcttttcgcgaggataatccggttgatctgccgctgccagacgtcgaaccggtcgcccgccgccgcggcgagccggttgaggctcggctcgccgctggtgtacaggtcgtcggggatgatctggcaggccgccccgtcaatcctcgtgctcatccaatcgtatgtcctccgtgtccagggcctgcatggccggatcatgctcgttcgacgccttgtcgatcgcctcgatctcggcgctcatgtccgccaagcgtttcgtcagactggcgaggtcgcgtgagcttatcgacccttcgtcgagcttttcggcgatcaggttgcgcatcgccaccaggaggcggcgacgatccccggaagcggcggcattgctgaccctttgggacttcgacgcgctcttcgacctggtggttttcgacgttctggcgaccatgacggctccttgccaagtgtggaaaaaagtccgggggaaaaacggccctttgcccgtggtggccgtgaggtggccgggcagggtctactccctacccccgaaccagtccgagcagcggatcggcccggccgagacctgtgcggcgcgctgcggcgctttgccttgcgtgatgaggtgggcgacgcgctcgcgtgcccatgccagactgtgcgtgcccttgatggcgttgcaccatcggtgcgccggcccgctgttgtcatgcgtcagggtgccgcctcgcgccaagggtatcgtctcgtcgatcacgaagctgtacgggtcgggcgaacgcagcgtgtagtcgatgggccgatagcagatgtagcagtcggcttgcatgtgccgccatcgctgctgctccagcctgcgcctgtgcccgttgcgtttgcgcgggttgctcacctgagcctcggtttcgcggtgcattggctgacctcgacgccggccctgaacacgatctcgtcggcgatcaacggcacccacacgatgcccagatcgtcgcgccccacctccgggtagggctgccggtcggccaatgggtaggggaagatcaagccgtccacgagcacacgccccctgcgggcgtccacttcgatgcgcttgggacacaacgccatgacacgcctccaatcgaacgcttgtacggatcgacagactgcgctcgccggcgggaagaagaggaaagaaccggcggcgaggcgtctgtctgtggtggtttctcgggtgccgcatacgctggttgtgcacggtgccggcgtcggctggcggatggtgcgggattcgaacccgcgaagcatgaggctatcatgcttgcccgcttagcaagcgggtgccttcggccgctcggccaaccatccagcgggaacaaaaaagccccgccggcatgggcagggctttctcgatactccgattacacgcgacagcgtaacacggaaccgggtcaggggtcaagcgtcgtcgtggtcgcgttcgtccttggcctgggcgcacgccaagagctccagcacattccacgcccaataggggccctcgatgtgtcttgtgccgggcattttgccgcgtgcgcgccagttcttcaggtcgttgccgctcacgttgacgccggtgttggccctgatccaacgggcggcgtcggattgggtgcgggtgatgtgcatgaggcccgcgctgcgcaggtattcgagcctggtgcgccgcaagtcgagccatgcgccgcaggctgggcatatcgcataccgtgcgtctcgggcggcgtagatgggcgtgcgcaccggctccccctgctcgtcgcgaccgttgagacagtcggggcatacgccgatgagccgcttctccgcactgtgcgacgtggccgcgtccacccgttccgcaagacgcagggtgtccgcgtacaggccggaggcgtcttcgagccgggcgaggtcgcgcatgcggcgcagcagcaggcggatgaggtcggcccattgcatgagggtgcgcgcccgctcgtatcggtcatatccgagcggcttgatgccgagccggccgcccatgagctgcaagtgcacctccaccgcgtcgaacagggcttgggcggtctcgttgaccggcggggccgcatacgccgtgttgccgtgtcgaggagagcgctcgcgggtggtggcttgtttgtaggcgatctgctggagggctggcatgccggccttcaggagccatgcgaggcgtcgcgcccagtctcgggcgcatgccttgcagatggtggcctcggccggtttgccgcagatgacgcagttgtgttccatatcccccgcccttgtcggtgctagacttgccttttggacaatgcaatgcctctgccgcaaggtgggggctttttatttgcctcgccgccgttcccggcgtggcggattggccggaggcggcttgatttcaacgatttttttaactttcctgtctattgtcgctgatgccggcgggttttggcggcgcgtaccggggttcgaggaattcggggcgtttcggctgtggtggcgcggggtgggcttgcaggatgatggccttcacctcgtcgacggggatgcgcagggactgcgcggtctcttccggcggcacacccttgccgcgccattccacgatgatcctcctgacgccttcggtgactttcatcccctcgcctcctgccggtcgagccgttcgcatgcggagtgcctggcgcacatcatggcgacgcggcgcatgcacttgcggatcgcgccgtcgcaggagagggcgatgacggtgaaccggccgaagcattcggggtgcgacaccctcgcggtgggcgtggcggtgccgcgcatgatgatgaccggcccgatcttccaggcggtgacgttaacgtcgatgtcgatgtcgttcattctcgttcctttctcggccggctcgtccggccgtactgcttgccgccccatatgccctgcaacgggtagccgctgatccggttgttatcgtcggcaaaggcgcggcactcgtcgatgaccgggcattgccggcacacggcgagcgccgccgcctgttcgtatggtttgccgctgaaccagagttcggggtcgtggtcgcggcatgcggcttgatgtctccagttcatgggctatcggccgccgttgtaggtgaagacgatgccgaggcgtttcatgacaagtccctttgcagtgcgtgttggccggccgcggtgatggcgtagcggccgtatccgacgtcttccgcgtatccacgtgcttcaagggactggtaggtgcgccggtgattgccgtccgcaggataggcgtcgccgtgcctgacaatctggagcagtgcgctcttttgcgcgtaggtgagtcgccggacgctcatttcaacgcctccgtccgcgcggcagtgatcgccaaccacgcaagccgccgatactgctctttcgcgtcagggttcaacttcgaccacaacggctccacctcctcgaagcccatgcccgacgtacccgtatagacggcgagcgccgccgcgtcgatctccctatcggtgatcttgcggcatacgccggccctgtacgccttgcgcgacgcgaggcactggccgagactggtgatgccggtcgggcgctcgccgttgtctgggtaggggtagcgttcctcgatctcgttggtgatgatgctggtcatgcttggtcttctttcgggtcggtgggctggtattcgagcaggtaggggctgagcttgtctcggtggtctcggcgtatgtggacggtgccgatggtctggtcgttgaaccgttgagcgcagtcggggcatatgtcgatatcgatgtcgttgagctggcccatggaggtgcggttggccgaatacccggacagtctgaatcgcagcgcttcgcgtttgctggtttccgtgccgcattggtcgcagtagatgcgtgtgctcattgttggttcctttcgtgttcgatgaggcggtcgaggcaggcgagggccgaataggggaagccttgccggagtttcgcccatgtgtgcgcttcggcgtcggggatggcgggatcgttggcgagggtgtcgaggatggcgtgttgttggcgtgtccatgcgatcttctcgtcgtggtcgatgacgtggcagaggtaccatcgggctttttcgaggtcttcgacgggtcggcccttgctgtggtagcgccagaggtatttgatggcgttgccgaggcagaagctggtgtctgcggtcagttcgatgcactccatgcccgggtgcgagcgtgtgtagtggtttggtgagttgacggggtcgttggcccatgtggtgtgcatgcttaccagtccttttcgagttcccggcagtcggggcagatggatgacgtgctgtcggtgagcggtgcgccgcagatcgcgcagatggtcggatcgttggccggttcgggtcggtgggtggcctttcggagacgtcggatgagttcgatgacggggttggggcggtccggggttgctgtgtgggcgttcattgcttgtccctgagttcgatgtgtccccagtcgcatgacgctccgccggagtcggagaagcatcggacggccgcgctgccgtcgggcagttcgtaccagcggacgtatccggggtcggggttgttcacggtgccctggccgtcgcctttgggtgtttctccgcatgccgtgagcgcgaggatggcgaggatcgccgtgagggttgcgggtattcgtttgcgggggttcatgatcgggctccttggatgccggctcgcatgatgtcgaggtagttggcgtagtcgttgcggtctcggcggatgcagtcttggactcggtgggtgcctgcgtggttttggtaggggttgtggtcgagggctaggtcgctgatccggtaggtgctgaggtcgagttttctgtggttggtgagctggcggagccagtcggggtggagatgggggccgagttggttggtgagtacgtcgatgtcgtagtccacgttggtgccggccgggtggagcacgtactgggatgcctcggtgccgaggaatgcgccgaggttgcgggcgacgttcgcgtatccgaattcttcgggttcggtttccatgacggtgtccagtagcccgttgtcgaggtgcatgcgcagcaccttggggtcgaggtcgtagaggctcacatggtcgggacggacggggaggatgaaccggtcgccgtcttcggtgccgtcgaggttggtgacgatcatgccgatttcgaggattttcgcgtcggtgcggctgatgccggtggtttccaggtcgatccacagcagcttgtgcggcttgcgtggtggtgtcggcgggtcgagtgggatggtctggccgcctacggtcgtggtcttggtggtgttcattcttgggttcctttcttggtttccttgatgtcggggatgtagtcgggctggtccgagggtggttcggccggggtgcgggtgccgtccgcgttgagctgctgccagccgccggtgcggtagtagacggggatggtggcggggtctttgcccatgtggacgaggtagccgagctggtaggcgcgcttggggtgggcgtggacccatccgtggcatcctgtggtgccgctgccgcagagttggagcaggttttcgggttggtggagccggtcgaacgggtggcttcgcggttccctgtggtggatgctgtcgccgctccagtggctgccggtttcccggtcgcagatggcgcatcggtatcggtctcgccgttgtacggtgcggcgggtttcgtcggtgggtttggtgctcatctttgcgcctttcgttggcattcgttgatgatttccttggctttttgttccgggttgatgccggtttttacgcaggcccagaagtcggttctcatcgcgtcggtgaaggtgccggccggtacgtggtctcggatgtggccggtgatccaccggtcgtcgatgacggtgccgtcgggcagcgcgtgccggtagggtttcggctggtcgggcatggtgtccgtgtatgcgccttggcgcagccatcggctcatgttgggcgcgtatttgggttcgtcgatggttttggcgtaggcgatgacgctgccgatgagctgtctggggtcggccggcggccggcctgcgacgccttggatggcgaggttccacgccttttcggcttcggttttgctgccggtgtggcgcgggtaggcgttccatgcggtctcgaactggtcttcgagcatcctggcctcgagttcggccatggtggtgcgctccggcttcgactcggacgccggtgtcggtgtcggcgtcggcgcggaggggttgggggaggttatatcggtgtgggaataggtataggtaagggtgcttcgtttttgcttgccggtttgcttcgcgtttgcttcaccttttgcttcggcaagtgcttcaccttttgcttcgtccggttgaagcatttgcttcgcgtttgcttcactgttgcttgaggcgtttgcttcgtttttgcttcgtctcgagcggccggacgccttgcctccggcacggccggcgcgggcgcgtttttcctgtagttccttggtggccgcgtacttgcagagcatggtgccgtccgggttggcggcgacgatctcgaacacgtccggctcggtttcgcgccacaggccggcgtccacgagctggcgggcgagcttcgggctgccgccgagcttcctgacgcgctgcatggtgatggccccgtcgtagtcgccgtggcgcagttggcggccgacgtagctgccggccatcgtccacaggcccatcgcggacaatggaagctcctcgcattgcggggcgtcgtagatgccgtcgtcgatcatgaaccaagtcatggttgaacctctctcaatgtgatgggttatttgatctcgccggtgttcggatcgacagcctccccgctgtcggtctcgtccgcatcgtcgtcgggatcgggatagtcgggcgcgctttcctcgaacgtggcgaggctgtcgtggaggttgtcgtacaggaccgcgcggcgtgcgtccttcggataggtgagcagccggttgatgacctcggcgcagtcgatgatgtgctgcgcgagcgcgtccgtgtcgtacacggcctcggtgtacgggtcgatctggtggaacttgtcgaggtaggcgtctttggtttcgagctgcatcttgtggttgaccgcgcggcggaagtccacggccgcctgcttgatcttcgcgcacgagctgttgaagtccagcaggctcagcgggctcatttcgtcgggtatgagcgcgtcctggacaaggttcgagtcttttttctttgccatgagggtgtcctttctagaattccggttcgccggtgtcggcggcgaacatgtccggcgtgtggccgctgccgccgttggcccacgggtcggacgccggcggcggtgtcgtctgctgcgggggctgcgggggctggccgttcgggttgccgtaggtgccgccgccctgatagccgttgcggccgccctgtttcgtgacctgcgcggtcgcgtaccgcaggctggggccgatctcgtccacggtcatttcgaccacggtgcggttggtgccgtcctgcgcctgatacgagcgttgggagaggcggccctgggcgatcacgcgcatgcccttcgagcatgattggctgatgtgccgggcgaggtcgttccacgccgagcagcgcaggaacaacgccgtgccgtcctcgtactgctgcgtctggcggttgtaggtgcggggcgtgctggcgatcgtgaacgacgcgaccggattgccgttggacagggtgcgcagttcggggtcggcggtgaggttgccgatgatcgtgatgacggtttcgccggccactagtcctcgtcctccatgtcctcgatccagtcgccgacgaacgtggcgagggcgtgcgcgtcctcggctgcgcggcgcgcgatgccccatgccacgtcttcgcggcggttgtggcagtgcagggcgaggtcggagagcgccgtataggccttgtcggccacgtcgcgcatgtgctccagctcggtcagggtctcgtcgtcttcctcgtcttcctcgtcttcctcggcgatgacgcggcctatcggctgagcgttcttgaacgcctcttcgaggaacttgggcagcccgccagtatcgggggcgacatacacgctcgccttgaccggctcgcacaggcgcacgccggcgtccttgagcgcgcattcgagcgcgtccctcacgacggcggtgtcggcgcggccatcgtcgtagttgggcagacgggcggcgagtctcttcgccaagcgttcctcaagcgagatatcggtcttttcttcggtcatttcttggttcctttcatctggtagtcggccttgatcttccacatgcagcgcgcggacacctgccggcggtcgcggtcaacgaccacgtcgccgaagcgggggaagatcagcgtgcgatcccattgcgggtcgctgttgagtctgcgggttgcggtcgcgctggactcggtggtgcggcctcaggagtcgaagcctgccgtgtccatcgctccccgctcgcacgggcattccgcgtgtcctgtcagtggcgtgcgagggggcgacgttgacgcgatcgcagtggacggtggccgaatcgaacggcttcccggtctttgcccgcgcccgcctgacgcgaatctcgaccgggggcgaacctgcccgcccgtaccgcacgccgccggaaaatgtggagaggtggcgacgtgcggggtttgagagaggtggttttgtacgacttttccttgtcgccgcccgccggtggaaggtaattgcaatgccggcgggcaagtctctagatggtcagcacgagcacgcagagaatgacgagcctgagcaactggtacacaaccgctcccggcttgaccttcgtttcgcgcagcgtgccgatgagtatgaagtgttcgagcagcgcgtatccgaggatcacccactgctgccagacgagtgcatcgaagttcattcctctcctcctgcttcctcgacgatggtgacgagcaggatgggcacgacgatgaacgcccaccacgcggccagaccgttgccgagcgggtgcatgcacgcctcatgggtgaacagccacacaatgcagacgacgaacgatatgacggtcaacagggcgatggtgtacggatagcgcttgaacatgaccgccgccttatttggtctggacgagcgtgtccgcgccgtcggggacgacgacgagctgatccgcgttggacaatgcgtcgatgtagtgctgtttgagcacgttgtcggtcaggctctcgttgagcacggcgttggcgtcggcctcgccctgcgccttgatcttcttcgtctcggcctcggtcttggcgacctgctgctcgttcaacgccttccgcttgtcgatctcggcggcctgcgcctccgtgtacttcttggtgatggcctcgccgtagcgcacgtcctgcacgctgacctgttcgacggtcaggccgatcttcttccacttcgccgccagcgcatcctgcacggccttcgtgtactcgcctcggttggtgagcatcgtcagggtgtcgaaccggccggactgttcgcgggccactgaacgcaggtcgttgctgatgtagttctgcgtgaacgtctgctgtttgccgtactccgagtacaggtattcggccgcgctcggatcaaggctgtagttgacttggacgtcgatgtccgcagaagcgccgctcttgtcgttgacggcgacctgcttgccgaccgcgctgccgccgtcgtacttgtaatcggtgtccttgtagaagttgatgaggttgttacgggtgtcgtatttgatgacgctctgccacggcgtcttccaatggaagcccgcgtcttcggaatggccggccagactgccgcccatgttgcggatgaccgcgacctcgcccacgtccacggaatacaggcatgcgggaatgagcagcagcaatccgacgaggcccggaatgaggccgatgccggcccccttgacgtcgcgggacatcgcgacgcaggtgacggcggagctgaagagcagcaggatgatggagatgacgaaccagatcatgagggttcctttcagaagataaggccctttccccgtgccggtaggcttgaagctgcaacacaaacaatccgctgcatgcggggaaaggaagtattcaaatgggtggagctgcaagctgggcgagctcagcggaaacgaagttcaagcaggctcaggcaagcgctagaaatgcctatgagtcacggatgaccgagggtctagcggacatcgcccaagcgttgttccaaatcgacttacggcttgaccggctcgaaaagaaactggacggtcggggttgagccttgccagtttgcgctcgctgatgacgtcgtggcgtatgtaaaggctttccatgttgagctgtgcgccacgacgctcataggcgttactcatttcactacctccggcacatatccgttgtggtcgcgccaacggccgtcggccatgtcgtgcagccatgacgccagacgtccggcttccgtgacggtcagggcgatatgcccctctcccctgcattccatgaaccggatcatggtcgagtccacggtggcgctcacaccgatgcgcggcaaggcgtcgtcggccttctcgccgacccagttgcgccgagtgtcgatcgcattcgccaagaccgccgcctcgtcgcgggacagcagggcgatcgcgccgccagtccccgttcccgcggggtcgcgcagccacagacggatgcgcacgccaccctcgtcggatagtctcggctcgcacagcagcggccggccctcgctctccaggtttatgaaaaaggtcgagttcctggccgcccagtacaggtctttcaccttcatgacgccaccccctcggcttggggagcgtccaccggccacgggtcgagggtgcggcccatgaggtagtccacggacgtgcgcagaagtctggcgagccggtcgatctcgtcggctgtgaatgggatcaggccggctttcctgtcggcgtattcccgtgccgtcaggccgatcgcgtcggcgagctggttccggctcagacggtgcacccgtgcgaggtcgtcgattcgttcctcggtgacggtggtcttgtggcccatggttattcctccatgcttctgatccagcggtccatcgcgtcgcgcgtgaccatgcgtttggttgatgacaggccgtagcgggtgacggcggggaacgtgtcgaggtccttgttgcggatggcgagcagcacgcccttgtagtcgagcgagtacacctgcgcggcctgcgccggcgtccacgccagcctctcccccaacggcacacggctcatgtccttcaaggcatccgcgctcatggtctcgatgctcattgctccaccaccttctgcgagcgcggcaccatcggcacgccatcggttagacgaaaaccagaaacaatcttgatgatttccagcgctgatggagtcctgccattgaccagttctcggtaacgttcatcggttagaccacacgctgcaacaaatgctgcatggctgagattgcggctttcttctaatgaggcaaaaaacttcggggaaatcatcagcccatccatgtctcactccttaatcatcgtgttcaactttctaaacagactgtaccatagatgaaacagttgtcaaaccgtgtttgatacggtatgtttaataaatgagacaagcagttaggaggtaaacatgagcgcattcacaaaatggattgaagagatcagcagcggcaatatgagcaaccgcgaaattgccaaaaaagtcggcatgacctctgcgacgttccatcgcaaatggacagaagatgccttcatctccgacgacgccatcgccatcgctagggctttcgatcgctcgccaatcgaagctctcgtcgttctcggatcactgacagaggaagaagctcaaaaagcggaacgtggatactccctctccgaatacacaaccttggaactgagtcaggaattacttcggagaattcaagagagcgccaaagttcctgcttatttagacaaaccggccgatgaggccgccagagacattctctaaccaagcagcaccccgcactttctaatgtttgcgagcgcggggtgttgttattgtttgtgttgttgaggtcgtgcggtgtggctcggcttgttatttgaggaggttggttatggcgaaggctgcgtataggcgtgggcgggataagctgcatgggacggtcgtgttcaatgtcggcgtcaatgcggtggtggtgcccgatgatccttccggtagtcggcgttttggcgcgtgtagcgtggagagcgttcctcagcccaaggggcgtaagccgcattttgttttgcgtgacagcaagggtggggtcgtgttcgaggtcggggcgcaggcccgtgccgcgtatgcggccttgcagccgttggagggttgtaaggtgcggtcgttctcgtgggagtggaaggcgtcggatatcggcgcgggtgcctatctcagttgcaggctcgtcgagggcaaacggaagattgcggtggaggaaccgatcgaacgaatcattttggataccgagacaacgggtttgcagccgcagtatgacgagattctgcaactgtccatcatcgacgggtacggcaatgcgctactcaacaacctgtaccggccaaaataccacgattcatggccggaggcgcagcgtatccacggaatcagtcccgcgcaggtggccggcaaaccatccatagaggatgacctgcaaacagttcaggacattttagaccgggcgcagcaggtatgcgtgtacaacgccgacttcgatctcgcgttcctcggacagctgggctttcggctggacagaagcaaagtcgtggacaccatgcgcgagtacggacgccggtaccattccacgccctactacaggctggagaaagcggcggcggaatgcggatatcgatatcacgcgcacgacgctctggaggactgccgcgcaacattggcggtgcagtcgaaaatcgacggaaagccatcgctgtggcgcaccgcccagacatcccttcattcctcccataccgccatgaccgaggaagatcgcgcacgaatggaatccgtcgtcagtgcggcgtgtgcatacgccgccgcgcggtcggatgaaacgccggcgagcgccgacgcaaagaagtcgccggaagccggccagtcagttaagccgatgccgaagacgttcgagacgtctgccggcaagccggtttcgcggctctattattggtcgttcgtggtgctggtgtgcatattgggcgtattgtccgcagtgatggcgcttgtctgcatcgttgccccgtacatgctcatcatggcggttccggccatcctgttcaccatttggggagtcaaagagtgcgggcgcatgaagaagcgcatacgcacgaagcgtcgcaggcattagcatcgttctcgtcttaacaccgaaaagccccggccgcttgtcttgagcgccggggctttttgcgttttacgctgcttcgtcgatgacttggacatcgatgacatccgtgtcgtcgtgcaggtcggggatggcttggccgaggagtttggcgaggctggccgtgtccctgtgggtgtagtggttggtcatgctgatgctggtgtggcccatgatggcggttctggcgtcgtcgggcatgttggcgcgggctgtcatgctggccgtccagtggcgggcgctgtggatggtgaccgacggcagttcggcggcggcgagcgccttgttccagttatagcgttcggtcgagctgcgcacggggttgccgcgcgagttggtgaagatgaggtcgcgcggtttgaggccgaggcggtcgatgcgggtgtgcagtcgctcccataggctttcgctgatgggcacgaacctgtgggcggttctggttttgggtgtggtgagccacaggatgccgtacaggtgctcggctttgagccatccgggtatctccacctcgccgggcttgccgtattcctgtatctgctggcatacgttgatgccgggcacgccgtcgcgccgctccagctcgtagggcatgagcgcgtaccgttcgccctccctcatgccggcggcgaacgcgagttcgaacagcagcatccaggattcgtccacgtccacggtcagggccgggccgcggcgtttcgctccccggttgggcactgcctcgatcagctgtttcggctggtcgggcgagaggattctggtctcggtgggctccacccttggcggtctgaccctgcggcacgggtcgatggggatgagctcttcgagctcggcctggtcgagcaccatcttcaggctcacgaagtggtccttaagcgtggagggcgcgagcctcttggacagcacgcgcatgcactggcggatgtggtcggcggtcaggtccgtgagccggacgcagccgatgacctccatgcacgcatgaatcctgccggcgcgggtacggtacgtggtgggtttgacgttgagtcggtattcctccagccaccgctccgcgtaatccttcagatacggcgacttggctccgggcagcaggccggtgcgctccatctccgcgatcctcgcgtcgaaccgttcgcgcgcgtccgccttcgtgcgacccttggccgagacgtagcggcgtttgcctgtggcggggtcgcggccgacttcacgccggaactcccacgagccatccttgcggtggatgatgcttcccgcacccttcgtgcgtcgtctgccgttcgtcgccataatgttcctcccttgtcgggagcgccttcgagcatccgctacaagcgccctcaaaaagggcactctattggcacactatccgggccacaaacggccagatacggggcataatcggccattcttcaataatcgaaaaacggcgcgattccacagttccgaagactcgaaaacattggaatcacgccgttttctagagtgctcacaccctatttggagacgttgaacttgaactccacaatatctccgtcggccatgacgtagtcgcggccttcctgacggagcttgccttcctccttgatcttggccatggagccgtcggcggccacgaaatcgtcgtaggagacgatgtcagccttgatgaagcccttttcgaagtcggtgtgaatcacgccggcggcctgcggggcggtccagcccttgtggatctgccaagcgcgcacttccttgacgcctgcagtcaggaaggtctgcagtccgaggatgtcgaagcccacgcgggccagttggtcgagaccggactcgctcaagccagcgtcggccagcatttcgcgggcgtccgcctcgtcgagctcggtcaggtctgcctcgaactgagcgttgaggaacacggccggagccggggccacggatgcggcgagcttagcctgcaggtccttgttggccagctcgttgtcgtccacgttgaacacgtagatgaacggcttggcggtcatcagatgcaggtcgtagacggaatccttgtcgaagcggccttcgcgtgcggccttgtcgagcgtctcgccggcttcaaggatggtctttgcctgcttgactgcgtccatgtaggccggctcgatcttcttgcccctcagatccttctccagcttgggcagcgcgttttcgatggtctgcaggtcggcgaggatcagctcggtgttgatggtgtcgatgtcgtcggccggatccaccttgccgttgacgtggacgatgtcgtcgtcctcgaaggcgcgcacgacctcgcagatcgcgtccgcctcgcggatgttggccaggaacttgttgcccaggccttcgccttcggaggcgcccttgacgatgccggcgatgtccacgaaggtcaccgtggcgggcacgaccttttcggtgtggaccagcttggccagcacgggcaaacgcttgtccggcaatggtacgatgccggtgttcggctcgatggtggcgaacgggtagttttcggccagcacgttgttgcgggtcagtgcgttgaacatggtggacttgccgacgttgggcagtccgacgattccgatagtaagagacatgattccagtctagggagaagctggacacattgaacgtgcatgtggtgaaccggccatatgcaaaggcctccgagcatacggctcgaaggccttgactgtgatatgcgaatatacgcgaactctgattggcagtcagccgacgatggcgtctacggcgtcgatgaccgagccgcggaaaccgtccttttcgagctgggcgacgcccttgatggtggtgccgccgggcgagcacacggcgtccttcatggcaccgggatgggtttcggtggccatgtagagcgcgccgacaccttcgaccatcttggcggcgagccggtaggcggtggctcgctgcagaccgtactgcacgccggcgtcgcccaaggcctcgatgtacatgtcagtgaaggcgggcgcgcagccggccaccaccatggcgatgttcatatgcggggtgtccacgcgctcgatgaggctgatggggccgaatagctgctcgaaggtttcggtttcgtcgtcggtcagggtgttgacggattcggtgacgagcacgcccttgcccacggccatcggagtgttcggaatggtgcactggatatggatgtccgaagagtcgacggattcgccgtcttcggtggtgaacaggtcctggtacttcttgagattccagccggcggcgatggagacgacgatcttgcccggcttggcaagttcgtcggccagcggcttgacgacggcggcgatctggtagggcttgatggcgatgatgaccacgtcggcggccgtcaccacttccagcgcattgtgcaacggacgcacgccaagttcggcggtggtcttctcaagcttgtcgtagtgggcggcgcaggcgaccatctggccgccggcgaccacgcccgcgtcaacgaagccttgggcgatggcctgggccatgttgccatatccgataaaaccgatggtgaggttctgagtcatacgttttcctttcgtgcatgtatacagagctccctcatcagagggagcttgcttccttgagtcagaacagttcttcgaggtcgcctcggttgagggcttcggtgtagagatgcttgaagacgagcgggccgtgcagaccgtcatgctcgaattcgttggtggtccagtagtggctgttgcccacgcggctcaaggtgtcgagctgcaggccggaatcgacgtacatgtcgtcgaagtagacggcggcctgcagcggcacctcattgcgggccagctgaccttcgtcatagatcacgccgaagtgcgtgtcttccatgagcaggtccatggccggcttgaacgggcgcaatgcggcctcctgttcgaacatccacgggaacatggcctcgccggtgaagttgagcgggcgttcatcagcaccgaattcgggcttgccatcgcgcacgcgctgggcggcccaacgaatgggctcgtcaagctcgccgttggcgtagatgaattcctgcagcggccagtacagtgggcgcgacgacgtggcgttcatcactttggtcaaaaattcgtcagacaacggcgagtcggcagaagcggaaccatcgccatcaaggaaggcgtcgtcaagaatccaatggacacgctcgaagctcggcttcatgccaaagtcggatcccaagcactggaagcgttcgacggtgagcgggtcgccgttcggcatcagcgggaagccgtgggcggccatgccggcgatcacgccaagtcgatgctccacatcggtaccagccatcggattcagtacggaatcggtgagtttgccaacgaattcggcgacttccgcagtagtcggcaacttgtcggcgatggcggccacgcgctccttgtcctgtgggtagcgctcgtagaactgagtcgtcttgcgcaccatgcgcgggaaggtatgctcgtacacttcagcggcgtcggccggcacgtgcgggatgccgccggtggtgaagctggcgattacgccggccgggaacagggacagtgtggtcagggtcaggaagccgccgtagctttggcccatcgtcacccacttgcggccaccgaattcggtcaggcgcagatgttcgaagtcacgcacgatggaatcggcaaggaacttcttcaggtagtcggcttgggctcgtgcgccggccgcggcatcatcgtcgtgcgcggcggcgatgcgggccatggcgtgcgtgtccacgcgcgaggagcggccggtgccgcgctggtcgggcaggatcacccggaagtgcctgatggcctcctcgatccatccgtcggaggtcgggctgttgaggcgcgggccggcaccgccgggaccgccttgcaggaaaatcagcaggggcaggtcgtcatgcacgtgttcgggcgcggtgaccacgcgatagaacagtttgatggtttcgccgtcgaacgcttggcctggctcatggccggtccagtcgagcggaacatcgatggaatggtcctctatggccagtccgggcacgtagtatttgctcagcattgtcatggttcaagactctagtccataaatcctcctgaagagtgataccggttcgtcgccggacacgctagccttgcgcgttatggagattatggcgcgcgtgagggcatggtgcgcacgggagtcgacccgcacactgctatgggacacgttgctcgccgcagcgctgatcgccggctgcgtgccgttcatcggcgtcaccagccctgattcgacgggcggcatattgtttcccgcaactcaggcgtcgatgacgctgtggtcgctgccggtcttcgtgccgctgatgctgcgcaggtattgcccggagccggcggcctggctgttcgtggcgctgaccatcacgcatcttgtgttcggcccggcgatcatgtatttcgatttctacgccctgatcatggtgtattcggtgattctgtatggcaatccccgacattcctggcggttcatcgtcacggcgttcgtcatgggactggtcgcggcgacggtctggtcggtgtctttcaacgtgggtccgctgttcgccggaccttcctccggttcgcgcgtcatccgcgacggctggctgtccgatgccatcatgatgcccacatgcccggcggtcaccggcgtcgtgggggcaagcggcgccgtcaactgcggggccaagatgctcgcggacttcggcatggaggcggcgttcatcgaatcgagcgtgctgagcgtcatcatcatggccttgtggcagcgagcgcgcaacgccacgctggcggccatgcgagagcgcaacgcttccattgtggcgaaagaggccgaggagacgcgcatcgcggcgctggccgaacgcgcacgcatcgcccgtgatatgcatgatgtggtggcacatacgctctccacgattattgtgcagtcggatggcggccggtatgcgggtgcgcatgatctggccatcgccaagcacacgatgggtacgattcggcatgaggccgaacgcgcgcagcatgatatgcagcgtctgttcaatgtgttcggtgcgagtggcagtaccggatatgccgacatcgattcgctgtttgacggtcatctggtggtgtcccggcatatgaccggcaaagcgcaacctgaccggctgtccgccgacgcggaaaccgccgtgttccgtcttgtgcaggaagcgctgaccaatacgcgcaaacatgcgggcgagggtgctaaagccaccatcgatgaaatctggtcaaacgatgtgctgtcgattaccgtatccgataacggccgtggcgcgacgtctgcagcagacggtcataagcccggatacggattggttggtatgcatgaacgcattgagtcgttgggtggcagcgtgcaggccggcccagggccgaatggtggctttattgtggcggctacgattccgctctcccctgccgccccacagtctggcaccgatacggaggatccggtgctaaccgttatctcgcgtatacgaggattgatggatcgggcgcgccccaaagtactcgaccaaggagatacgcgtgagtcgaactgggtgggtcgatttgcgcagtggaccgagcggcactatcttctgatggacgttatcgccactatcgtgctgattgcgctatttgattccgccacgtatggcgatttgcaaatgatcggcaatgccccgtattcgccgaaccgcgtgccgactataacgctgacgattattatgctctcgcctttggcgttccgtcgccgcttcccagagggcagcgcgctggcgatggcggtgctgtctgctgtgcaactgttgttcttgccatcgattttgaccatcaatatgtttgcgatggtatccgtgtattcggcggtattgtatggacgagagtccgcttggcgctgggtgagcgtggcgctggcagccgattcgtggcttgcgggcatcaaggtgatggctgggtggaatggatacagtcagctgttccatctgtttttgcccgatggtagttccatgctctcaaaatggaggctggttttgtccggcttgctgccgggcgcgggaatcatgttggccggttttgcctgcattgcgatggctcgatggagccgttcgcgtggcgcaaacgctctggtgctgttgcgacgcgaggaggcgctgcgagccgagcaggagcggcaaaaggtgctggcggccaacttagagcgcaaccgtattagtgcggcgatgcaaaccgaagtactgaccacgctggaatcggtgattgcgcaggctgacgagggactggtgatgctcaacgccgaacctgcgcctgatagtatgcagattgaagcggcttttgctgcgattggtgctcgggggcgcgccgcattggctcatatgcgtcagctgttgagagtgttgcgtgaaaccgggttcagcgacgaggcccatgagggtgtgcagccggatatgcagttgcgaccggcggcttcgttggatagtcagatgcaacacgcgggaacgttaccccggtgagagacttgcccaataagaactcagggaacaatcagggtgtttatggagcggcgctccgataggaaacggatacagtggagagcatgaacgagagcagaagcattcgcgtgattattgcggacgaccaggagctggtacgtgccggttttgccatggtcattggttcgcaaccggatatggaggtggtcgggcaggcgtccgacggcgcccaagccgtggcgttggcggaatccctgcatcccgacgtggtgctgatggatgtgcgcatgcccggcatggatggcattgaggccacgagccgtattacctcactctccgccgcgccggacaacgcggccgattcggccagcccggccgccgacgcgaccgtctcggccgaatcggctgacgaccggccgacgcgcgtaatcattctgacgacgttcgatttggacgagtatgtgatggcggcaatcaatgccggcgcctcgggcttcctgctcaaggacaccgaaccggaaacgttgctcaattcgattcgtactgtattccaaggcaatgcgattatcgcgccttccgccaccaagcgactcatcgaaaagatgatgcaggacggttacgcgcagcatggttcgctgaccggcgatgtcgcgcgctccggtgccgtgtacggttccgccgtcggcgtctctggcggtgcggccggcaacggtgccggctcgatgaccggcatcccctcccctgccggggccgcttccgacggttccaatacgtcacgcccagcatacaccgatcccgaactggatctgcttaccgaccgtgaacgcgaggtgctggtggagatcgcccatggtctgagcaatcaggagatcgcggacaagctctttatctcccttcccaccgtcaaaacccacgtggcgcatatcctcgccaaaatcaacgcccgtgaccgcgtacaggctgtagtcttcgcgtacgataacgggctggtgtaacaaaaaagctccctctgatgagggagcttattgctctacgcttcggccaaggcttcaactggtggcgttttgacggcccggcgggcgggtgccacgctggccagcagagcggcgagcgcggcgacgccgagcaccacaccgttggtggcccattcgaacgggaacacggtgtcgccgtacaaactaaacaccatgtaggatccgagccagccgaacagggtacccaataccactcccaccacgccggagacgagcgaaagcagcaacgcctccaccgccagcgagcgccgcagttggccgcgcgtcatgccgatggcacgcaaggtggcggattcgcgtgtgcgttcgatcaccgacagactcagcgtgttcgctacgccgaccaaggcgatgagcacagccaccgcaatcaaaccgaccaacaatgccatcatgccgttgatcatggtctcccattgcgtacgttcggccaccggaccggtcacggtaacgccagcactggcggagaacacattctgcacgttggtgaatacgtcgttcagcgcaacacccgcgccctcggcgtcaatacgcataagcatgatatgcccgtcggccttgattccaccgttggtgaagtggctggcgtccacg

SEQ ID NO: 3433 - DNA, 10080 bp, Unknown
  R151_18m  MAG No. k141_50090
cgaggtccacggcacgatgcacatgatggccacgagcgcgcccacgtagaagatgagcacacgcacgatgatctcgttgacggctttgggcagcacctcacgaggattcttggtctcggagacggtgacgcccacgaactcgagcagctcataggcgaagaacaccatctggaagctcatgaggaaggccatccagccgttcggggcgaacgagaagccggagaacaggttgtcgcgtccggcgtggcccgccgggctcacatgatccacgccatgaatccgcgcggccgggtaatggtagccgatcacgatcatgaccacggcggtgacgatcatcgcgccgatcagcgtgatcttgatcatcgagaaccagaattccacctcgccgaacaccttgacggcgatcaggttgacggacaccagcgacaccaggaaacacagttcgatcagccatttccaatgggtcaggtcgatgccgaacgtgtcgaagaaggtgatgaagtacgtggagacggccgtgatctcggtcatgcccaacagcacgagcgcggcccaatacgtccagccggcgaaatgcccccatccgttgcccaggtagcgggtgatgaaattgatgaaggtgtgctggctggggtcacggtacatcatctcgccgatggcgcgcatcaggaagaacatgatgacgccgaccaggatatacacgaagacgatcgaggggccggtcagcgccagcgacttgccggaccccaggaacaatccggtgccgatggtgccgccgatggcgatgaactgcacgtggcggttgttcaggccacgctccatctcgttggtccggtccaggctttcgacagacttgagtttgcccgtagcctgccgtgtaccaccattcacattcgtatcggccatactgatttcatttctcttctccgccgcccgattgttacgcaccggacgcgatactcgttcaaaacaagttcggactgtatcaccgaaatatgtcgtgaaaaccgctcagctcaagaatacatgcgatgatactgtaaatattcagccaagaagttcaatttaccaacaccaaattgaacttctacctctattccacggacttgagcgagctgaccgggtctacgcgatcgagcactgggttggtgaacagctgcaccagcagcgcgaacgccagcgtcgccaccacggcaatcgcatagctgtaccagtgcacttccacttcgaaatacagcgacggcatattcaacgcagcagtcagtaatccgcctatccacctgccaagcggcagaccaaccaccacacccataccggtcaatatcatcatctcgcgattcacgtagttgtgcacctcgcggtcatagaagcccagcaccttcagtgtggccatctcgcggatgcgttcggacacgttcgtattggccaacgtaaacagcaccaccagcgccaggccgccggcgagccccacaatcagcgccaccacggcacccatcaaatcgaacttaaacgtggcggccagatgcgcacagctcacggccttgagcaccgacgattcctcgcccaaccgatccgcatattcggcctgttcggtctcggaacctttcagcttggcgagcatcgcgttccacgtcaaggtcgaggcagtgccatctcccgaagccgaagacgtcacaccgccggccgcaaacttctggtcgtacagtcgctcactgatgtacacatcagagccaataagattgcgcgtcacggccgtgacctgcaccttggcccggctgctaccgccattgcccagcgtgacggtgtcgccggcatgaatattcagcgagttggcggcggactgcgatacaatcacgccactatcgtccagcgctacagtgccgccacccgctttgccgaagatattgggcagcccaaaccatccatcatcgccggcttgttccagcgtgaccatatcgttcaagatattcagcgaatcgttgggcacggtcatcagctgcacggtttcgctttcctgcgccgcattgctcatctcgccactatccacgcgcagattcagcgtttcggtggtttggccatcttgtgccacctgcttgcgcatcgcggtggcgtcatcgtcattggccacgaccatcaggtcgtactggtagatctgctcgtattgtttgacgccaatcgtgtcgacggtgtcattaatcgcaaatccgcagataatcaacgctgtgcaaccggccacgccgcccacggtcataatcaagcgcgacttgaatcggaagatattgcgcgcggtgactttgccgaggaagttcagccggctccataccgggcgaatccgctccagcaatatgcgagcgcccgctttcggtgccttcggccgcatcagcgcggcgggcgtgtgccgtatctcctcgcgacaggcgagcgcggtggccacgcccacgccgaccacgaacagcacgatgccggccgaaccgtacagccagtcgtattcgagtcgcacaccgggcaatatatacagtccctcaatcaccaccagcaggaatgccgggatgccaaggaatccgaccagcagaccgatgccgccgccgaccaagcaggcgagcaacgcgaacagcagataccggctggacacggcgagtccgccatagccgagtccaaggtaggtgccgataagtccgcggtcttcctcgaccatgcgggtcatggtggtcaggctcatgagcacggcgaccagcaggaacacaatcgggaatgcgcggccgatggattcgatggaactgacgtctgatttgagcgagctgaatccgtcgatcgaagcgcgcgtctgcacataccaacgtgcgttggccacatcgtcgatgcgccgttgctgcttggcgaattcgctttccgcttcgcttcgcttcgcatcgagttcagactgcgcatcatccagtttcgccttgccgtccgcgagctgttgttcgccttcttccagctgccgctcgccttcttcgagctgctgcttgccgctggccagttgggcggcctgcgcttcaagttgcgccgactgggtttcgagggttgcggcattcgcttcgagttccgcggatttggtattgagctgtgcctctcctgcagccgcttcctgttccttggcggtcagttgcgcgttctgctggtccaaggtggattgtgcgggggcaatggtttcgtttaatgtgcgctgcaaatcggctttctgctgggtcagactgtctcgctgcgtttgcagttccgtttgcttggcggccagctgttgccgcagctcactgattgacggcacttcaggcagggtaatgccaaggcgcgcgagcagttgcttgatggcctgccatgtgggtgagttgaagtcgatattcgggtcaagttgcgccagtagattgtcggcctgttgaatcatggacagcatctgatcaatttgtgccacgccttggtcgatttgggtaatgccctgttcgattttcgtgcgattggcagtcagttccgtttgcgccgcatcgagctgtttgcgagccgaggtgagctgcgctttgcccgattcgagctgggtgcgcgcttcggctatctgctggcgaccttgcgcgatctgttgacgggccgatgcaatctgcgcacgtccatcggcgagctgccgttcgccatcggtaatggttgtcctgttgttctccaattcggtacggctatctcgcaatgtcgttttgttggcttccagctcggcccagttgtcgtcgatctgcttctgggcttcgtccagctgatcgttggcctcgtctttggcatcatccagtttgcgctgcgcgctggagacgatctgttgacgacgggctttctggcgtgtggcctgtatctgatgttcgatacggtcggccacggttttgatggcttcatcgtaggcatcggaaaacgtgtcaaaatcggacgcaccagtgacggcaaccgatatcgcagtgtatatattgccggtcacgccgtcgccgggtgcaaagaacgtatagtcctcggatgaggtggaccggaaggaggtcatgcccgaatagccgtctggattgctgaggtcgcgcgggtcgagtacgacgccggtgatggtgagtttcgtggggaactgcggggattgctcggcgtcggcgtccgtattggcgtcggacttcgcatcggatgccgaggcattggcggcgacacctaccgtatcggcattattggaatcgtcagtctccgtggccgctaccgatatgacggatgaagaggtgtcttgtggcgtcacagtaatggtgccgccaatcttgagtccgctatcgttcaggaattgctgcgtaaccgccacttcgccggccttgttcggcagtttgccctgccgtatgtacggctgatcaagcccttcggtaccgatttcctgcatggtcacggttttcttggtgccgtccaccaacgtggtcaccgtctgagaacgttcgggctgcacggtttgcacaccgtcgattcggcgcagtgccgttgcatcatcatcggtcaggccgtatgtggatagcacctgcaggtcatgcagtccctgctgatcgtaaaaacgaccggccgccagaaaagcatcgcggcatccggcgtagatgccggtcagcacggccacgccaagcagcgtgatgacggcgatcgagacgaacctcttccagctgcgcagccagcaacgcaacgtgtctttggcaaataccgcagaaacgcccgctcctcgaccgtcgttatcgtcgaggttcggccgtttcacagactgtttcacaggttgtttcacgaatcgcctcgcttgtttcacggggcgtttcacagagtgtcttgcagtgagcatcgccaattacctaccattcgatatcggcgatgggccgcggcgttgcgttgacctcctcgctggtcaccttgccggagcggaagcgaatcactttgtgagccatcggtgcaagcgcggaattatgcgtgatgatcattacggtcatgccttgtgtttggcaaatatcctgcagcaactgcagcacttccttgccggtctcgtaatcgagcgcaccggtcggctcatcgcacaacaacagcttcggctttttggcaatcgcgcgggcgatggatacacgctgttgttcgccgccggacagttgcgcggggaagttgtccatcctctcccccagtccgactttgcgcagcgtttcctctggatcgaaatggtcagggcagatttgcgaggcgagctccacgttttcgagcgcggtaaggttaggcaccagattgtagaactggaagacgaagccgatatcgttgcgccggtaggtcaccagttcctttttccgcagacccgtaatatcgcgtccgccgaccactacgcggccggttgtggcggtatccatgccgcccagaatgttcaatgccgtggttttgccggcaccggactgccccagaatcacgcttaattcgccttgttcggcggtgaagctggcctcgtcgagcgcgcgaatcacactgctgccagaaggatattccttgaccacatggtcgaattcgatatacgccatcgcacacctccaacgcgctcgtggcagccacctagccccataggccccgccagaacttcctgctatactcaagtaaaacaacactgtgtcggttctgcaaccaacagttggattgtgggttgtcggaacttggggagaaggccatgtccaaagaattgacggaaagccgccgcacccgttacacgagacgtgccatgcaggacgcgcttatcgagttgctgcgcgatcagccgctcggctccatcaccgttaaagcgttgtgcgagcgggccgatgtgaatcgttccacgttttacgcgcattatgcgagcatcgaggaactgctgcacgacattgaagacgaaaccatggcctgggtcaccaccgcactcgaacagctactcgcccagccagatcctgccggcatcgagcatgttattgagcgcatctgccagtacattgccgacaatcgcaatcatctccaagtgctgatgagcccgaaagcggatatcggtttccagcagcagctgctgggattgatttacagccagcgcggtgtaggcgaacagttgcaatcttcggcgggttacccagccgaggcgcagatgcgtatgcgattcgccgtgtccggcagcattgggcttttgcaatattggctcgccaccgatctcgcggcctctcccgaatcggtgtcccacaccatcttcaccatgtgtatgcctgccacgcagtgagcacagtgaattcagtgaactcagtgaactcagtgaagcgtgcggtttcataagcatcgctcgctatagcttcgcctgctcaccggccgcgcccacgcccgcgcttgcaatagcgcacaaatagacgattgaccatttctgagacgatacggcggcatagaataacgaacgttgcgcatcacggcaagccccgcgtgcgccaaacccaagaaatgtgagagaagagcacaatgagtactactgatgcgcctaagaagccgcgcgaaaccgacgacgtgccggtgccggccacgctgcgcaagtcattgaaaaaccgccacatccagctgattgcgctgggcggcgccatcggaaccggcctgttctatggttccagtgaatccatcgcgctggccggaccctcgattctgctcgcctacttggttggcggcctcgcgattttcgcgattgtgcgtgcactgtctgaaatgtccgttgaggatccgaaggcgggcgcgttcagctactatgccacccgctactggtccaagcgcgccggctttatttccggctggaactactggttcaactacatcctcgtctcgatggtggagctatcagtggtgggttcgtttgtgaactactggttcccggcgattccgacatgggtatcggcggccgtgttcttggtgatcatctgcgccgccaacctgctgggcgtctctaaattcggtgagttcgagttctggttcgccatcatcaagattgtggccgtgatcgccatgattatcggcggcctggccgtcatcatctttgtcctgcccaccgcatccggcgtgcgcgcaagcttcgcgaactggttcaccgtgggtaacggcttcttcccgaacggcctgatggggcagaattccgacggttcctggaccggcctgctgatggcactggttgtggtgatgttcagcttcggcggcaccgagctcatcggcatcaccgccggcgaaaccgaggatccgaagaccacgattccgcgcgccaccaatgatattatttggcgaatcctcgtgttctacatcggcgctctgggtgtgatcatggccgtagtgccgtggaacaccatcgatggcaagtccagcccgttcgtgcagatcttcgattccgtgggcattcacgcggctgccggtattttgaacttcgtgtgcctgaccgctgtgatgagcgtctacaactccggcctgtacgccaactcccgcatgttgtactcgctggccaagcagggcaatgcgcccgcttacttgggcaagctcaactcgcgcggcgtgccagtggccggcgtgctgacgtccgccgcgatcaccgccatcgccgtggtcgtggtgttcgtgtggcctgagttcgcgttcaactacctgatgtcgattgccaccattgccggcatcatcaactggacgatgatcatgctcaccgaaatgaagttccgtaaggtggtcgccgcgggcggcgctcccgaggattccgagctggccggtctgagcggccaggaggcactggacgcgattcacttcaaactgccgtttgccaaggtgaccccgtgggtggtgctggcgttcctggcgctggtcgtggtgctgatgtgcttctccaccagctaccgcatcgccgtcatcgccggcgtgatctggctggccatcctcttcgccgcctaccagctcactcaggcgaagaagtaaggctccatttgcgaatagctctcactgatgagcactcagtgagagctattcgcaaatgggatttattcatgaaacagctcatcgatgccgacgagctgaacgtcggattgagacgccgcagcatcgtcgaccagtgattgatcgaaaccgccgagcgaaaacagcaggtatgttcgctggccgataccggttcgcgcagcacggtctcgcagtagattcagcacggaacggtccaccggcgcattgcggaatttgcactcgcccacaatggcagcatcagacgcattgtcaacggccatcacgtctatctcatcctgacgatcccaccaacggccaaccgcacgcgcacggaagggcaaccgtccagcagcactctcacgccacatccattcacggcacagaccctcgaacggtttgccggcaaaatcatgtaataccggcttgatacgacgctcgtatacgccttccacatcgccccgctccaattccgaacgatacggaaagacaaacgaataccagaatcggaagaaattgtcgctcagctgatacagcccacgcgaacctttcgcccgctccttaggcttcgccgtgactgggaactcacgttccacaatccccagttccataagattggcgagatacgacgatactgttgcgtttgccatcatcgtgtgtgtcgcgatctcattcagcgaagttgcgccgagcgcgatcgcccgtatcacgctgttatatttcgcagtttcccgcagttcttcgtgcaacaaaaattcaacctcgctgtatagcggagcaatgcgtctcagaatatgccgcttgacatttgcgtctatggtctcatctgggtcaaattcctctaggtaacgcgggataccgcccagtattgcgtaggccagcgccttatcctcgctactatagttggggaagaattgcgctgcatcccaatatggcatcggcagcatcttcaggatgccggtcgcacgaccatatagcggcgatttttctcccaacagctccttttcgatgaagctcatggcactgccgcaaatcacaatcatcagatttgcatgacgcaacgtgtggtcccaaagattctgtagcactgacggcaatgacggatcagatttgaccagataaggaaactcatcgaatatcacaagcctgcggccgccatcgctcggctctggcagccgggttaactcggttaacgccctttcccaagaaggatattgactcagataatccttgcccggggcacccgcctcgaacatgagacgggagaacgatgccagctgttcatctttagtggcattctgcgccgcgaagaataaggtttccttgtcttttgcgagttgaataagcgtctctgtttttcccacgcgcctgcggccgtagacgaacacaagctgtgccctacgctcagtgaaacattcctgcagttgcttgaggtcatcgtctcgtccgatgaatgccatgctgcccgcctcctttatgccatacgccggcgtatttctatcgcatcacgatttattgtatcacgattagtataatcgtgattatacaagctgtgacgaggtgcgggtacgggccaatcggcatcgacgagaccagccgcaggggctacaattacatcaccgtggtcgccgatctcgtggagcacgatgtcatcaacgtgacgccgggcaaggacccggccacggtcgaacggttctcgcgtgatttcatggaccacaacggggtcccggaatatgtgcgtctggtcgcctgcgacatgagcctgggcttccggaagggcatccgtgagcatctgccccatgcgcggcggatcgtcgacaagttccacgtggccaggcacgccaacgaggccgtcgacaaggccgggaagacggaaggccgctccaacccgctgctcaaacggaccaagtacctgtggctgcgcaacgaggaaagcctgaccgaactgcaggtggagaccaagcgcaacctgacgaggcaacggttgaagaccggccgcgcctgccggatgcgcgaggtcctgcaggacatccacacggacagccgcaccccgtccgaggcatgggtgcgcctgcatcg

SEQ ID NO: 3434 - DNA, 18163 bp, Unknown
  R151_18m  MAG No. k141_50884
cgaaaccggacggatcagcaaacaaagccgcatcctgttcgtcgatgacggttccaaagacggcacctggagcatcatccgcaatctgcacgaacgcgacgcacacttgttcggcggcgtaaagctctcccacaaccgcggccatcagaacgcgctcctcgccgggctcatgaccgcgcgcgcctacggctgcgacgccgccatctccatggacgccgacctgcaggacgatgtgaacgcggtcgacgggttcatcgacggattctgcaacggcgacgaggttgtctacggagtgcgttccgcacgcaagaaggacacatggttcaagcgcaccaccgccgaagccttctacaaggtgttcgagtggatgggtgccgagacggtacccgaccacgccgattaccgtctcatgagccgcgagacgctcgacgcgctcagcgaataccacgaagtcaacctgttcctacgtggcatcgtgcccacactcggctaccagaccagcaaagtctactacgagcgcggcgagcgcgaagcgggcgaatccaaatacccgttgaagaagatgatcgccttcgcgattcagggcatcagctcgttctccacgaaaccgctgagcttcgtcaccggtgccggactgctgtctatcctggtagcgattggcatgttcgtgtacgtgctcgtctcgctcgggttcggccacgccatcgccggctgggggtccatgatgatctccatctggctcatcggcggactcatcatgctctccctcggcatcgtcggcgaatacgtcggcaaaatttatatggaatccaaacatcgcccccgttaccgcatcgaaaccacactgtaggaggggccggcggccagcggacggcccctcctacagtgcttggattatatctattttgtcctcatcacacgagtcaacgcgtatagcaatgccccctgcttgaggcagaaatgagaccgtcgccgttctcctgccttgctataacgaagaggtgaccattggcaaggtggtgcgcgacttccgtgcggcgctgcccgacgcggccatctacgtgtacgacaacaactccaccgaccgcacggccgaaatcgccgccgcgcccgacatggtcgccaaggtgctcgaaggctacgatatggtcatcggcgaccgcctctcctccacatacttccaggagaacaagcgcccgttccacaacttcggcaaccgcctcgtgcgcggctccatcaaccacctgttccgcgcgcacgtcaccgacatcatgaccggataccgcacgttcagcttcacgttcgtcaaaacctaccccgtgctgtcgcgcggcttcgaggtcgagatggaaatgaccatccactcgctgaacaacaacctgcgactctacgagatgccgatccagtaccgtgaccgcccacgaaggctcagtgtccaagctggacaccgtaggtgacggcatcaaggtcatgagcaccatcttccgcatggtccgcgaatacaagcccctccccttcttcggcggattgggcctaatcatcggcatcgtcggcattgtgctgtgcggcaccgtcaccttcgaattcgccaaggccggcgtggccacgcacttccccacgctgatcggcgcggtgatgctggtcatcacggggctgctgctcatcatcgccggcatcatcctcgacgtcatggccaagaacgaccgcaagaccttcctcattggcaccaacagattcgcatacaacaaaagacactgactaagcgccatatagaaacgtgatggggagcgcaacctacggttgttgtgtccccatcttttagcgtctagctcagactgtgaaaaacaatagaaaagcagaaagaacagcattgtggtatccatgccaccaaaactaccctaccgtcgtcaccgcctaacccgcttcacccacaccaaacagcgaaaggccgatttcttttatgcatcactactaccaccaacacctcacatatagtgggacatatgtctgatgcttccgatgcctctgatgctgtttctgctcctttgactgtgttctcacgagtggcggcgaacgctgcgtggaagcggtgattctgctgatgggtttcgtgctgattgcggtgacgcctgccgggcatattccagacgtatgggcgcacacatatcgcattgacggcatcgttaacggggatgtgctggctcggccggtcgactcgaccagcatcctgcattcgggcagcggcaatgtgggcgggtgcgtgagccgtgattggatccggttctccatcgaccattacgacggttacgatccggctgccgtcaatgccgattttcttgaacggtacggcacgggcagcactgcagcgggcagcggcacgaacagcaccagcaccgcaaacaccacctgcgtggacacgccctacaacaatgcagcggttaattcacccttcgcctatctgccgcaattggccgcctttgccataggagcagactcaacgctcacccctggcaccacatacgtactcgcggaagtaatcatgttgctggtgtacgccggttgtatgttcgccgccgtagccgcactcccccgctggcgcttgcctacggccctactcttggtctcaccgccgttgatcttccgctattcgttcgccatctcggccgattccatggcacaggcgctgtgcctattgttcgcgtgtctgctgttttcctgcatggccgatccgcgtgccggcaacggacgattgaccgcgctcatgaccgtaggcgtgctgatgggcatgtcgaaattcacgttcaccccgcttctgctgctgggattcctggctttgataccgtggcatagcgccgtatccaaatctacagccgtaccttccgcagtagacgctgcacgggcttgagcaccacggtatcggcaatcaccgcaaatagcagcgccgccagcaacgtagcgccaaacatcaacacgctgatacccgcatacgaccatccgtccgtgggcgcgggaatccgcgggccgatcagcaccttggacagcggtgagtgcaccaagtaaatcgtgtaggaatatccggccagccagataatcgccttacgcacccgcgccgacgtgatgtgcacgtcgtaccggaagaacaggaacgtcgccattaccaccatcgcaaacgcaaccgtgaccgtgcggccaacctgcatctgctggccggcgaacaggtacggcgtggcgacggtccaggccaggacgaatggtgccaacgcatacacaccgtgccgtatacgcgcggacggcggatagtattccaacacgaatcccaacagatagtagaccagcagtccccgccaggggaacgactgcaggaacgtcaacgggtatccggcaagattgcagatctgctcggcggcggccacggcggcggccagaccgatcagcagccaggcacccgaccggcctatcgcgcgcatcatcgcggccagaaacggcgtcgccagcacgaaaccggcaagcatgaacacgaaccaatagacggaatcgtcatacccggaaaacagatcaaacaacgttccagacacagcgccgccaaccgaacgatgatcaatcaccaggtaggcgacgaatcccatgccgcccgcgtacagcagatacggcacaatcagcgagataaaacgtttgtagtagtagcgcacgtacggcgcgaggctgctgggatcggcttggccggcaccgccgcctgccagggcatcagagccagagcccggcagacggcccgctgagtgggtgctcaccggccggtcggcatcgaatgtcaggttgaaccggcccgacaccataatgaacagcggattgcagaccatgaacaacgcgaacagcacggatcgcaccgtttccgcgctgccggcgagggtcatcttgacgggcatgtagttgttgatcacgtggacgccgatgaccaggcacatcgccaccacgcgcagcagatcgtagttcacgtcgcgcggcctgccggcgacgccggaaacggtggcgtcggaaacggcgacgccggaaacggaatcgggcatggtcatcacatggatcccgtcagggacttcagatcgaccgggcagctgatctggctcttcagcttgtccaaggtgtccaggccggccgagggatcggaggacgcgcccttatgcgcgtcgttcttgccgccgttcgcaccatcggcgccgttcgcaccatcggcgccgttcgtatcggccgggcactcatccgtcaccttaccgttggagcccgtctcgacgccatccgcattcaccaccggcgtggttaccacgttcagtggatgtgtggcatcgctgctgacccgaacggtataggcaatcgtcaattcttttccgggctcgatccactgctggttgaacataatgtactgacggtcatacaggctcgcggtgttggtaccccatgaatctatatcagcctgcacagcggtgatttcgccaccgtacggggcggtaagcaccacgcggtacagcatgccaccgagcactggattctccgagccgccattaacgaaatcaggcaacgattcggccttagccttagtcagcgtgttcttcatggtgaaggtgaccgtgtattcgtcaccgagctgatcttccgtaaactgacccagctgcgtgttacgcacggctgtcgtgatgcgcttatccagcacgccagaatacagggcgttccggctggccgaggcgtcgccgcaggtttttgtgaccgtggtggaggtcttcagataccaatcctgcttgccttgctgcagctccgaaagatagatgccggtttcaggtacctgactgtcagcagacaactcgccactggccttatcgtcgataagtccggtggcaatcagcgcctcctgctcatccggatcagccatccatagcttgaaatgaccgctagcgctggtatctctgattgccttcaacagcggggatgcggtggaagcattcgcgttgccaagcacatggttcataattgcttgagccgcttcggaaacgaagttgttctgctgctcgaagtccgggtaatccgtgtacaggtctgaagcgaagaacggcaccgtggtggtgccatccagcactcggccgtccgaaagcttgaccttgcctgtggctcccagcaatgcctggaggaatacgggatcgaatgacaatacacccgctacgttctcgtcttcgttgcctttctgatacagccacatgtatttgttcatctgtgccacacgctggaattcggggtcgatggtcgtggtggccgggtactggtcaaaagtgtcgccaaatacctggcgctccttcagcaccgtagcatccattggcttctcaggaatgtcccaaccagaagtggtggcgaaatcaccgatggtaatcgtgcccttatctgccgtgattgcggcgatggtgcccaccatgccgcccgccgaacgcagctcggccgggttctgcaccatcaccagatacgtgcgcttgccgtcctcgccaagcagttgcggtagcaagttaatgaggccatcgtattcgctgagcatcgaatccacggtcttgagcgcagccttttcggattcgagcacggtggccaccttggcgacgctcggagtcggcaccttgttgagcttggtgagctgctgcgagatatccttatgcacctgcttgacgatatccggcatatccatcagggcgctgacgtccaccgagccattcttcagggagaagccctgcaatcgtttggacaggttcagcagatcagtgaacggaccgttgaccaacgtatccacggaagccagcatttcgcgggcagcggtgatgtcgctgccaaatcgcgaatggtcgcggaagaagtcccactgcgggccgttcagctcctcgttgagatcactggtggcattgaccaactcttgggagatgtccgacagactcttatcgctgccgcagccaagtgccgaattggccagactttcggcggatgtcagcacacgctgcgcatccgtggccattctcgagacggatgccgcgtagagcgtgcccacacaggtgacgctggccagcaacgtcagcagcagtacaaccaccactcgcacccatatcggtgtacggctgatcagcgaacggccgtcgccacccacgtgctggggagtcttcaggtttacgggacccgtctgctgatttgcaacgctattcgtagatgcggagcgattggatttcccgttaccggcatggcggcttctcctacgccccacagccttatggctcgaatgccctgaagtgaatcgcatacttatcctacccgaaaatctgctcagctcatactcttatccaacggcgcaaggccacgcttccggatgccggactccgggcgaatccggaatcgcagacatgccggagcacacgtgacgccacgcatatctcatgccagtgtaccgatgccaccgaaatagaccgagggtttatcccataccgggtgcaaatcccctcatgaccaccacatcgctgtcagaatgttctcagacttcattgaggagtataacagtattgcgcaagaaaacggtcactaaacgcaacaatagttaaagccgtattgatttgttcggcttaggagaacgggagaggcaattagatgttcgtcctcagcaacgcctggcgggccctgacacgttctaaaggacgtacggccctgaccgcgttcatcaccttggcggtcaccttcggcacagtcgccggactggccatcattcaagaagataccaacgcacacaccaccgcgtacgatcagcagaaggccacgttggccattcgcccgactgcggctacgtggaagaaggtctccgctacggactcggcttccaccaagcattacatgacgtggacctcatacaccgaatacgccacgctcgtccggtcggccaccaactcgttgaactttacggttaccgaaaccgtgccggcccacgtgagcggtgatttgaaggccctggacggcggatcgctgggctcggcctccgatgatgagaccggcggccagctcatttggcgagccttctggaccgaggatgccgccaaggccagcgacctcggtaccttcgaaatcgtggacggcaaggacctgagctacgacaacaagtcctccaacccgaacaccaccggcgcactggtctctgaagcgtttgcctccgccaacaacctgaaggtgggcgatacgctcaaggtggcggccgcctcggacgcccagaccacggccaagctcaaggtgcgcggcatctacaagtacacatccgaatctgccgtcgccaatccggtgacggccgcccgcaaccgcgagaacgcgatcttcaccaactatcagaccttcgccaaggccggactcgacccacagtccaacgacaagaccgcctccggctgggcgatgccggatctggacgtggtgttcgacaccggtgatcccgctacatacaagtccttggtatccaccctcaagaagtccaagctgcccgccaagggatacgaggtgtcttccccttcgctggaatcctacaacgcttctctggagccgctggatacgctatcctcgcgcgcgaagaccggcaccattgcgttggttgccgtgggcggcgtgctgttgctcatcctcgtgctgtcaggcgtgtggacgcccaagcgtgacgacgagatcggcatggcactggtgtccggcgtcactcgcgggcgtttgggatggcagttcatgctggaagtgttcatcgtcaccctgcccttctacgtaattggtctggtcggaggcgcgttcgccgccaagccgatcggacctgctctggcatccggccatgccatcccggtgacatcggacctgatttggaccatggtctggtatggactgggttcaatcctgatcctggcgattcttgccgccctgcgccttgcgttcttcagcgcgaacaagctgttcgccgccgatggcgactggggcaccgtgagcgagaccgaggagattgaagcggccgaagccactggcgctgctgagaccgatgaagctgctgaggccaccgctcatgatgctggcgaggccaataagacgaccaccacaaccgacgatgcggaggcacaggcatgagcgacaagaataacgatcaggaactcgagaagaccactgacgcaacggctgacgaagtgacttctgagactgagacgaacgacgccattgaatccgttccagctgactccgtgcagttcagcgtgaccttcgatgacgttgatgacgaaggcactgttgacgatggtatttacagcgcactggcatctgccgaaaccggagcaaccgacgagaccagcgaggccgaagcagacgccatcgcttcggccaacgcatccgccgaagtgaccgagcgcaatgccgcccgcgtcaacgaaacactccgactggccaaaaccgatcacaaagacgcattggccgagcatgcggagcctcagggcaaagcggccgaacccaccatgacgctggcctcgcgtatcgatcgcgtgttggtgggcggcggttccgacgacattctgctcaagacctacccgacctttgccctgaacaaggtgacggtcgccggtcccaagggcaaggtcaacatcctcgatggcgcgaatttcttctgctactccggacacgcatacgcgctgctgatcagcgacgaccccgattcgggcatcaccgccgacgccaaacgtcgcgcgctgatgggcgtgatgagcggtttggccacgccggtgtctggcacggtgatgaacaagagcgccaacattgttgagctcgagcccgtggaactgcgcggccaccgtctgggcatcgtaccgcagctgcacgccgtgcagccgaagctcgacgccgaacaaaacgtgctgtacgccatggatgcgtccaaccgcaacttcctgaagcccaagccggtgatcgcccgcgaactgctggccaaggtcggcttctccgaggccaccagcggcgtggccgtcggcacattgcctttggtgcagcagcgtttggtggccatcgcccgtgcaatcagcaccgaggccgaagtgctgatcctcgacgagccgacacgagggctgaacgcggatgacgaggtgaccgtgttcgccgcgctggccaagctggcgcacaccggcgacccgaagcattgcgttatcgtgctcactgcgtcgcgcgagctcgctgaagcagccgacacactcttcaagatctgatctgtccggcagcaatacacaccagacacaccagcacaggctcttgaagctcacgatgttcggatacataccaaacatcgtgagctttttcgatttcgaggggctgatttgcgtgttccgggaggtctacttccgtttcaaggggctggtcatccgccaaaccccgagtataaacggcttcatgccaacgtcattccgccgtttttacgccgcgtatacttgggcaccagccccttgaaacggaagtagacctcaggaggatgccgaatcagccccttgaaacggagataggcatgtcgagatgtccgaatcagctcctgacaatcctgccgcggctcattgccgcgctaatctgaagataaatctgaccgtacgaggcgaaacctgataatcatgaccggatatattcccacactggagcagatcgacgagttgcaccgcaaaatcgcgccgtccaaggcggcgtacgagctggtgcacacgcattgcgtgattgtggcgaccatcggctgccagatcgtgcgccggcagaacgcgctgttcacgcgccgctgcacattaccgaaggacgcggaggtaccgcccaccgcaggcgtcaccggcggccatgtgccgccgcgtctgctcgacgagcatttagtactcatcggcggactgctgcatgacatcggcacctaccgcgtgttcaagcatgacggctctgacgacgaaccgctcaaattcagcaagaaacgctacattctgcacggtcttaagggctacgagtatctgctcgacgagggcgtggacgagtccatcgcccagttctgccgcaaccataccggcgtgggacttacgcgcgaggatgtggtgcgccaggagctgccattgccaccagccgactatgtgccgatgaatctcgagcaggaagtggtgatgtacgccgacaagttccatagcaagtcagtgccgccgaagttcctgcaggtcgaggcgtatacggcccgagccgagcgatttggcggagagaacaaacaacgatggctggatctggtggccaagtatggcgtgccggatattccggcgttggcggagaagtatgggatgcggatgatttgaggctctaggccccctcgtcagagggagcttatgaagctatttcagatggaacggagacggtaggtgccgttgcggttggaggcgatgatcatctggtcgttctccagcacgttccagccttcctgctcatagccggaagaggagaccaccacaccggcggagtcgccgttgtcgtcgcgcagctcacggtagcgcatcacacggtagtcggcggcctgcgcgccacggccatactcgtcgtagatttccacgatgcgcgggctggtcttctcacgaccggcggcgcacagggcgatgagctggtcctcggactgaatcatgcagttgtagctggacttcgggtaggcttggcgcagttcgcgcacggcctgggccacggcctcgtcgagcgggaagccgaaaccgatgtattccagaatcaccgcgaagaagatagcggagtcggaacggccgccggtggagaggagcacgctgtggttcaccgggtatgagcggttggtgacgatgttgcggccattggcgtccgagatatcgccattgtggatgaagctcaggccgttcgcatagaacgggtgctggttctccatgatgagcggcagattggagcttgccaagcgcaggtgccagatggcaccgcgagacggttcgtcggccagcgtctcaaacgtgctgtcatgacgggccgcgatggtcgacttgtagattcgggtgccggtttccggggtgggtgcgccaccgtcgcgcacgtgcggcgcttcggcgggatcggaaagctgggctacaccccagccatcattgtggatttcagacagttcacggaaatcctcgacattgtcttgccccaacacggcgttgagactcaggttgaagcctgccgtcgcgtatcccagtaatctgcacatggtatttcaacttaccgaaaccgtgtggcgacgtgcggcgactgttataggcattctttatagaacgcatcagcgccgctgcaaactggtatgttatcgcttctgtttggcggagcgctgaggcttggcggcgggtttgccgttcttggccttgcccttatcgcctttatcgccctgctcagcgaccgcagcggcggcagcggtctcagcgatcttccgctcctcggccgatacggcggcatcgagctcctgtaccaatcgcccgagcccggacgtggtgtccatcgggtcggggacggcggccgggtcggccactgcacgagtcggcgtgggcgtcgtgatggtcttggccgtatcggtgcgcttcagacgcggtgggcggcgggtggagacgaacagcggctgcacctcgaccagcgggttgtaaggtgccagaccgaaccacttaaccggcgagccggccatgcggcggattgcgtacttggcttgcaacgacagggcaccgcgtgcggaaaccttggattccggcatcagggccttgtgaatcagcacgtaacggatggtgccgatgtccggatcggcgtcgaccttggggtaaatcgacttctgcttaggcagttcgccggttttggacaggtcgtgcatgatctggtggatgtacgccgggatggactgcgaaaccttgaagcccaaacggaagcgcacgcggtagatgtagttcgtgccgaagtcctccaccgagtattcacgggtgaacggctcgtcggtggtttccacgctgactgcccaccaagcacgggcacgcttggggtggtcggcgaagatggagaagaagatgtccgtgtcgagtcgcttggtttccgagtcggaggtcaggtacacgatgttgtccgcaaaatacgggatgcggaaatcaccgtgcagcttgtcgagcgcgggtaggaagtcgttgggccgcatgtgacggcgttgcgcacgttcgagcttggtgccctcattccacgtgtacatgacgaacagaatcgcggcggtcagcaacatggtgaaccaaccaccgtgcaggaatttggccatagacgcgatgaagaacatagcctgaatcgccaagaacagcacggtgaacacgatggcaccgacccgcttgccggaatgccataagtagacgccgagcaacacggtggtggtgatcatcgtaatggtcaacgccaggccgtacgcggcggagatgtgttcggaatccttgaagatggcgagcacggcgagcgtggccacgcacaacacgccgttgaccaccggaatgtacagctggccgcgcgtacgggccgggtaacgcacctgcagatggggcatccagttgaggcgggtggcctcggaaaccatggtgaacgcgcccgtgatcagggcctgggaggcgatcacgccggccgaaacagacagaatcacggccaggtaccgcacgttcggggtcatcatctggaagaacgggttgagcgacttcatcgcggtgtattgcgggttatcgctattggccaacatccacgcgccttggccgaagtagttgagcaccagcgcaaccttgatgaatggccaggtgaagtagatgttgccgcgccccacgtggcccatgtcggagtacagcgcctcggcaccggtggtcgagaggaacacggtgcccatcagggcgatgccggcagcattgtccgggctgaacaggaatttgatgccgtacaccgggttcagggccgcgaacacagaccagtcgttagagagattcgtgacgcctacgatggcgaggaagctgaaccagaccagcaccatcgagccgaatactttgccgatgctttcggtgccgcgcgactgcacggagaagagaatcacgatgatcacgacggtaatcatcagggtcaggcttgggttttcgtcgaacaacccttccaatggcggcagggtctgcaagccttcgactgcggaactgatggaaaccgccggggtaagtaccgaatccgcaaggaatgccgcgccgccgagcatggcgggaatcgcgagccatgcgccgtacttgcgaatcaacgagtacagtgcgaagatgccgccttcgccattgttgtcgatgcgcatggcgatgagcacatatttgacggtggtgatcagcgtaatcgaccagaagaccagcgacagcatgccgagcacggcctctcggtttacgctgccaagccctccctgaccggcaaggaaggtctgcgcggtgtagaggggcgaggtgccgatgtcgccgtacaccacgccgagcgccacgatcgccatgccccaggtaaccttgtctgggctggattgcaagcgggcccaccatcggccgaggccgcctttcgaccatgcgctggcgattttctcggcttccttggtttcggcttccctctgcttggcgagtgcctcgcgctcctccttggtgagagtgcggcgggacaccttgggggcgttggtaaaggtgtcggccctcagcagtgcttcttcttcctgtcgggccttggctttggcggcgccagcctgggctgtctgggcctttgaggctttttgggcgcgtgcggtcctttggttcgactcagccatacgttcagtcctccattgaggtggagatcatccccctcgcttatgtcaggtacatcatggtagacctcgttcacaattctgacaaattttgctcagtccccggtcaacactggtctacaagaaagcccgaaacgcgcagtttttcacaccccgtatacggcgagggcggtatcgcgggtgccgcgcgccacatccgcgatggacaggtcgagcgtatcggccatggcccgcaaggtgtaggggatcatgtacggcgcgttggtgcggccacggtacggcatgggcgtcagatacggcgcgtcggtttcgaccatcgcatggcccagacccacaatccgtagcgattcgcggataccgtcattgcctttgtagctcacggtgccggagaagctcagataccagccatgttcgcgcgcaatctcggccatctcacggtcgccggaatacgagtggaatacggtgcgttcgggcgcgccgtcggccagcagggtttcgatgacctcgcgatgggagtcgcggtcgtgaatctgcatgggcaggcccagttccttggccagggcagtatgcgcgcggaaagcctcgcgttgcagttccttggcaccttcgccggtgcggaagaggtccatgccggtctcgccgatagccaccacttgctcggggtatgtggtggcgaggcgatgtacttcggcgagcgcgtcctcgaaagacgtgtcatggtaaggcttgtatttgagaggcagaccatccggccccggcacaccgcgatgcccgtggagcacggactcattggggtgtattgcgagcgccgcgtgcacgttacctggatgatcgagggccatctggacggcggtcatcaggtgcggcagctcgcaaccgcagtcgatgatacccccaatgccgacagattgcgcctgcgccagcaattggtcgacgtcgtacaccgggacttcgggctgccccttctcctgcgcctcatgactcatagcgcgcgcgaaagggattacggaggccacgtgagtgtggttgtcgatggtctgggcgtcgtccggcaacgcttcaggtgccggagcccagctacggtcgcgatggtggtgcttgctcatggtttctcagtgtaggctgtttctcagtgtaggctaccgtcagcaacgctcgtaaggcagtccggtaagacgttcgactacacgacgggtatcgccaatctcggccgcctgaacttgccgtctcttgccacgagcgcaacattcccgggaaagtagcgcaaccggcaagcgagatggccaccatcctgccgccttttctgcctcatcagcccattttctacctcattttgataaaatatgatgcagaaaagttcgtatgatgcagaaaatgaggcagtatgagatcattcgactacatcgaatactgatcgaacgcgcgtgttccgcctacacgcaagcaatccgagatggacataccgatccattgcttgccatcgccatgttcattctcgatttcacctgcatacatccgttcaatgacggcaacggccgcatgagtcggctactcacgctcctgatgttgtaccgcaatggctatatggtcggcaaatacatcagtatcgaacaccttatcgagcaaagtaaaagcacttattatgaggcgctggccgcaagcacccaaggatgggacgacaacgccaatgattatgcgccattcacgaactacctgcttggcatcatactgtccgcgtgcaaggaattcgacgaacgcatcaatctcacggcaggcggcagagcgcagggagcaccgcgagtagccaccaagggaatgcggattgaagcactgcttgatcgatccctagttccactctccaaggccgatattctcgctcgcatgcccgataccagcaccaccaccattgagcgcacgctgaaatcactgttggactccggtacgatcatcaaaatcggtgccggtcgcagcacccgctatgtgaaacgccgctaaacgcatccttgtgcgcaacatctcgtcactcttctggcgctccgctggccacgcgaatcatcgcgtactgggactcgtagaggcggtagtacgcgcccttggcggcgagcagctgcgcgtgcgagccgtgctcgacgatctggccgtgatcgatgtagaagatctcgtccgcgttctcgatcgtcgacaggcggtgcgcgatgatgaagctcgtgcgccccttgagcagatgctgcaggccggcctgcatcgcctcctcggtgcgcgtgtcgatgttgctcgtcgcctcgtccaggatcaggatacgagggtcggcgagcagcacgcgcgcgaaggcgatgagctggcgctggccggccgacagggtcgatccgcgctcctccaccaccgtgtcgtacccgtcgggcagttccatgatgaactcgtgcgcgtgcacggccttcgccgccgcctcgatttcctcgtcggtggcgtcgagcttgccgtagcggatgttctcgcgcacgttgccggagaagatgaaggtgtcctgcagcatcacgcccatctgccggcgcagcgatgcgagcgtcacgtcgcgcacgtcgtagccgtcgatcgtcaccgagccctcggacacgtcgtagaagcgtgacagcaggttgatgatcgtcgtcttgccggcgcccgtcgggccgaccagcgcgatcgtgcgccccggttcgacgtggaagtccacgaggttgaggatgttgcggccgtctttctcgtagcggaacaccacgtcgttgaagtcgacgcgcccgcggatctgcggcaggtccgccgcgtcgggcttgttgcggatctccggcgtgacgtcgagcgtctcgaagatgcgctcgaggtacgccgagcaggtgatgagctggttgtagaagttgccgatgttgatcaccggattccagaagttgttcgcgtagccgacgaacgcgatgagcacgccggtggtcacgttcacgcccccgaaacccatcacgccgacgaagtatatgaacgagatggtcatcacggagatggtctgtacgcccggccacatgaggaactggatgtgcacggcgtgcatccacgcggaacgcacctcgccctgctgctcctggaaggtcctgaactgggcctgctcctgcgcgaaggtctgcgtggtcttcactccggcgatcgactcgtggatgtaggcattcaggttgctctgcttgttggagagcttctggtaggcgcgccgctggaagatctgcagcacgcgcacccagatgatgagcaccgggaacaggatcaggctccacagggccagctgccagtcgatcacgaacatcacgatcagcgtgatcacgaaggtgaacacgtcggagatcacgttgatcagaccggagctcagcgtgtccgaaagcgtgttcacgtagttgaccacgcggatcaggatcttgccgtgcgggcgcgaatcgaagtagctgaagggcagcgtctggatatgcgtgaagatatcgcggcgcatgtccttgagcatgagctggccgacgcgcgtgatcgccaccgtgcggtagcgcagcccgaactcgtacagcacgatcagcgcggcgaggatcacagcgaggatgccgagcttgccgaggtccttgttcgggatcgcctcgtcgatcatgatcttggtcaggtacggcacggcgacgacgatgcagctcatcgagatgacgacgacgagaatgcgcgccacctgtgccatatacggtttgagatatttgccgacgcgagcgatgtcgtggaggttgatggactcctccagctcctcatcctcgcggaatgtattgcgttgtgccataagtcctcttctaaaacccctgtgcggcgccggactggagtccgagctgcttgtggtagatgtcccagtagcggccgtgtgcggccacgagttcggcgtgggtgccgcgttcgacgatacgtccgtgctcgagcaccagaatcaggtcggaatccttgaccgacgagatgcggtgggcgatggcgacgatggtcttgccgccgtccatctccttgaggtgcttctggatctccgcctcggtctccatatcgacggccgaggtcgtatcgtccataatcaggatcgacggattgtccgcgagcgcgcgggccagcgacaggcgctgcttctgcccgccggacaggcccacgccgcgttcgcccacgacggtgtcataaccctgcggcatcgacctgatgaaattgtccgcgccggcgatctgggccattttctggatatatcggtcgtcgctatcatcgctggcacca

SEQ ID NO: 3435 - DNA, 5524 bp, Unknown
  R151_18m  MAG No. k141_51300
atcttgatggtgtactgggtggcgtcatcgttcggggtgatggactcggccacttcgttggaagccttgccgtccttgtcgaaggagaccagacgggagaacagcaggtcgaccggcttgccgccgccggtttcgttggtgctgcccgggatcagcgggttctgcggttcggagttgtacgcagtgatgatgttggagccagcggtgttaccggaggcagcgttgctgttagagccgccgcaggcgctcagcagcatggccacggagcaggccatggcagcgaaagcaagagctttcttcttcatatgatttctcctattcattaggttgcaggacgtctcagccccgcctcatgcaaacggggctggattccccgtcaccgtgagacttgcatctcacgatgtctcgaacaatccaaccccgttgctgattacctgtcatttttgcgcacttgggagacaagcagtgtattttttgttacacccatgtaaaattcaggggttcttgccggctaggttcagtctttgctgagtttgttaaccaatgtccacatagtggtcatgcccgcggaaaggcctgtccgtaacggttcttgagctgctcgatggagacgtgcgtatagcgttgtgtagttttcaaggaggaatgcccgagcatctcctgcacctccctcaaatcggcaccgccgtccagtatgtgcgtggcggcggaatgacgcaacgcatgggggctgatgtccggcacgccggcctctcgggccgctctgtgcacgatgtcacgggctatgcgttggtcgatacggccgcctcgtgcgccgaggaacagggcgttggcagcacgggacttgactgcatccgttgccgtacgggccagtaccggccgcccctgttccagccaagtctccagcgcacgctgggcgggtagtccgaacggcaccacgcgttgcttgttgcctttgccggtgactttgatggtgcgattggagaagtcgatgtcggcgatatccatcgacaccagttcggcgacacggatgccggtggcatacagcagttcgagaatcgcggcgttgcgctgcgattcggcggtgactcgggcgttgtcgcgcttgtctgcacgggcgggtgcctcactgcggtgtacggtatcggccgacttatcagctgtcttgccgctgccgctgccggacgcggctgccgctcccccatcgtccttgtactggtttgttgcaacggcatgttcagcgacatccaataattgctcggcctgggattcggtgagcaccgcgggcagcgtgctgggaatcgagggagtcatcagtgtggcggccgggtcggtggtggtcagcccatgctcataggcccacgcgaagaacccgcgcacggccacggttttgcgggccatgctgctgcgggcgtgatcgcgcgattccaccgccatccagctgcgcagatcatccagcgtgatctcgttcagatcggtcacgccgcgcagctcgaacagatgcaggcatgccgtgagatccgcgcgatacgctttgagcgtattcgctgacaggccgcggttggacttcagataggagacgaaggagtcgatatcgccgtcgaactgcgtagatgacactctcgttctcctccgaattctttatggccttgggttacggccggggtggcgtgttacgccgctccggcacgggtttcaatgtggcaatctgttcctgatggatggtcacgttctgggccgggcgcgaaccattggcggcggcgtcacgcaccatctccaacgtgtatccatcccaggaaaccacatgccccacatagtcgcggaacttcatacggtggtcgaccgggtcaatgccgtcggtgatgcgcaccaccacgcgggcaccggccggaatctgccttggtaacgtcatacgtcatcatccccttagccatccgccgcatcaacttctatgcgtttcctgaaaaacggtacagactaccttactcctttgggtctttcgaacagcggagccacacggtcttctcacgaaaacaagcgggaacttcatccccctcgcgcagccttcttcgtgacgggcggcgaggggaacctgcacacgggctgcatggcggggcgcagttacatggcggggcgcagttggacgatggcctgacgcggatggatgaaaccggtgatggcttctccccggcgtgcggagaacagcaaggtctgctgccagccggcttcggggacggcgagctcgcgttccgggaatccggcggcagttgtgccggcttgctgcgcggtggccgtaccagcttgtgcagcggtgatgccggctcgcgtcacggcggccttgtaccggcggaaggggtcgccttcggcgaagaatcccatcacatcctgctcgccgtcggcaccagcgtgcagttggtcggccatatcggtcagacgtgccgccatgcggcgcagcagcacttcgacgttcagcgagtcttcctcgaccatcgcgcgcgtgcggtccgggtcggtcagggacacgcgggtcatgtccctccagcagccggcagccagcgcggcggcgatgttgcggtccgggttggcgaccagttcgttgatcagcgcggtggacaccacatgcggcatgtgggagatcatcgccgcggccttgtcatgcgtctcgtcgtccacgacgatgacgcggttgccgacgtccttggtgatcatcgtggcgacgtcgaggaagcggcggtagtccgtggactcgtccacggtgatggcccatagggcaccgtcgtacagatgcgggtcggcggcctgccagccggacagttcgttgccggccatcggatgggcgccgacgtagcacttccccagcgcggcagccttgacctgatcgcggaccatgcccttgactgagcccacgtcggtgagcgtggtgttcggatggtcgcccataagcggggctagggcggcgaggattgagggcatcgccttgagcggattgcacagcacgaccacatccggctcggcatccatgagttcggagagcgtgctcttgcagaaaatgccatcggcttcggcctgggcgtaggggtgcgagcgatggttccacgcgatgacgcgtacgccgcgctcggtcaggcggcgtgcgagcgagccgccaatcaatccgagtccgacgattccgactgtgtctaccacagcagttccttccttgctccctcggcgtactgccagccttccgacgcgcgattggtgatgtggacgccgccctcgggcagcatccaggcgtcgaccggcgggttcgggcgttcgcggcgtgggtagacggccagggtttttgcccagtcgccgtgtccggcgatctcttccagtgcggtgcggaatcttggctcccagggggcggcgtcaagggtggcgatgaagctgtaggttccgtcgtggcctttgatcgggcgcgagatgaagctggtcatgttcagccccgcatcacgcaggacgtccagcaggtcggcgagcacgccggggccggtgaccagcgggatgaaggtgatgatggtttcgaagtcgccggcgtcattgcggtgggcgcgggcgttgaattcctggaccacatcacgcggggcgatgacaaggaattcggtgtgcgcgccatcgaaatcctgcacatgttcggcgagggtgtcgagatcgtagagttcgccgcagatgctggggccgagcgccacgcggccgggcttcaggtcgcggcaggcggcggcgttggaggatgcgggttcgggctgcaaatggtgttcggtgatgaaccgggtgcattgggccaggccgtgcgggtgggcgctgacggggttgccggtgcagtcgcagatgctgtggccgcgcacggtgaaggcgttgaaggccacgtccacactgatccgggcgaagccggccgcgtcgggggcgtcgatcagcgcgtcgagattcgggaccacatagccttcgacgttgttttcccatgcgatgacgccccagccttggcgcgactgtacggcctgcatgatcgcgggcacgtcgggcagagcgatgaggtcgaagtcgccgagtgtggcgaactggtcggcggccgtcattgccgcctgatgggtgaaggtgccttccgggcccaagtaaaacagtttcatgcgtgccataaggttctatggtagcggccgtaatcccctacgcccgccgatacgcgacgcattcgcggaaatgtgccgccatatatagttacgcgcgcgattcagaatgagtgggaataacgaaccagcgggcgggaagaatgagcaggacgacttggaccagtatcaggccgtacagccagatgtagccggcatgctgggagaagaacggcatgtcgccttggaatccggcgacgatgaccgccttgccggatgtggtggtcagtgccatgccccatgcggtcagcgaggaggcgatgaggtgcagggccagtccgaccgcgcccatgcgcgaacgggcgcaccatgtcgataggccgatcagcagaaatgccagcaccagaccatacggaatactcagttctgcacccatacggtgggcgaacgtgcccacaaaggcggaagccacgcccgccgcaatcgtgatcaacgatttgaccagcgcgttctggcgatacgaccacggacgcagttcagtagtgctcttcacagtcatgcgtttcagtataggtggggatatgacttggcgaggaataaacttggctcccctcagagaggggagccagagagaatggtcggctacagtcgcaccagatcacttaccctgctgggcggcgttctggcggcgctgcttggcgcgccacttgtaccagtcctcacggccgaggatgatcttgcgcacgcggatggactccggggtgacttccacgcactcgtcctcgttggcgaagtccagggactcctcaaggctcatcttgatcggcggggtcagggtttcgagcacgtcagcggtggaggaacgcatgttggtcatgtgcttggccagcgtgatgttcacatccagctcgtcgggcttgttgttcacgcccacgacctgaccctcgtacaccggggactgcggttcgacgaagaagttgccacgggcctgcagacgctgcatggcgtatggggtggcgatacccttgcgatcggaaaccatggaaccgttctgacgaatggtgatggcaccagcccacggagcatagccagcggagatggaggaggaaatgccggtgccgcgagtggcggacagcagagccgtgcggaagccgatcagaccacgggacggcacggtgaactgcaggcggacccaaccggagccgtggttggtcatgccgtccatacggcccttacggtcggccatgagctgggtgacagtacccatgtactcttccggcacgtcgatggtggtattttccatcggctcgttgaccacaccgtcgatcttcttggtgaccacctgcgggcggccgacggtcagctcgtagccttcgcggcgcatctgctcggcgagcacg

SEQ ID NO: 3436 - DNA, 11907 bp, Unknown
  R151_18m  MAG No. k141_51812
cgggttcatgggcaggtggccgtcgatccagccgtagccgtactgggtctcctccgggccggcgccggagaacatgaggccgctcagcacgccggccttcgcggcggcctccacgtgcgccacggcggtttcgggcgtgcgtccctccaccaccgagcgtccccagttgacggtgagcccgatgccggccgacccgcacagcgcgatctcgtcctcaatcggcaggaagcccttttccggcttctgcccctcgacgtacttgtcgcagtgctcgatgaccagcttggcgccggaccagtccagctgcgcgagggcctgcaacgaggcggtcatcgcgtcgcggctggcaatgcgcgtgggcgccgtgtggatttcgacgaacttgacgtcctggctgccccgccactgtgcaaagtcggcgagcgcgtcgcgcagctgcttgaagaacgccagagcgaaccggcgtccgtcctcgtccgggctggccagtccgaagttcgggtccttccatacgtgctgcatggtgcccggaatggcagtgaccgtattgttcttccaatgcctgggcagttggccggcaagccagatgcggtcggcggtttcggcaaggtcccccgggaaggggatctcggtgccgtcgatccagggctgaccgcccagcagatcgtaataggcttcctgggcttcgcgcccctgcggcaatgacgcgtacgcgccgacgacgaatgatggcatcgctttcctccttgaaatgcccgatgcgggttcgctgagcattcctatcgtactatcatcagacatctgatatctaatctgttaaaggcagattacttcggcgtgtcttctctcggcctgccgaccttagcatcatgcattcgcttactatgcttgcccccctggaggggaaccagaaattatcaacaaatagtgacatgggatgctaaccgcggccagccggtgaaatggcatgcgcttatacggtttcaccggctggcgcccgctacggcggagttttcgtatggccctgtacgatttcaccggctgacgggcgcccagccggagtttccgtatacggtcatacgatttcaccgtcttagccgcagccagccggtgaaatcgtatgtggactccgtgcggcaacaagtcagcgggcaagcggcacggccccgacaagccgcgcaatccgctcactaacggaacagcgagacgcccctgcgggccatgcagaatgcgttgccaagccacgtgtgcttggaattcggccacaccgcaccgagcctcggggcgttctagctcagccagatgctgggcacgcggccgtcggcgctgcgcgagcccagcaggttgaacccgtttttctcctgaagccagcccggatgctgcgtggcgatggccagtccctcctcgagcgtgagcggaatgcgctcgtcggagtcaatgagcttgcgggccacgtcgggctcgcggtttgtgtgtacttggtaccggtgcgcggttccacgacgatgtagaacggtccctcgggcggctcggagccgtcctgcggcaaaaagctcgcgatgtcgcgcggcggcatcgtggcgaaaccggccatgcggttgatcgacgtacgggaaatcagcgattcgggcgacaccagctcgcgcgtgggcgccagcaggatgcgctcgtcaaaatcggtatgctccagcgcctcgatcagcggacgggccagggagcggaacgccgcggcgctcacatccgccacgtccgggtaccccaatgccacgatgcggtccaactggcgctgcgcttccaccgacgccttcgacatgactcccagtgcagagcatcgcggcggggcggcgccgtgacgttccagccggttccggcgtcccgtcgcaccggcgatccggcccagcatacgggcacccggttcttcttgttccgcccgattcgtaagattgatggatacgtgtggccatttcgctacggctgcccgaacgtgaaatcaatccgtcaaacccagaaggttgttatgtccgaaaagttgaaagtcggcattctcggcgccaccggtatggtcggtcagcgttttatcacgctgcttgagaatcacccgtggttcgaggtggtcacccttgccgcttccgcgcacagcgccggcaagacgtatgccgaggcggtcggagaccgttggaagatggaaaccccgatgcccgaatacgtcaagaacatggtggtcgtcgatggcgacgatgccgagtccgtggcctctggcgttgatttcatgttctctgcggtaaacatgccgaaggaccagattcgcgccattgaagagcgttatgccaagaccgagaccccggtggtctccaacaacagcgctcaccgttggaccccggacgtgccgatggtggtgccggagatcaacccggagcacttcgaggtgatcgagcaccagcgcaagcgcctgggcaccactcgtggtttcatcgccgtcaagccgaactgctcgattcaggcctacacgccggcactggccgcatggaaggaattcgagccgcgtgaggtggttgtgagcacctatcaggcgatttccggcgcaggcaagaccttcaaggattggcctgagatggtgggcaacatcatcccgttcatctctggtgaagaagcgaagtccgagaaggaaccgctcaaggtgttcggccatgtggacgccgaaaagggcgagatcgtgccgttcgacggcgacctcaagatcacttcgcaatgcatccgcgtgcccgtgctcaacggtcacaccgccaccgtgttcctgaacttcggcaagaaggccaccaaggaagagcttatcgaccgtctggtgaactacacgtccaaggcttccgagctggagctgccgcacgcgccgaagcacttcatccagtacctcaccgaggatgaccgcccgcaggtcaagctcgacgtggactacgagggtggcatgggcgtttccatcggccgtctgcgtgaggattccatcttcgattggaagttcgtgggtctggcccacaacaccctgcgtggtgcagccggcggcgccctcgaatgcgccgaaatgctcaaggctctaggctacatcactaagaagtagttgaatctcgttaaaatcgcaaaagccctccgcaaggagggctttcatcgtattaggcgcggaattcgcggctcagcggccagtaccgccgtacaccacggcttcgatctgatcggcatcgagaccgtatgcagtgtgcagcgccttgacggcgtcgttgagctgatcgagcggcacgagtgcggcgatacggatctcggaagtggagatcatcagcacgttgatgccctcatcgctcagggcctggaagaacttggcagccagaccggcgtgggtcttcatgccaacacccaccacggctaccttgccgacgttggtgttcacatcaaaggagtggtaacccagcacttcctgcttgtcgagcagcgtgttctgcacctgcttgacggccgattcgggcacggtgaaggagatgtctgcagtgccaacggatgcgccggcctgcacgatcatgtccacgttcacgtcggcggtggccagctcggtgaacaccttggctgccatacccggctcgttcggcacgccacgcacggtggccagcgcctcggaacgatcgtgggcaatgccggaaatcaccggtgcctcggggcccaggtcagggaacaggtcgcccatggatttcgcttcttcttcagtcatgtcttgccttgtcttagttgaaattacttacgattattgttcgctgtagccgcgctcagtcgaggttcggcagcgtgcgcgggtcaatgccgtcaggcacaaccagcgtgccggggcgacgggagaacgaagagcgcacatgcagcggcatgttgaaacgctgagcgtactctacgcagcgcagtgccagcaccttggagccgcaggaggccatttccagaatggcttcgtagccgatggaaggaatacggcgggcggaaggcacgatgcgcggatcggcggtaaagatgccgtccacgtcggtgtaaatctcgcagatgtcggcaccaagggccacagcgagtgccacggcggacgtgtccgaaccaccgcggccgagcgtggtggcgtcacccttggcgttgatgccctggaagccggcaacgatggcgatgtctcccaatgagagcgcgttcttcacgcggtccggtctcacggccttgatgtgggccgcgccgtaacgggtgtcggtgaagaagccggcctgctgaccggtgaaggagtgggcgcggctgccttcggcgtgaatggccatggccagcaggctcatggaaattcgctcgcctgcagtcatcagcatatccatctcgcgctcgggcgggttggagtcgatgctcagcgcctgatcgataaggtcatcggtggtatcgcccatggcggagaccaccacggccaccttattgcccttcttctccgtctccacaacgcgcttggccacacgtttgatcgaatcggtatcggcgaccgacgagccgccgtacttctgcacgatgagagccactgctgtcctttgttcttctcttagggatttgtttggtcgatattctacgcaaacgcaacgattataagggctgtcgcgttcaccccgcgaccccgcgccggcatgcggacacgggtatggcctacgttgttcagcaaatattcaagttttcaccggtggttctttgagacagccgcatccatcctttgagattcgagcggttaactatcaattaccggcaaacgaaagcaaaccggcgaggtttccgcagaaccccataactgaataccttcttcttcctctctccttttcaaggcccggtcccgctctattgtggaagttggaccattttcgttgtggaagttggaccatccctattagggaagttggacactagattacgaactagactttttcggacttcttatacccctacattgcccctatatggcccctatatggccctcgtcggcatgttgcatgaaaggcttggtgcggagtaacgtttcgcagtgtggcacgtgcggcgttgccacttgcggcagcacctatgccaaccacgactaagacgggccggccgtcttgtataagcaaatcatgagcagatcaagcgaaggaacaggcgactatggcattgctgcatcgacgttcgacgagtaaccgtgcctcacagaaaatgcgggaaaacaacgcggccatgcctgatgacacatctgcaaatgacaacgtttccccagcgcgtcccaagcccacagcattcgttccaactccatttgacgaagtcatcgatattagcgatctcgtggccgagcgccgacgcctgcaacgcaatctgtgggcgatgcgcatcatcaccattgtgttgctgatcgccgcaatcgccgtggcctgtttcccgctagcgttgcaattcgagtccgaccgcaacttggccgccaccacagccaccacagccaaagaagtagccggctggccttacccgcaggcgaaagacaagctcacggcggcccgcgcatacaacaagaagctcgctgaatccggccagcccatcttgggtgaagccgtcgatccgttctccgccgcccaaggaggatcccaagccagcggcgaggattccgtctcaaagaaagacaaggaataccagtcactgtttaataccggcaacggcgtgatgggcgcaatcaaggtgcccaaacagtccatcaatctgccgatttatcacggcacttccgaggaagcactggcttctggtgccggccacttgtacggcacgtcgctgccggtgggaggtaaatccacccattcggtcattaccgggcaccgcgggttggttgaagcgctgatgttcacccgtttggacgaggtgaaagagggcgacttcttctacatcgaagtcatgggcgaaactttgggctacaaagtggaccgcatttcggtgattttgccggatgacacgtcgaagctcaagattgtgccgggtgaggaccgtgtcaccttgatgacctgtacgccatacggcgtgaacacgcatcgactgcttatctccgggcaccgagtggcgattccgatgccggcccccgagccgaatgacgtgcttgacgcgcgcaatatcgcccttggtgttggtctgggcatactggcggcaggactgttcattatctggttggcacgacggcacaaggccgcgcgcatcatccgccatggcgcattctggccgtggatgcgccgcaagggcgaaagcgccaatgatacgctggcctaggcctcacgccgaccggccagcgccctgcccagcgtgatttcgtcggcgtactccaagtcggagcccaccggcaggccgctggcaagtcgggtgaccttgacacctacgggtcgcaatagctgggtcaagtagctggtggtggcctcgccttcaatattcgggtcgagcgccataatgacttccttgacctcatcgccttctaagcgtttgagcagactgggaatacgcaggtcggcagggccaacgttggccattgggttgattgcgccgccgagcacatggtataggccatggtattcgcgcgtgcgctcgatgctcatcacgtccttgggctcttcaaccacgcagatcaccgaacggtcgcgtctcgggtcggcgcataccgggcaggggctggattcgcacacgttgccgcaaatatcacagaagcggatcttggccttgacctcctcgatggcctcggccaaatcgcgcgcttcatcttcgggcgcggacagcatgtagaaggcgatacgctgcgcgctcttcggcccgatgccgggcagccgcccgaaagcgtcgatcagtcgctgtattgcgccgtcataagcaagtgccatgggtattcctcgttattcgtcctcattattcatccgagtgcttcttggcaggctggatgttcttggggttcttcggatcatctgccgcgaattgctcgacttttttgacctcgaatagctttttcagatcgtcaagattcatggccgtcgcctcgccgagcgactggtcgttcatcgagtattcgtcgtcctcggccgcgacttgcggttgcggctgcggctggctattccacgggtcggcattcggcgtcggctgtgcgggctgcggttgattccacgggtcatcgccggcagccggctgcggaaccgattggggctggttccacgggtcatcgcccgacatattgcccgacactgtctgaggaaccgaagaagccggagtctgggactgcggctgattccacgggtcgtctcctggctgcggagccgcctgagcatggttcccctgcggctgattccacggatcatcgtgaggagactgctgatatggctggttccacgggtcggcttcgaccggttgcagtgccagcgaggccgtagcctgagattgcggctgattccatggatcatcgcttgcgccggcaactgccgtagcgggagctgcggtggctggctgccccgtggactgtccagtgggtccagcggacgcaacggacgcagcgggtgcaacaggagcagccggagcggcccacggatcaacaccatcactgatgtccggaaccgcaacatgcttcttgtgatgctcttcgggcgcaggcgcagcagcgggctcgttaggtgcgaacccgtctgcagattgcggtgaagcgttgcttacggccggcttggcccaagggtcatcgtcactccagctcttcgccgccgtggatgcactggattggccggctcgatggctgtcgtccgtatcctcggcttggcctgttgcagtcggcttcggagctttcggctcgctccccatatgaatgcccagacccgcgcccaaactcgacgcggccaatccggccttggccatggcaatctgctgcttgaccttggccaattgctccgggctcatacgtttgacggattcgactcgctcgccattcgccgcgaccgcagaaggtgcaataaccgcattggcaccgaactcgttgcgcacggcatccaacaccacggacgccgccttcttaccgctgttgtccacggccaaggcgaaagcgtgctggctcagcgacttgtcgaacgtcatcgacaggcaaggcagactcttacggttgggaccgaattttacggtcggcaccttgtctcgtgacacatattcacgaatggtttccggcaaagcggcaacggctgcatcccacttctcgtcgatggaccgattatccgatgccgcaggcgaggtcaccggttgggccgggacggccggcgacgtggcgggagcaccccaggcattggcagcagcagttgctgcggcaggttgcgcagacggagagcccgcgggccggtcgctgactgggctgctgacagggccattgtctcccacagcggattcatgggaagcggtgctctgaggcgcggctgcttgctggttgcgtgcagcaccggagaatccaccatgtgaggctccggcaaacccgcctcgcgatgcgccggcaaaaccactggcacccgtaccggaagcggctgacgtagtcgaagtcgaagaagcagccgcaggcggcatgccagaagaagctggcgcgggagcggctgttgcaaagcctgattcactgccggccaacaatcgtgcggccagcagttccaagcgcatacgcggagaaatggctccggtcatggcacccaacgtagtgttgatgatgtctgccatggcggtcagtgcgcccagtcccagcgccttggcttggcggtgcagatcgtccatatcctcggcctcagccgtgtcggacagcacggattccgcacggtccccggccaacgtaagcaccagcagatcacgcacacgagccagcaggtcttcgacgaatcgtctcggatcgaatccgccgaccacgactttctggataacgccgtacagggcttcgccgttgtgattgattaccgcatccactgcctcaccgatcagcgcctccggcgtgaagccgagcagggctacagcggcatcatgggtgataacgccttcgaccgaaccaaccatcagctggtcaagcacagacagggtatctcgcatggagccgccaccggcgcgcatcgccagtttcagcacaccgggctcgggcttgatgccttccttgtcgcagatcgtctccaggtagggacccatgacttcctgcggcaccagacggaacggatagtggtgggtgcgcgaacggatggtgccgatcaccttgtctggttcggtggtggcgaagatgaacatcacatgttcaggcggctcttcaacgattttaagcagcgcattgaagccctgctgcgtgaccatatgggcctcatcgagaatgaaaatcttatagcggtcgcgcgcaggggcgaaaccagcgcgttctcgcaattctcgagcatcatccacaccgttgtgcgaggccgcatcgatttcgaccacgtcgatggaacccggaccgccggtggccaggtccttgcagctttcgcattcgccgcaggggtgggaagtcggccctttggcacagttgacgcaacgggccaggatacgcgcggagctggttttaccgcatcctcgcggccctgagaacagataggcatgcgtaagcttgccttcgtccaaggcgcgcatcagcgggaccgtgacttggtcctggccgatgaccccttcgaaggtgtccggacgatagcgacgatacagtgcaagtgccatagctactaacctacctttgccctcagaattaaccgataaaaagtcaagataaaccgggctcatagctgccgaatcgggaaaactctttatattccaacgacattcatctgacaacggttaccgcatttttattgttattaaccgctttctttgtattaacatagtgtcaataacggttgtagtcaggaggtgcccatgagcgatatcctcgacgagaaacgccccacccgtggcgatgcccggcgcgacgccatcgtgcaagccgcgcgcaaggtgtgtctggaaaaaggcttctccaaaatcaccgtttccgacatcgcaagcgaagtcggtatgacgcgttcgctgttctaccactacttcgaagacaaggaagccgtagccgacgcagtactcgatgacgtcatcgacgaaatcctcaccacgttgaagcagtggaaccaagcgcgcgaaacaggcaacgtgaacaaggcattagacgacatcgtgcatgtgctccgttccctaatcgccgacgagagccccttctcaaaccgtatgatccaagatggcaacgccgaactgtatatcaagttcattgaccgcgcggcggaccgtattgccgactacattgcccagaccaccgtacgtgatttcgagcagatgcatggtctgccaatcaccaacgtccatgagacattcttcacgctaatcgtggggcttatctcgctggttcgctcgcatccgaacatcagcgaccgaaccatcaaagaggtcatggcgcagacgctgcatatcgaaagctatgtcgtctgaggtctgacggccattggctctggtaccgttctcccgcactcccctcagtccgcttcgcggccagctcgtccgcaattgcggacagcctacggctgactttcttctggttcgactatcgtcgaaccctcgcctacaaacatcccactgggctgtttgctttacggctcagcctaatgaggggagccaatataatcaggtcaggcgaactggccggttacggggtcgcgaccgtctcgggcgatggcgtcgagcacttcctgtcgggagtccacctcacgggcggctacggccggcggtaccagcacgcgtagcgcgcagtcctcggccactaccctgaatggcagatgcccgatgtattcgccgtccgccatcagcaccggtggctcgtcgccttctgcggctcgcgtgacttcgatctcgcgtatgcgcttccacccgaacacctttgaggcgagcagcttgccgttataggcgttcgagatggccaccgcacattcgccgaagttcggcacatgattcatccacaccaggtccaacagcccgtcggagaagcaggagtacggtgagacctcgatgccgccaccgatatgacgcgaattcgcaatcgtcagcaacggcgtgatgatgtctcgttcatccgtggtaccgtccgccagcgtggccttgacgtggtacccataacgcttcatatgcgtcagctccaccagcaccgccgcaaagtagcgcatggtgccggtcggcagatgcgaatgattcgcacggtcgttgatacttgcgtcaagaccacaggacagcatgcccgcatagtaccggtcaatcgggtgctcggcagacttgttctcccggtactcgtattccccgccggtggatgggttcacggcatagccaccatccaaagaggtcacgcgtcccatgtccacatcaatgtgtgatccgcgcacgatagcgccgacgataccttccactgcggtttcgatgcgattgaccggcagcttaagtccccgagcgaaatcgttgcccgagcccatggccacgatgcccagcggcttaccgccgcaacccacggcattggcaccgagtgcgatcatgccgtcgccgccgaccaccaccagatagtcgtactcgtgcgcgcgttcacgcgcctggttcagggaatcgtcgaaacttacgccggtgatgtcgatgacgtcgaagttatgggcacggccggcgtcctccagcagtcccaatactcgcgcatccaccttggcaccacggcccttatcggaagtgggattgcccaccatggccaccacgcgacggcgttctgtgcgttcactctcgctcatgctctcaccttaaccaaaggtccag

SEQ ID NO: 3437 - DNA, 5263 bp, Unknown
  R151_18m  MAG No. k141_52537
ccgtcactatggcaatgacattcacgtggcgtctattggatatcttcatcgaaaaaagcagaaaggcatcggcgaggatcgcgagtccggcgagaactgcgatagtcgctttggtgatggttgccttcatgagagtttccccaaggtgttgacgttgatttcatgagattcgaaaaagagcgtatctaggccgaaccggacagtaagtcaacggtttctggaaaccagctgaaaaagctacggtattgtgaaatatgtctcatcggaatgggtcaagtttggcctagcgctcgcagtcgtgcgcgaagattcgttggattgattctcggtggattaagtcataggaagaaactagacaccttgcggtgtaaaaccgggaatcggaatggtgtaaaaccgggaatcggaatggtgtaaaaccgggaatgagaaaggtgtaaaatctatattgaggtgattgggtagctgagaaaggccggaaaatgaacgatttgaacaatcgtagtgataccttgactcaacctgattatcgtgctcgcgtggtcgatggcaggttaggtaagttacttaaagcattcggcgcggtggaaatcgtcgggccaaaatggtgtggaaagacatggacggcgctttcccgctcgcgaagtatggatcgtctggatgatgccgctacctttgcggccgcacagactgatccggcattggtactcatgggtaatgaaccgcatttggtggatgagtggcaagatgtgccgcaaatttgggatgccgctcgtcgtcatgtggatgacaatgcgaatcgcaaggggcagctgattcttacgggctcggccattccgaaggaccgagaaacaattcaccacagtggcacaggtcgaatttctcgcttgcgtatgtggcctatgagtctgtgcgagtcagggcaatctaccggtgtagtgagcttgtctggtttgtttgatggacaattcgagcctgccgaatgtgcaaccagcattgaagatattgccagatggtgctgtcgaggtgggtggcccgcaaatcttgatttggatgacgagtttgctctggaaattccgagtgaatatatcaagagtgtgcttgatatcagcgtgcccaagatgaacaagaaccctgaaaccgcgcgtgcactcatgcgtgcgctcgccgtgaacgtatcgcaggcaccaaaatatgcgacgctggctgcggatatggcctatggcgatgagcgccgtgaaccggatacgcagacagtaaagagctatttgggaatgctcaaggacttgtaccttctgacggatttggagggttgggagccgccactccgcgcaaagagtcgtgtgcgaaccaagcccaagcgatatttcgtggatccttcgttgcctgctgcggttttaggtgccgcgccgaatactctgatgcgcgatacacagacgctcggcgatctgtttgaaacgctgtgcattcgtgatttgaatgtatatctgtcggccatgccgggcgcgaacaatcgcatcgcctactaccgcgatgacaaggggcttgaagttgatgtcattatcgagttgtctgacggcaggtggggtgctatcgaaataaaactcagtgaccttaaggtgaacgatgacaatgcggataagctcaaatccttccgcgacaaaatctgtggcaaccccatggcccaagttcgcgaaccagagttcatgatgttccttaccggccgaggtgggaaggcctatcgccgcaatgacggcatactggtcgtgcccatcgcaacgttcggggcgtgaatcgggtaaaagaaaagaagcgccgaaccgcgaaagcgcctgtcggcgcaagggccgctcgcggcggcaaaaaatggagcccggggcttaagcacggtccgacgcggatacttagtatagcttgcgatggggctcgccgcgccggggaggtgtggtgttggctggtagctgattgttggggtgcggttggtgggtctctccctcagtcacgggcatcgcccgtgacagctccctcatcagagggagcctggagcagggctactccaaccgtccgcgacgccagaggttggcaccgtgctggaaatccttggcggtggccatgaggctgccggcggtgtgcataaggcgggcggctttggtgcgcacggccttctcatcggcatccgaggagaaggcgccgttggcctcggcccgggtcaccatgcgccgcgcctccacgcgcaagcccaacgccaccacatcggtaaacgccgccgcacgctcaagcgccacggcaaaatcgcccacaaaagcaccggagagaatcgaatcggccaatcgcacgatgtcatcttcactgggagcctgatccacgccggcgatggcggaggcggtagtggccaccggctcacccaagcgccacagatgcgcgatcgagtcgcgattcgatcgcatccacgtacgcaacatatacagtcgccacagcacaccaggcagcgaatccggctcggcatcgctccacagttcggcgatttcatccacgccgaccgtctccaccaacgtgagcacccgctcaacaaccgccgggtcttcgctatggcgcacacgatccagcaatgcggcagcagacagatgactcatctcgctcaacgcctgcgggtccatgccaccggccaatccatcggccacagccgggtcgagctgagccgggcgcgaggggcgtgaagaacccatgcgagcaggtccgaatgccgctccggccgcacgcaacgagccgaagcccgggcccagactgccggcggcaccattgtgcgcggcatgagctgcagcggcagcggccgaggagttggatgaatcaggaaatgcgggtctagtagacaagcggttgaaccttctgaatatcgatgattttgggaccatgaggcgtcggagtgacgaacagcgccaccgccgtgccggtcggcatgaacggtgtcttggcgatcaggcgtttgctcagagacggcgcaacgcacatgctgcgcaggtgtccgaacataccaccaatcaccggccggtgcatgcatatcgctatgggctgacggcgctcaagtgcgaactcgatttcgctgagtagacactcccatgcggtgtccggcgcagcggcgtatgcatcttcggtgagcggatcgagatgaaccatgtctcgtccggtctgccacgcgaacatctccaacgtctcctggcagcgcacccaaggcgacgtggccagtcgggtcggattgaaacacgccagctcgcggttcagcgcgtatgccgcagccgcgccgcgcggcgtgatcggacggttcgcgtccgaacccttccacagcttgcgcgcttccgctttgccgtggcgcacgataatcaccggcaccgcgtccagtgcaccttcttcgacccgatcaacgaatagcgcgaggatgtccttatcggtggaatggctgagcttcttgcgggcctcggccggcgtcagccacaaaacttcgtcgatttcgccgatgtccgcccgatgcaccgggccaaacgcatgggtgcgccgcaggttgtcgatggcgctgatcggcgtggccatccagaactggatatgcttggtatccgccgaccgatccttggtatggcgctgtttgctgccttcttcggacagcgggtactcgatgtcgcccagataagggccaagttccacggacaggcccgattcctcgccgatctcgcgtacggcggcatgccggtgcgattcgttcgggtcgaccttgcctttcggccagctccagtcgtcgtatttcgggcgatgcacgacgcacagttcgatgcggttgagtacgttgtccgcctcggccgggctgtcggcctgcgccgggtccggggtgggagccgcgtccgatgcgccgtgtgctgccgtggccttgccgtcagaatccgtggtgttcgcgatgatggtgccatcggtggcaatattggatttcgctgatggagatgatgcctgcgtcggctcggcatcatccttccaccggtacagaataccgccggcggcttccacgattcgtctcatactgttcgtacccatctcttgtattgtaggtcacgttggaccgctgctacgtagttttgcgcgctgaacgacgatgcccggcatcctctcgaaagaggagccgggcatcgtaaccaccctcagtcagcttgcgttgacagggagcatcgagtgaaatcagttgtgcgaattggggcggcgctggtgcttgcgaatcaggtattcctgactgtcgaccagcgggcggccctcgtcgtccttggtgtgcagcacatacgtgccgtcgggctgcatgtgccagctcatggtggagtcggccatctgcaggtccacgtacttgatgagcccgtcaatctgctccggggcggtgacacgcaccagagcctccacacggcggtcaaggttacggtgcatgaggtcagccgaaccgatgtagacctccgggccggaagccggaccctcgccgatctgcgggccgtccgcattgcagaaggcgtagatgcgggagtgctccaggaagcggccgagaatcgaacgtacgcggatgttctcggacaggccgggaacgccgggcttcagagcgcagatgccgcgttcgacgatgtcgatcttcacgccggcctgagaggcacggtacagggcgtcgatggtcttctcgtccacgatggagttgaccttgatcttgatccaggcctccttgccggcgcgggcggcgtcctcctcgcggcggatgcgctggattagaccggtgcgcacggtgcgcggggccaccagcagacggtggaagctggactttggcgcgtaaccggagagctggttgaacagacgagtcagatcctggccgaccaccgggtcgcaggtcagcagacccagatcggtgtacagtcgcgcggtcttcgggttgtagttaccggtgcctacgtggcagtagcggcgtagaccgtccgcttcctgacgcacgacctcgatgagcttgcagtgggtcttcaagcccacgatgccgtacaccacgtgcacgccggcgcgttcgagcttgcgggcccacgcgatgttggcgtcctcgtcgaaacgagccttgatttccaccaaagccagcacctgcttgccggcatgagcggcgtcgatcagggcgtcgatgatcggcgagttggagctggtgcggtacagggtctgcttgatggccagcaccttcgggtccgcggcggcctgcgcaaggaaggcc

SEQ ID NO: 3438 - DNA, 12490 bp, Unknown
  R151_18m  MAG No. k141_53394
ctgcacacggcgctcggtaggcaggccgttgtcatcccaacccatcgggtagaacacgtcgtagccgcgcatgcgcttgtaacgcgcaatcacatcggtgtgcgtgtaagagaacacgtgacccacgtgcagcgaaccggagacggtgggcggcggggtgtcgatggagtagacggccttgcggtcgcgggtattgcggaatttgtaggtgccgtcttcatcccagacggcgcgccacttgtcctcaagtccgtccacaccgaccttgtcgggcagcggggtgaggttggcgttgatgatggatttgccttcagtcataaagccaaagtttatgcacgttgcatgacaagccgaactgtacagtaaacagcccagtaggctgttcgcaggcgaggtacgaacgatcgaacgatagtgagccaaggactatcgggcgtagcccgtccgtgactgaaggttgcctacttcaccgtcaacccggccagcggcatgcggcgattgatcatcgaggtcgggtagccggagaccttggtggacgccacagtgaagcatttgcgggtatacagccaatcactggccgcatcctcgctgatcagccgggcgtacgccttcattcgtgcctcataatcggcgtcattagtggcggcgcgagcatccgcataggcctgttgcgcttcggtatggtcgtaatggaacatggaatcggggtcggcgaatatgccggcatcatccgtgccgtccatgctcatcacggtcagttcccatttgccgtccttgattcgtttggcataatcctcatcggagagcacttcaaggttcaccgtggggcgcggctgccgctcgatctgctgcttgatggtttcggccaacgaccggtattcttcggggaccaccagattcaccgtagtcagatattgcgcaccgaagtaggagaacatctgcccagcttggttttcgtcatgcggatacagtccggtcaaatcttcgtatccgggttccagcgggctgatggggccgcccaatgctccggctgcgtcgggttgggcggaggcgatgccggctgcgtcgatttgatagcggaaggctttacgcgcctgttcgtcggagagcagcgaatcgatgccgttgttgtaggccagcagcaccttatccgtagtggccccctccttgacggtcaggccatccttgccgttcaaaccggtggccgtcgaagccgaaaccggtgccgccatatcgagactgccgtcggtcagggccttgctgagcgcatcggcgtcggagtattgcataaattcaacgatattgctggccgcttcggtgccatggtaggtatcgctgcgcgccagcttcagggaatggccaggctggaaatcggccacggtgaatggtccggaacctatggccttgcgttgataatcggcactggacgactcggaatcgtagacaatgccgagtttgccggacagcgctcgcagcagcgtcggattgggcttggcaagcgtaatgaccaccgtggtggcgttcggattggcgaccgacgtcagatcgcccaattcgtcgacgtccgccaccttgttggtcacgttctgttgcaacgaccacacggcgtccgaggcgtccaacgtatgaccgttcgagaaggtgacgcccgattgcagtgtcagggtgacggtcagtccgtcatcggaagtcttccagcttgtcgccagtcccggctgaatcttgttgtcttgatcgacggtcactaatgtctcatacacattgtcgacgagcaggcgctcggctgccgcagaggaatcggaccgaatatccaaggattgcggcatatcgtcgatgccaatggtcacatcggcatcgagggatgatcccggctggaaccggttttgcatgaacgtccatcccgcaaccacgagtgcgccgagtgccacggcgactccgagaaaaatcccccacttggaccatgtattgttccgcttgctgtgctgcatggttttcagtctagcggtggattcagcctagaatccgcaattcaccatgatgaggtatgagttagcgcttggacgtgctcttgccggcgggcggcgcatagctagggcaggtgtcggacagcgggcagttggcgcagtcgggggtacgtgcgtggcaggtggcccggccgaacagaatcagtcggtggctgagattcgtccactcttcgggcggaaaacaggcggtgatttccttctcgattttcacgggatcagggtgtgcggaccgccaatccgaccgccaacgcagtcgtccggttacgcgcatcacatgcgtatcgaccgggaatccggggatatcgaacgcgttgccgagcacgacgttcgcggttttgcggccgacccccggcaagctggtcagttcatccatcgtgcgcggcaccacgccgccgaaccgttcgtccagtgccgtggccagtccgatgagatgctgggttttcgaacggtagaaccccagcggatgaatgatgtcttcgacttgggccgggttcgcggccgccaagtcacgggcggtggggtaggtggcgaacagttccggggtgaccgtgttgacacgcttgtcggtggtctgggcgctgagcacggtggcgatcagcaattcgagcggattcgagaaatgcagtgcgcaagcgggtgccggaatcacctggcgcagaatgtcgtattcgtcatgcatgcgcgtgagacgcgcggatttggtttctctcatcgtatggacctaagcggcgtaatgtcgatgattgatggtttgtagcgctgctggtctgtcaggcggcggtgttgagatcgggggtatcgtcatcggtgccgatggcggcagaggatgctttggcggcctgctgtgcggcggcagtttccttatccgtctccggcgggtcgaatcggtagcccacgttgcgcacggtgccgatgaggtgttcgtattcgccgccaagcttggcgcgcagacgacggatatgcacgtcgaccgtacgagtgccaccgtagtagtcgtagccccatacttcctgcagcaactgggcgcgcgtgaacacgcggccggggtgctggaccaagtacttgaggagttcgaactccttgtatgccagatcgatggggcgtccatgcagggaggcggtatagccgttggtgtccacaatgaggtcgccggagcgaatctggccatcttccaccgtggtggtggattcggcgggagaaccggctgctgcggctgcgggagcgttgccgcgctcggagaccaatcgcaatcggccctcgacttcagccggggaagcggtggcgaccaccacatccgcaatgccccactgggagttgaccacggtgaagccgccttcggtcagcaccagcacgattggcgtggacaggccggaagcgtggatgagacggcacaaggttttggcggtcgccagatcatcgcgtgcatccagaaacagaatggtgttctccggcatcttcaccaagctggctgcatccatcggcagcacgcggacgcgatgagaaagcagggcgagtgatggcaaaacggtggcggggtcgctggcgaaagtcatcaacgtaagatccgtcacgctaatccccctttatcctgcaatgtgttacgcaattgcttggtgtggctgtacgagtcgtcagcggcgttatgccgctttcgcgcggtttttcattattctacgcgcttgtagtggacacatgggttacaagtttgcggaatatggaacggcagacgtccatcaaccgatgacacggccgagcaccagtgcggttgcggcgatggtcacgcccatcagcattaccggcatcaggccggtaccgatccacggatagcggatatccgggtccggatcggcgtcacgcacccacaacgtggaggccacggccaaggccagtcccaaaacgatgaggatgatcagggcaacagttcccgcaacggtgcccttggcgagcatcgcgcccaaatcaggcaggaagcaccagccggccacggcgagagccgccacaccggaagtcacggcgtgagagagtgcgcggataagatgttcgcgcttctcacgagccatctggcgcccgaaggagaagaccaccagcaccaccagcagcaggcccatggccagtgcccatgaataccaaggaagtaccgagccatccgcagcggtctgatccggcggaaccttgccggtcgggaaaggtacgatgacgaaaatcagagaaatcgcgccaaacaccaaagtgacgatacgatccagcatgctgccgcggaacggccagaacacgacaaatgcggccaacgtcagagcggcgataatcaaagggatgatggggacggtgccaggggagggaatgaccgtggctgcgatgagcagtacataggacgtcagttgggccaacaacatgctcagggctttgttcttccaaccctcctgggtgatctcggtcatgatacgcctctcagataatcgaatttccatcccaatcctacgtcgggcattggaacggtgaaatcaaacaaaatagccctttctggtgaaggggcttatgacactaaatcagaacgcgataacgcccaaatgctccaacagcactttgacgccaagtagaatcagcaccacgccgccggcgatctgcgccggctcctgccagcgggagccgaacgcgcggccaatgtacaggcccgcagcggagaacagtccggtgaccacaccgatgctgaggatggcgaatgccatatgggctttggtgaacatgaaggtcaggctcacgcccacggcgaacgcatcgatgctgcaggccacggccaggggaagcatatgcttccaatcgaactgggcggtctccttggagttttcctcatcttcttcgaaggcttcgtgaaccatgttgccgccgatgaacaccaacagggcgaagatgatccaatgatcgaatcgggttacgtatttgctgaatgtagatgccgcgaaatagccgagaatggggaacagcatctggaatccgccgagccagagggcgcttttcgcggcgtcttgcactcgtacgcgggatacggccagacctttgccaatggatacggcgaatgcatccatagctacggaaacagaaataagcaggatttgaatgattatcggaatcatggtgcgacagaaggttcatcgccggattaccgtgcgatgggcctcgaccagcgttcctacacgccgcctacgcctagctgaaaaatacaccagcactatatcacgcgatgcacgtcgaatcaaaaaggcgggaggcctccggagaggtctcccgccgacgattcggaatcgaatcacttgccttcgttcgcgagacgctcacgagcggcaatgatttccttctcggcggcgtcagcaccggtccagtagtcgcccggcaggacttccttgcccggctccaaggccttgtactgctcgaagaagtgcttgatttcggccttgtggtactcgttgacgtcgtcgatgtccttgatgtcatcgaaacgaacgtcggcgggcacgcacagcaccttgtcgtcgccgccggcctcgtcgaccatgtggtacaggcccacggcgcggcactcgaccacgcagcccgggaacacggagttcggaatcatcacgagagcgtccagcggatcgccgtcctcgcccagggtgccgtcgatgtagccgtagtcatccgggtaacccattgcggtgaacagggtacggtccaggaagacgcgaccggtctcgtgatcgacttcgtacttgttcttggagccgcgcggaatttccacaacgacgttgaaggtttctgccatgtcatttctccttgaaaatcgacagttacgttatcgtctcaccacaataccctgtttgcgcctgcaaaacaggtgcggaactcaagaaaccgtgctgagattatgccgacactatgtctaaacagacgaaatcctcccctcaaggggaggatttctagcggtttacgcacacgataaacccatgcacgtcaacggcatcactgttgcattaccgttgcactaccgcatcactgcacggacaggatgtgagccacatccgcccaaggcgccagagacacgtagttgtcccaaccccactggaattcgcggccggtcagctcgtcgcgcacgttgagcgggcggtcggtgggcagacccagctcgccgagttccaggtgaatcatcgactggtgtgcgttgtgtccatcgaggttcacgaccacaatcagtgtgtccgcttggccggtaccagtcagttcggccggcgtgtggcgtgcgaaagccagaatattcgggtcggacgtaggcagcacggtgaggttgtggtagctcaacgcggccgggtgggcgcgacgaatcttgttgagcgcggtgagcatctcggccacgccgtactgcttggccttgctccaatcgcgaaccttgacctcgtacttctcgttgtcgatctgctcttcgaagccggggcgctgcttgttctcgatgagttcgtaaccgttgtagataccccaggacggcgagcccatggctgccagcaccgcacgcacgcagtggccggctacgccgttgtctcgcacgtaagcggtgagaatatccggcgtggtgggccagaaggtgttgtgctggtagtagccgtcgtcgccattggtgatcggcagatactcttccagttcgtccttggtgttgcgccacgggaagtagcagtgggactgggtgaagcccacgtagctcagggcacgcatcatgcccgggcgggtgaatgcctcagccaggaacaggatctccgggtgcttcttggtcacggcggcaatcacgtcctgccagaaacgcaccggcttggtgtgcgggttatcgatgcggaagatggtgacgcccgcctcgatccacagattcatgatgcgttcgacttctttttcgatgccgggcatgtcggcgttgaagtcgatcgggtagatgtcctgatacttcttcggcgggttctcggcgaaggcgatggagccgtctggcttgtgacggaaccagttcgggtgggccttgacccacgggtgatcgggcgagcactgcagtgcgaaatcaagcgcgatttccagacccagttcatgtgcacgctggcacagggccttgaaatcgtccatggtgccgagcagcggatccacggtgtcgtggccgcccagctcggagccgatgccgaacggcgagcccgggtcatcggggccggcgaccagcgtgttgttgcggcccttgcggttggtcacgccaatcgggaagaccggcggcagatagacgatgtcgaagccttcggcagcggcgcgttcgaggccggccatcgaggtcttcagcgtaccctgaatgatcttgccggtgttcggatcgatggtggcgccttcggaacgtgggaagaactggtaccaagccgcgaagctggacttcgggcgttccaccttgaaacgctggggctggctgggggagatgccatcgcgcagcgggtgagtctcgtgcagggcggcgatggtagggttgtcgccggcggcgaggcgatcctcggcgctcagcgtctgatcggccatggtctcagcggccttctccaaggtcttgcgatcgcgtgcggtcaggccggcgtccggggttgcggcccaacgggccagcagctcggcaccggaattgagcgcgttgtccacgtcgtccatcacacgcaccttgatacgggcgtcatgcagccaggagacgtacgtgtcttcccaaccttcgatggtcacggtccattcgccgagctgacgcttgacggccgcgtagccatcctcccaaggcttcagatcgctgtgttcgccgcacttgaccatcacggtccaacgatcgaggccgggatttacgcaggtcatggcccggcgcatggtttccttgccgcgcgggttgcgcacgatggcggtggcacccaccttggtacggccttcgatgaacacttgggcggtcatctcaaacggttcgccgagttccacacgggcggggaagatgccacgctcctcggcgggagtgatgtccatgacattgatgcggccgaactggccgggctcgtttgcttcgatggacggtgcgggggcttcgacagccaggcctttcagcgctgctgcggcgcgtgccgtttcggcgctgactctcttgcgcttggttgcggggctctttcgggcagaagtcgtctttgacttcgtcttcgtggtgttgttatcggtattactagtgcgcgtggtcgcgcgatgttgtactgctgccataaggccctattctagaggcttttgaacatatgttgcacattgtggataacttgcaggtaaacgttcggtcaaccgcatgaggtggataactcggcggaagagttatccacaactcgccgacaaacggcaagctcggaccacataggccgaaaaaccggctgtagcgaatgaaaatctgccatgatcgtggcctacccgcacacagtgcagtatgcggggaacgtaccaggaaaggacgaatgatgataacgacatggcggcaacggggcatggccatcgtagcgatgctgaccggtctgataataatggtgggagtggtgttcggctcggcgaatacggcgtatgccgcgacgttgacgcccgccgacgaaagatatcacgtgacgtttccatacaacgatatggaatattacgtcggtgtcgcggggctggacgcttcgggcaacaaatactactgcatcgaagcggggaaactgagcgactatgtgataggccccaccacggtgcttgcctccgatgagaacgcccggcgtatggcatggatccttgaccggtaccgcgacacggatgccgccacccatgcggcgatcggcatcatcgtgcaggatcacttcgggcgcgatcgggacgagtgggcgagacagatggcggtcattcaaggccggtatcccgagatcgtggcgaaggcggcccggatatgggatcaatcggccggcaagacgcctgcgggcacgacggtggaacgcaccgatgccgaggctttgcgcagcggttccatctcggtgaaagtggtgaaccgcgacggtgacgcgatcgcgggagtgccgttcaccgtcaccttgcaggggccggcgcggttcatccaaggcggcaacacgttctcgggggtgtcgacgagcgccggatcctcgatcgcgtgggaggcgaccggcgccggcgaggtgacggcgaacaccacatacgagtatgggcggatgcacgtcatggacagcactcaggacatgctggccttcgattcgatggcttccgccggcggttcgtcgtcgacgttccaggtgcgcaaggatttcgttccgtcggtgtccacgcaggtgtccgataaggtgcttgatgcggcttcgccggtgtccgatgatgtgaccagcggcgtgggggacgagggcagtcattgggtgcccggtctgaagctgcaggcgcgtggatactatttcgacgggctcggcaaggatgatctgggcaaggtcatcgcgccgaacgcacgggagagcgcggacgcttttctcgcccggttggcgtcctcgggttatgagccgagtgcttatggcaaggcgtccttcaccggtgtggggcagcgggttcgtgtgcgggccatggccaagccggacggtgacgccgcctatctgactccgaagaccggcggctttggcacctgggtgtgggtgttccggcggagcgagcaaagcaaacgggcgcaggaataccttaccggcgactgggtgagcccgttcatggaggcttcggaaagcaacgtggggcgcgggaaggtcgaagtcatgtcgacggttaccgaacattcggcggatatcggcgccgaactcagcgacaccatcaccgtatcggggttcccggcggaccacggccagttcatgggtgatgaaacctatggtttcgcggcggatcagccgtatgcgacggtgagcgtatggtggtccggcgatcccgacaacccctccaacgatgaggcgtacaagccatccgggggagaggtccccacggaagacgacaaccaccggttgctggccacctgggagattcccgcgatgaatggcacgttcaaaatcggcgccggggcgttggacgcgcatggcgctcccatgcatctgaccgccgaacggcatgggtggtacgtgttcgtttggcggttcgagggggatgaccgtgtttccccggcgtccagccggtatgacgatgcctgggagcgtgtgcgggtgttgcccccatgcgagtcggagaaaccgtgcgaaccggagaaacccgagacgccaccggcgccggcggagacaatcacgcccaaccctcgcccgtcactgcccgtcacgggtggcgatgtgtcgcttgcctcggttctggccgtgtcagctctggcgataggcgccatactgtccatcgtcgttcggtggcgtcgttgctatgaccgatccaagcactggacgatgcgctggccgatacgttgacccgctgcggcatgatgccgatgatgtcggctggatggtgaaccgcactccgcttctgagcagaaggacgggagctgggcacgaagtcgattgtgacatacgacttgtgcccggcttccgcttcgttgagaaacttcacgcctgtcgtctcccgtggattagacaactgaaggtccgcgatgaaaacgacgagacgtttatgatcgccgacttccctgggcaccgtagctgcctgatcgcctttcatccatatcgccccggtcaggtcgtcacctacaacggcggcggcagcgtcgccaccggcagcaacgccccaccgtcccgtaccgtgaccgtccgtgcagaccctcggccccgtatggggctggacgtgggccgatccggccgcgacgaccatcagcgccgtcgccctgaccatcggcgtcgtcatcggcgccagcgccctcaaggccaaggcatccaaggccgaataacaagaagcccccgaacctgaaccgtatcacgcggcaggttcgggggcttttcgccgtatatgggtcaggccatcgcgggctgtgcctgattggcggtcaggtatgcggccagtgccttgcggatcagagcgctcttgccgatgtgctctcgttcggcctgtgcccgcacctgtgcgtccatgtcgggcgtgaggtatgccttgtagagcacgtcggccttccggcggggctggtcggcgagggggcggccggcgaagatgtcgtcaatgtcatccatcgtgatcgccctttgcgggcggatggtctcgccgatgatggcgggggtgtgctcggtgtattcgtccgagagctcgtcccagtctgtttcgttgctcatgatgtcctccttggtgttttttagtcgtcgaacttgtagagccattcgcggcggcagtccatcgcgtggaacaccttgcgggtgcgctgggataccagcagctccacggggcgttccctgaactcgtccgggtgttcgaggatcgccatgaccctgtcgccggcgtgtctcgactgcacctcgaacacggccaccggatgccggaatatgtagtcgatctgtggctgtgtgaaccagtgcttgaaggctgacggctcgcattcgatcatgcttattatggtaccataatttagtaccacaatcaatttagtaccacaatcgagtcggggaaacggaacatcgtgatcctcctaggcggcgaggcgcgtggcttccacggcggcgcgcagctggtcgtcgggcatggcgatgtaccgttgcgtggtctcgaccgaggcgtggcctaggagcttggagacgagcagcaggtctccgtgtggcggcgtaggtcgtggtcgcgtacctgtggcgcaggctgtgggccgtccatccgtcgccgagcaggtcgctcagatgtcggccgacgtaggatgattcggcgtggccgctccaccggccggggaacagatagccgttggcggatcggatcagcagggcgaggtcgtcgccctccacgtccctagatcgcccttaagcgccctcgacaatgcggacatctggcatcggcgcgtgccgatcgtgtttgggggagtagcccgccgccttgagggagtcgagccatagattgattgattctgcccagagcgggcttggatgttgtttttttcacaggacatcatcgccccgatcggatatgcggccccgtagggcacgacggcggataaacgaaaagccgtcacgaataatcgtgacggcctcgcccgcagtagcggggcatggatttgaaccgtggacctctggggacgttgtcgccccgaggtccacggttcaaatacctgaagcccaattatcggattttattctagcggcgtaacgccgccggccgtcaaggtagccggccgtgagtatgcacaaaaagctgccccctgctcagtggcgggatgaaatcaccggttggctcgaatcgctcacggcggc

SEQ ID NO: 3439 - DNA, 3075 bp, Unknown
  R151_18m  MAG No. k141_54510
caacagctgcggcttggaatcgagccggctcaggccatgccatgccaggtccacgatgtacgcggccagctgctccttgctcaccttgggccggtcggcccagtactggccggtgaacacggtcatgcccaccagcatctgcgcatagtacggcacgcctttggtggagagtttctgccgtttgaacgtttcggaaaggatgtcttcgacgcgcacggcgatgtctcccagcagtgagctgaacgagccggacggttcggtgctgggcgagtcgcgcgccagcacctggaatccctcggcgtcctcttcgatataggtgagcagtgcgagtgcggtgcgttccacgatctggcgtgggtgcacggtcggatcgtcaagcgcggcggtgagcacactggtcaacgcgcgcatctcacggtccacaatgacggcgtacaggccctctttgccgccgaaatgctcatatacgatgggtttcgatacttttgcggtggcggcgatctcctccacgctcactgcttcaaaacccttcgacgcgaacagcgaacgaccgatttcgatgagctgctcgcgccgctgatacgacgtcattctggatgtattggccatgctgtccagtttttcacgccccgtggatagctccctgaccgtccgcccccacgtatcgtccgattctggtgaatcggacatgtgtgtcatattgacaatgcttcatcgcggctttaatatatttaataaataataaattttattaaagggggtgatgtggatcgtctaccagaatggttggccagccttacggaggaggatttggccttcatcaagaacttcgtgctatcgtcaggatctctgaagcaaatgtcccagctgtatcaagtctcctacccgaccatgaggatccggcttgacaggcttatcgaaaaaatacggttgaacgacaacgatacggaggatccattcatcctcttggtgaagagtctcgccattgacgatagatacgacgtcgacacggctcgaatactcatagacgagtacagaaagagaaaggatgaatcatgagctggacatggattgcattattgattgagatcctaggcgtaatcgccgtattcgttctggtcttcctcatcgcgaggagtctgattcgctacgcaaattccctaaagaaaggaggcagtccttcaaagcagacagcggaagacaaaagaatcactcttcatgatctataaaaacgtcaccagatgtatcgaagtcaagatcgcattatcgatgccttgcatggcagagcaccttatccccctggcgaatcggacattcgtggtgcgtccgcggggcggagccggtgtgtccgttgcgcttcttaggctggagccatggatacgaatgtgattattgcgattgtcgccgtcgccgtcatcgcggcaattctggtgatcggcggatggtggttcggcaagagccgcaaggctgccgtggccaagtccaccgaagccgcgaaagccaaggccgacgcccgtcttgctgcggaagcggagtcggccgcatctgattcttccacggtgaagccgtccgttgattccaatgttgatgcagctgaaaaagctccggctgaaagtcagcagaagtcctcagctcaagcttcctcttccgaaacggcggctcctgcaccagccaccgaagccaagcccgaaccggttcatgacacccccgaatccgccggcacacgcatgcagcgtcttaaggcgcggctgtcgaaatccggcaatccgttcggcaaggccctgttcaacattcttgcgaaggatcagctctccgaagccgattgggaagacgtcgaagacacccttctgctcgccgatgttggcgcggaagccagcgaacagctcgtcgaggacctacgcaacgacgcccgaatcgcaggccagtccgatccggccgaagtgcgcgcggcgctgaaagacaaactgctcaagctcgtcggcactgacatcgaccgccggctcaacgccgacaaggacggcgcgaacaagccgagcgtcgtcatcatggtcggtgtgaacggcaccggcaaaaccaccaccgcgggcaagctttcccgcctgcttgtttccgaaggcaagcaggtcatgctgggcgccgccgataccttccgcgcggcggccgccgaccagttggaaacctggggcgccaaggtcggcgttccggtcgtgcgttccgacaaggacggtgccgacccggcatccgtcgccttcgaggcatccgccaaggccaaggaagcgaacgcggacgtgctcatcatcgacaccgccggccgactgcagaacaagtcgaacctgatggacgagctcggcaagattcgccgcgtcaccgaaaagaacctgccggtggacgaggtgctgctcgtgctcgacgccaccaccggccaaaacggcatggcccaggccaaggtgttcgccgaagccatcggcattaccggtgtggtgctctccaaacttgacggttccgccaagggcggcatcgtgatcagcgtgcagaaggagctcggcgtgccggtcaagctcgtcggtcttggcgaaggcccggacgatttggcacctttcgatcccgaaggcttcgtagacggcattctcgcgtagacggtcgagctcccctcagcgaggggagccctgcgtccgtccacgttgtgggcgcgggaaacgcccgcaacgcaccaaacccagccccgaatcatattcgaaacatgattcggggctttcccgtatacgttggaatcatgccggaatcagcccacccgacatcaacctaactgtcaggtgcgcttaacaatcgcgtaacttggcgtaacgaaaccaaaacgcggccggctttaactgacaaactgttagcccccataagggggacggcattgtagagacaaataagacgccggccgcacaaagcccccggtgccctgaacgaaagagagggaggtagacatgggagcgattgattccggtaacaccgcatggatcctgacatccgcgtccttggttttcctcatgacgcctggtgtggcgttcttctacggcggtatgg

SEQ ID NO: 3440 - DNA, 12128 bp, Unknown
  R151_18m  MAG No. k141_54518
agaccgagggctagtgttcgaggtctacatccacgtcccgttctgcttgcggcgctgcggttactgcgacttcaacacctacacggctacggatcttggtgcgggggcctcgcgcggcaactatgccaatatggtcattcgtgaaatggccctgaccaagcagtggcagctcgaccacggcatcgaggagccaccggtctccaccgtgttcttcgggggtggtacacccacgattctcgccgcccgcgatctggtcgccatgctcgatgccatccgcaagatctggagcatcgcgcccgacgccgaaatcaccaccgaagccaacccggacacggtcaacgaatattacatcaatgagctcgctgccggcggcttcacccgcgtttccttcggcatgcaatctgccgtgccgcacgtgctcaaaaccctcgaccgcacgcatacgccggccaacgtggccgcaggcgttaatgccgccaataaggccggcctgcgctccagcgtggatctgatttacggcgcaccgggggagagccttgacgattggcgcacctcggtcacgaccgccatcgacctcggcgtgaaccacatctccgcctacgcactgaccgtggaacccaccacgaaaatgggtcgtcaaatcgcggccggcactctgcccaaacccaatgacgatgacgaagcagccaaatacgaaatcgccgacgacctgttcgccgccgccggcctcgaatggtatgaggtctccaactgggcccgccccggatacgagagccagcacaacctcggctattggcgcaacgtcgattgggccggtctagggccaggtgcccactcccactacaacgcggtgaccgaggctgaccacccccagtcggcttcgctgacagcccccgccagcgggggcaagtccgaagccattgcctctgcctcagctgatggacaggccaacgccgaacttggagaaaccaacgccgaactaggtatgatcaacgcgcatgggaacaactcccaagaaattcatgcccccgctggcgggggctgtccggcggatgccggactgggggtggtttctgtctcacacggtctgcgcagctgggacatcgcgcacccgcgtttgtggggcacggccatcaacgagaaccgtgtgccgtgggccgatagcgagacgatcactcccgaggaaaacctcgaagagctcatcatgctcgggctgcgcctgcacgagggccttggcctcgaccgcatcaaccgcgccatcaacgatgcaggtatgagcagcacgccccagactctccgaaccgtttcggttgaccaactcgcccccatgatcagcgaaggcctgattaccgtatccgataatcatcgagtggtgcccactcgtcgtggccggttgctcaatgactcggtaatcgaacagttcttcgattacgtcggtgtatgagtcggtggtatggtgcgcggcagtcgccattacccgttcgctagttgtggttacaccgtcagagggagcttttttgttttaccggcgggggagggaaccgcgtaggactacgtccggggcgctttgcacgtagatcaggcggttggcagtgccgccggtggcctccgcgtcatcgcggttggacaggatgctgtccacggcggcctggcccatttcggccagcggcagatgcacggtggtcagtggtgggaacacgtcggcggagtaggggatgtcgccgaaaccggtgacgccgatttcctgacccggctcgatgccgttggtgcgcaacgcggtcatcgcaccgatggccatcacgtcgttgagcgcgatgattgaatcgatgcctttgccgtcgtacagtgcgccttcgcccggcttcagcagtccggatcgggccatttgcatgacggccgcatagccgtcggtgcggctgaacttaccgtttgccacggctttcgggtccacggtgatgcctgcctcgtccaacacttccatcacaccggccagtcgttctttggaggagcggtgtgcgtcatcgcccttgagaatcgcagggcgcgtatacccggaatcgacgataagctttgcgatggcacgcgcgccgacgtcgttcgccacgtccacggccgggaagggcaggttgcggttgagtacgaacacggcatgtccgccggacgattcgtactggatgagttccgtctgcaacgcctggcgttccggcgtgtcggtgtattcgctttcggagatgatgatgccgcgcggcctggtggatacggacttacgcaccgcctccaactcctcgtgcggggtggctgccacgccgatggtcacggagatgccgcgttcggccgccgccttgaccacgccttgcgacacggatgcgaagtagggatcggagatatcggagaccagcagcacgatgttcggtgcagtgcctttggccactgcctgagcataggcgttgggacgatagttgagcttggtggctgcttccatcaccttgacatacgattggttgcgtaccttgcgggtgctgccgttgagcacacgggatgcggtggcgatggagacctgggcttctttggcgacgtccatcaatgtcgctggcgattgcgccttatcgttctgtacagccacgatcgaatcggtccttttcttccctgaaacggaaaacatgtctaaacgcttaccgcaatgataccgcagttttgcttgcaatagtagcattgtggattggaaagcctgaattttgaacaaaaataatcacgcgaattacggaaagcgattaccgttccgcgtatcgtgcggtatgctcgaagcatgacgcgatacttatgtgcccctgactccttcaaagagagcctgaccgccatggaggcggcccgggcgatggctcaggggattgagaatgccgaccacgatgccgaggtccgttgcctccccatggccgacggcggtgaaggcaccgcacgtgcgcttgtcgacgccactggcggatcgatgcacgccgtgccggtccacgacccgctcggccgacctgtcgaaggccacttcggcctgctcgccgacggcacgaccgccgtggtcgagacagccgaagccagcggcctcgcactgcttgaagccaaaaaacgcaacccgttgattgcctcctcctacggcaccggcgaactcatactcgccgccgttcgttccggagccaagcgcatcatcgtcgggctcggcggcagcgccaccaacgacgccggtgccggacttctgcaggccctcggcgttcgtcttctggacgggaacggcaacgatcttaagcacgggggagcggccctcgctgatctggccaccatcgacatcagcacgatggacccggctctcaagaacgtctccatcaccgccgcctgcgacgtgaccaacccgctgaccggtcccaccggcgccagcgccgtgttcggaccgcagaaaggtgcctcccaggccgacgtcgccacactggacgccgcgttggcgcacttcgcgcaggtcatcgaaagccggctcggcgtcgctgtgaacgacgtgccgggcgcgggcgccgccggcggtatcggcgccgcgctgaaaggcttccttgacgccgaattccgtccgggcatcgccatcgtcatcgaacaatccggacttgatgcggccgcgcaatgggctgacgtggtgttcaccggcgaaggctccatcgacttccagaccaagttcggcaaaaccccggccggcgtggccgaaaccgccaagcgccacggcaagcccgtgatcgccgtcgccggacacatcggcacgggcatcgacgaactgcatgaggtcggcatcgacgcggtattcggcatcgcccccggtgccgccagcctcagcgaactgctggctgacgcggccgccaacgtgacccgcaccaccgaacaagtcgtacgaaccctacaactgaagcagcttcacaagctccctctgatgggccgagccgtgaaggaaacgccggaggcgtttccaggcgagggcttgacgacagtcaagccagccgaaggctccataattgcgggacgagctgccgcggcaaagccgtgactgagggggagacttgtggcgcagccgcaaaaaatggcatcggctttcagccgatacagtcattcgtctgcttctctccctcagtcagctgcgctgacagctccctcgtcagagggagccacacaattcggaaaggaagatatgcgcaccatgctgtacaccaaggtgaccagcatgctgagcaccacgggcatcgccagcgagaaatacgccttcggaatcggcgccttttcgaagagttcgttatccatttccgtcccttggtgttttcgttcttcagtcactgcgcgggatgccgttcggcgtgcatcacaggcattgtagaggcaacagtgtggacaacgggcggggaaagtatctcatgatgcggtgagggcgttgatgatgacgcatcgtgtattggtggccgtgtgcatcgtatgtgaacctgtgctggcacggcgtacacacgatgggaaaagaaagaatatatggaccccgttgtcccggttattgttcagttattactgtgttgaattattgcgttattcaattattgtggtgtgccggccgattgcggcctgcgggggattgccttcgtatgtgtcgtgcaatctcatgaatgggatcgttcgctagattcagcgagcgtccttgttggcggcgttgatgatgtcggcgaacatcttggagtcggcgtagccggcgcgggcgatggcgtccataccggagagggtgaaaccgcgaatcatggaatccatgaatgacataatgtgttccttgtcttgacttgcaaagccgtgggctttgcgatgtgttgttgtttacgttatgagacgggccgtgtgtgagcggcgagtcagggaagaggctcagcgagcgttcttatcggtgtcgttgatgatgtcgagaatcatctgggagttggcgtgaccggactgggccagggaagtggcaccgtacatagccagaccgcgaatcatggaatccttgagagacatcatgtttcctttcgttggtcaaaaccttgtggctttgagttttgtttatcggtttctttctgaaaccggtttcagaataacgcagtccgatgacaaacgcaaggggactattccgctctcggcgtttctggcggaatatcgccgttctatagataccgttcggtagttaagaggctgtctagtcgactttctgacggtcttgttctgggcgcatggttttcacgaaatggcctcatgtcgcggaaatcgtacgctgagtcgtcgtaagcgtacggtcttcacgaaatggggtctcatctcgtgaagaacgtacactgagtcgttctgggcgtacggttttcacgaaatggggcctatcttcaccggattttgggcacaccggccttgagcagcttggtctcaagattgatggggcgtagcagatcctcatagaacacatggacgatttcggtgacgccctgttcccggagatgccgatcacgtctgcggtcgtactccattttcgcctggaggcttgcgcgattcttgttgctggtgtcggcgtatttggccatgccgtcgtattctgccacgatgatgcggccgtctgcgagcttccaacagaaatcgacgcgatatggcattgcgggattgtcgggattcatgaactgcacctgcagcaggggaatgccgaaagacaattcggtgatctggccacgcatcaatgattcgccgccgttttcgctcaggggatccgcgtacttcagcagcttggtcacggagacctcgtcgcagacgctttgaatcatcagcgactgcacctcttcgatggtcgtcagggactttctcagagccgaatcgtatatgggcagcgcctgtgggaatgggaatgccgcgcagtcgagcagcgttcgcgccggagtcgtcaagagaatgccattatgcttccgcgtcggaatccgattgatatagatgcggttgagacgcgcctcgtctccgccgccgatgccggacttcgaggcgatgtgcactgtgccgtcgtgcagggaatagttgtgctgcagtccgtatacgcacgccgcactcaaccccgcaaatacccactgagggtggattgcggacagcgcacgtatgacctgcaatgactgttgctctctggtcatggtgttccaaagtattcggtcggcgtacaggttcttatacggtgacaccagctccccggcatgcaggcgacgtttcagggcgcgccgttgcgcatcactggtgccatagcagcagcgacgctcctgcttcgcctgctgcagcagtgcagaaacttccttgtgttctttcatatctcgacgctaagggtgattttgattgttgcacaagctcaaccggcaaatgtgaatactatgtcacgcgaattgttggtgtggataacttgaatcgacgtcgacggctttgccgacggtcttgtcggaggcgatattagcctaggacaccttgctgcgccgccttccataccgagaacagtcatcagtgacaccgagggcatcttcagcgtatgttcttcacgaaatcagctgccatttcgtgaaaaccgtacgctcagaatgactcagtgtacgttcttcacgaaattagggatgatttcgcggaaaccgtacactcaccgcaactcagcgtacggttttcgcgaagttattgatttggatataggttccccgtcatgaactacaatgaatcgcggcgaaaaacggggaaccgaagtcggagcgcggctgaacggatatgggtgtgactggatgactgccatggtgatgccggttctccttgacgtacgcaacaacaacaactgacaacaacaggggagacaaggatggcgagaagtgcgggccgcacccgaccggtgatcaaggacgtggccagactggccggagtctcggcaccgaccgtctcccggtatctcaacggcaccgtcaatgtcaccgaagacaagcgtgaacgcatcgccaaggccatcaaggagctgggctatgagccgagcattgtggcgcgcgccctgtcgaaccgggagatggactccgtggtggtgttcgcggccaatccttccgccttctccacgtccgaaacgaaccatggggtcgaggccgccgcccgtaaacgtcggttcctgctcaatatcgtttctttggatgagtccgacatggactccgtcaaggctcgtgtgcgcatgggtttgtcgatcaggccggcgggcgtgatcgtctacgagtacgaccgggccggcatcgccgcactggaatacattcccaaagatatgccgatggtcgtggtgggtggcagcttcggcgacggcgaataccagatcatcaacgccgaaagggatggtggccgttggatgaccatgcatctgctggatctcggccatcgcaccgtgttccatgtggggcgcccggaaggaccgaccgataacacccgcaccaatgggtggcgtgacgcgctcaaggagcgcggcgtcacggtacctgacccaatcatcgtgcccgacgatgatttggaggagtcggtcaaggctgggcgcaccttgggccgtcgtggtgatgtgactgcgattttcgccgacaacgacgagaccgccatcgctgtgatccgaggtctaagggaggttggtcgccgcgtgcctgctgacgtgagcgtcgtaggctttgacgaccgcaacttcggtgccatgtggaatccggcgctgaccagttacacccagaacttcctggacatgggggagcggtccttccggatgctgttcgaacagattcaggccaagcgtgccggcgatgacgcgccgccctcgcaggtcgaagtggtgcaaggcaagccgtgtctgcgtgcctccgaacgcgcgtacggcgacggcgaaatcgcgtagtcgatggggcgtgcgtatcaatcgatagtgactgtagcgcattcatatcgtgacgaggagtctcccatgccgaactgtaagcgcttaccttaaatagttcgtaatgtgatttacgtcatactaatagatgttctaaatcatagtgttatgcaaggattccttgtggaaaatggctatttatcaacagttttcgaaaagtccgcatgatgggcgactgtgagcacgctttatggtaatcgctttccgtagtgttattgttacagtgtgacttttgaacaatcggtaactctgaagactcagccccagacctcgggcactatctcagcggcagacgccgcgatgcaatcggcccgcgacgaacgcatccccggcaaactcatctgcgcgatcgtggccgtcggctcactcgcattcttcggcatcctgaccgaaaccgtgatgaatgtgctgttcccgcagctgatgggcgtgctccacatcagcgaggccaccatccaatggctcaccaccggctatctctggtcgtgtcgattactgtgccgctcagcgcatggctgcgccgtcgcttccgccagcgcagcatcttcctggcggcaacgcgatgttctccacgctgcagcagttcacgggtgcggccggcaccactgtggtgggctaccgtgatctccgtgttccagtccggctcgggcaaggtgggttccgccggctatgccgccgccaccgtgaccggcgcatagattgactacgcgatcatggctgtggtcatcgttatcgttatcgtgttcgtcgccatgctccacgccctgcgtaaccggaagtagatggtaagtcgagtggcaccatgctaccgcgcaatggctgggcatggagttttggctaggaatcgttcgacaggcgttggcgcggccgctgagagcattcgcgtcgaaaggtttgccggagctcgttcggcgtggaatgggccgattcaccggtgattgttggtcaaacagccaatgctgacccttctgccaatggttagcgaggttcctatcataagcatttcggagagcgatctcgaaaaaggcgacatccttcacgaggatttgaccaaggtcaacattccactcgtataaagtaaggctgtaagcgcatcttggtggcaagagtcaaggtatgtacggaatcgcggggcggaaagccactcctcaatccactgcggattggtaataacggatgattgtaacgcatgaatcacgaggcccccttacctcgtattgcaatgccccggtgacatgaaaaacggcggtcaacacggggcttgtacattaaggatacaggaagggtagttataagttgctgatatgccgttttttacgatagtcatcggcctctcccatacggcggaacaggaactgacggatgccgagatgccgtgattcggcgggaggacctgtactggcccagtccttctgctcggtagcggtaccgctacgccgactcttcccgacgctccagtgccgccgatatcagtgaatgcccagcctgatgttggtagagttaaggctattggcttggtctcgacggtgagacttctccaatggccaatatgcactgttgcaaaggagtatgcggtatgcaaccaatcaaagccattcaatacggctgcggcaaaatggcgaagtacacgattcgctatatgcacgagaaaggcattcaaatcgtcggtgccatcgacgtgaatccggaagtcgtgggcatggatgccggtgtgtttgcaggcatcggccccatcaatgtgccgattcgcgccgatgccgaggctgtactcaacgagtgcgacgcggatatcgcggtagtcacgctattcagcttcgagaacgaaatcgccaccatgtgcgagcagtgcttggcccgcggcatcagcgtgatcaccacctgcgaggaatgcatctacccgtggaccaccgatccggccaccacgaaccgtctcgacatcatcgccaaggaagccggtgccaccatggtcggctccggcatgcaggacatctactgggtgaacatggtctccaccgtcgccgccggatgccacagcatcaagaagatcaccggtgcggtgagctacaacgtcgaggattacggcctggctttggccaaagcgcacggctgcggtctgaccgccgaggagttcgaggccgagcttgcgcatcccgaaaccgtggtgccctcgtatgtatggaattccaatgaagcgctggcccagaagcttgggcttaccatcgtatcgcagacccaggccagtgtgccgtatttcagcgatgtcgacgtgtattccgagacgatggacgagacgattccggtcggcaaatgcatcggcatgtccgccgtggtaaccaccgaaacgaatcagggcatcacgttggaaactgcctgtatcggcaaggtgtacgggccggatgatggcgatatgtgcgattggaagatcgagggtgaaccggacgtggagttccacgtggtcaagccggcgaccgtcgaacatacgtgcgccacaatcgtcaaccgcattccggacgtgctcaacgcgccagccggatatgtgacggtcgatcagctcgatgaaatttcatatctcacgtatcccgccgcgctgtacgtggcatagacccatattttcagggatgaaggccggcactcataagggtgccggccggtatcaggcggccagagtcgacgtgcgtggcatcacctggaactggatatggtcatgggtgatgtcatcgggccgttcatgccgtaggttcgactcgatcagcgtcaccatgcgatcgataaccgtacgagccattgcggggacgtctatcgtcacagtgctaatgggtgggttggcgcagtcggagaaggggatgccgtcgaatcccatgagccgtacgtcgtcgggcacgcggatgccatgttcggtgagttcgcggagcgcgccgatcgctatggtgtcagacatgcacaggatgccacaatcgcccgggacaggcgtcaggaccgcaagcagcatcctgctcggcatcggcggcgacatcgccaacttcaaaagcgcggcccacctggccgcccacgccggcatcgctccggtcaccggccagtccggcaccagcatcaagaggcgagaaaccctccagacggggcaacaaacgcttatagactattgcgccttgtataaatgcgaactgccagtcaaccttaccgttgactggcagttcgcatttatcgctcccgctggcgggagctgtcatgcgatgcatgactgagggtggtccacagccgccaatccgtaacatcacccaacgcagcatttcacgatacggacgtttccgtatcgtattttcgtgtggccaaatagacatttcgggcgaaaaagttcgaaatacccccataactggccataaaaacaattgcttgagaatcactattgacttttatggcgactcggtatatggacacgcgaaacgaaaatgacatggagcaacggtactgtgtcaacagcaatgaacgaagaggcacgattcccttacgtgcccacaagcaattgaggtgattccggtgacattcaaagccccgctcgatctcacggtccacgctccggacggtatgtatgatcccgccaacgagcatgacgcctgtggtgtgggtatggtcaccactttgaacaagcgtcctgaacgcaaaatcgtcactgacgccattgaggtactggtcaatctcgaccaccgcggtgccgtgggtgccgaggagaacacaggtgacggcgccggcattctgatgagcatgccggatgagttcatgcgtgccaccgtgcccgccgaactgcccgaagccggccactacgccgcaggcatcgccttcctcgaccgcgacatcgaaacctccggtcagcaggaacaggccattgccaagatcgtgcgcgaggagggccttgaagttctcgcatggcgcgtggtgcccaccaacccggacggcctcggcctgcaggcccttgccgccatgccgggattcaagactctcgtggtcgcctctccggacggtgctctggccggcgtggacttggatcgcaagaccttccgcatccgcaagcgcgtcgagcatgaggtaggcgtctacttcgcttccctgtccgcccgtaccatcacgtacaagggcatgctcaccaccatgcagc

SEQ ID NO: 3441 - DNA, 23783 bp, Unknown
  R151_18m  MAG No. k141_54755
atcatgtactcctgaatgtcggtggcgaagtcagcgtgagcgccaccgttcatgatgttcatgttcgggaccggcaggatgtggccgttggtgccgccgatgtagcggtacagcggcaggccggcggactcggcggaagcgtacagagcagccagggagacacccaggatggcgttggcgcccagcttgcccttgttcggggtgccgtcgagctcgatcatcaggtcgtccagagcgcgctggtcagcagcgtccatgccgatgaccttcggagcgatgacctcgttcacggccttgaccgcgttaagaacgcccttgccgccgtagacggacttgtcgccatcgcgacgctcccaagcctcagcttcaccggtggaggcgccggacggaaccagacccttgccctgagcgccgtcttcggtctccaggtagacctcaacggtcgggttgccacgggaatccagaatctgacgcgcgtacacgctttcaattactgccacaactactccttaaaacggttgtgtatcttgaatgacattcttaagagtagtgcgatttgtggacgttgtgaacaacacgcccaaaatttagtgttagcgctcacaatgccgatgcgccgcctgattgcaaggcagtacggacgaaatcgctcagtcgacgtccttgccattgaggtagtcgatttcactgtcggacaatttcagttcgctggctttgaacgagtcctgaatctcctgcgggtttctggccgagggaatcgtgaacagatattggtattgcgcaagttcccacgcgagcgtgacgcgctggtaggagcagtcgtgggacttcgcgacttcgcggaaccgatcgaacagatgctcgttgaacgggtcaaggaatccaccgagcggcgaccagcagacgaaagccaaaccgagtttttcgcaggtctccaacgtgtgttcggggtcgcggtgaaccggggagaactggttctggacggccacgagacgatcgcccaaaatgttgtgggcggcttcgatgtccgcgttgtcgattctggagataccgaccgctttggccacaccttcgtccacgagctgcttgagtgcgcccatctggtcttcgtacggcacctgcggatcattgcagtgcgagtagagcagatcgagcgtatcgacaccgaggcggcgggctgattccttggcattggcgatcatggtttcgggtcgggcgtcggcctgccagccgtagttgccgttgccgtcaagcgtgcgcagccagccggttttggtggctacgagcacctgatctttggggccatgccacgagtgcagagcatcgcggaccagatattcgccatagcccatatcctccggttcgccggtgccgggtgcgctgggcagataataggaccaagccgtgtccaaataacggactccggcatcgagcgcggcatggatggtctcgatcgcctgatcacggttggaggggcgcccctcgatggcgagcgccattgtgcccatgccgatgcggggaatctcatagccggcaagtgttgccgcgtgttggtttttcatcgttgtggcctccatgccaagtcatcgaggagttggttagtccagaggactacctggtcggagctcatggggccttggcccagggaaccggtgaacggggtgggtacgatgagctggtgggtgaccgggcggtattgggcgcctttgtaaatacggcccatacgcatctggatggattcgggcgggtcgatacggccgatgcgcacgcggttggattgcgcgagaatctccgaaatgccgagcttgcgggccttgaacttcagacgggccacgtcgaacagagtctcgaattcgaccggcggcttgccgtaacggtcggtaagctcctcttccagatccttcaaatcggcctcgttgcgagcggaggcgagcttgcggtacgcttccagacgcagcttgtccgaatcgatgtactcgatcggaatcgacgcttcgatgggcaggtcgatggacacggccaccggctcgacgttctcttcgggctccttgtacttctccacggcttcggacaccatgcgtacgtacaggtcgaagcccacgccctcgatatggccggactgctcgtcgcccagaaggttaccggtgccgcgcaattccaagtccttcatggccacatcgaaaccggagccgagcgccgtgttctgcgcgatggtggcgagccggtcatgggactgctcggtcatcggcttggacgggtcgtacaggaagtaagcgtacgcgcgctcgcggccgcgaccgacgcggccacgcagctgatggagctggctcaagccgaaacggtcggcatggtcgacgatcagcgtgttcgcattggagatatcgagaccggtctcgatgatcgtggtgcacacgagcacgtcgatgtcgcgatgccagaagtcgcggatgatctggtcgagctgcttctcccccatcttgccgtgggcgatgccgacgtgcgcctcgggcaccagcgtgtggatcttgtcggcgatggacgagatatcctgcacacgattgtggacatagaacacctggccgcctcgcagcagttcgcggcgtaccgccgcggtgacctgcgcatcctcgtaggcgcccacataggtcagcaccggcaaccggtcttcgggcggggtggcaagcgtggacatctcgcgaatgccggtcacggccatctccagcgtacgcgggataggcgtggcagacagggacagcacgtccacgttggtgcgcagggctttcagcgtctccttgtgttccacgccgaaacgctgctcctcatcgatgatgacgagtcccagatccttgaacttgattttcgggttcagcagcttgtgcgtgccgatgaccacgtccaccgtgccggtttccagaccctcgatggtctcgttgatctctttggtggtctggaatcggctcatggccgccacattgaccgggaaaccctcgaatcgttcgctgaacgtctcgtaatgctgctggacaagcagcgtggtgggcacgagcacggccacctgcttgccgtcctgcacggccttgaaggcggcacgcagtgcgatttcggttttgccgaagcccacgtcgccgcagatgaggcggtccatcggcacgggcttctccatgtcggatttgacctcgtcgatggtggtgagctggtcggcggtttcctgataggggaaggcatcttccagttccttctgccatggggtgtccgggctgaacgcgaagcccctggcgcgctggcgggcggagtacagcttgatcaggtcgtcggcgatctcgtggacgtgtttgcgggccttggccttggtggccgcccagtcggagccgccgagcttgttgagcttgggggcttcggcaccgatgtatttgctgacctggtcgagctggtcggtggggatgaacagtttgtccgccggggcgccgcgcttggaaggcgcatattcgatgaccaggtattcgcgagtggttttgttggcgccggtgccgatggtgcgctggcgcatttcgatgaaccggccgatgccgtgctgctcgtgcaccacgtaatcgccttttttgagttccaccaagtcgatggccttgcgccggcgtttcggcgttttggccacggccacggccgaagtgcggccggtcaggtcgcgttcggtgagcagggcgattttggcggctttgtccacgaagccgtcgatggcctgagagcggatgacgtcgaaattggcgatgccggtagtgttgatcgcgcgcctgagcctggccaaggtgccggccgcagcggcggtgatggtgacgtggaagccggcgtcgagcaggccttcgatgccttgggaggccttggcctcatcccctcggaattcggccgggttctgggcgtcgagctgcacatggccggtcagcgtggtgtccacgccgaaactggtgaggcgaatcaccggatgttcggagtattcgagggagctgatggtttccgcatagtcgaggaagctggctttgtcgaagctgatgggcgcgccggcgccgtggccggaagcggccacatgccagctggcggccaggaactcgttcgcggtttttgccaagtcttcggcggaacggcgcagtttctccgggtcgctcaggaggatcacggcgtgcttgggcagcatggagcccaccggttccagatggtccacgagtgcgggcatcagggattccatgccttcgaccggaatggcgttggcgatggattcgagcatgtcctcagcattgggaatcgaaccgaccaaggctttggcgcgggcgcgcacggcgtcggtcagctgcagttcacggcatgcggtggcccagatggtcttgaggccgtcgccgtaggtacgctggtcggaggcgtggaattccttgatggtgtcaatttcgtcgccgaagaattcgacacgcaccgggtgcggtgcggtgggcgggaacacgtcgaggatgcctccgcgcaccgcgaactcgccacggtccatgaccaggtccacgcgcgtgtaggcgttttcgatcagacgtttggcggcttcgtcgaggggcaggtcctcccccacggtgaacacgagcggctcgacgtcgcccagtccttggacgaccggctggatgagcgagcggatcggcatgacgagaatgcgaatcgggccgaacatcggatcggtatcgctcggatgcttgagtctgcggaacacggccatgcggctggccacggtgtccgcgcgcgggctcagacgctcgtgcggcagggtttcccaggcttcgagctgggcgatgtcgtccgggtcgccgtcataccaggagcgcagcgagcccacggtctcttcggcttcgcgaccggaggccacgaccagcacgaccggcttgccgggtttgccggtcacaccctgcccgatggcggcggccaaagccgggcgcaagccttcggaaacaccggccagaacggaattgtcgatgtcgtccgaaacctcgatgtcaccagtggcgagtctaaggaaggtcttgtcctgttccagctcagacaggatgcctaccagtgagccgttgatcaggtccgggtgcgtcgcctcaccggccattgaacttctcctgggtcttggcaagaccgcggaagatgatgtcctcggcggcgtcggcgccgtcagccaggaattcgggcagctgcttgcgctggtccggaccgaatccgcccagcacccagttcaccgtgttgtcatgcgcgttcgcaccgcgcttggagtgaccgacgcccatgcgcacacgcgcgtatttcggcgtgccgagggaacggtcaatcgacttgatgccgttgtggccccctgcggagccgcctgccttgaccttgatacgaccgaattccaagtccatgtcatcgtgaatcaccacgatatggtcgggctcgatctggtaataggcgctaatggaagccaccgcattgccggaatcattcatataagtcagcggcttggccagaaagaacttgacggtgcggccgtccaggttcatcacgcttttaccgagcatggccagacctttgtggtcggcgaagttcaccgtccaacgttcggcgagcacgtcggcggtcatgaagcccatgttgtgccgcgtgtcctcatattttttgccgggattgcccagtcccgcaatcagccagaaatccgatgccataatccactcctcgtccgtcttcctatattcccgtatgcacgttctgtacgttccgtacgtcatgcgcgcgttcgcctcgcgcactggcccatgcccggccggattcaaccgtcaagattgtactcaacgccgccgtcaagccttggaatcggcaagcagcagggcacggcattgctcggcatccatcgatcggaccgatgaatggtgaaacgcttcgacgtcacgagtcacgatgacgtcggcgtcattgtcctcggcaacggcacggatgagcccgtcctcgaagtcgggctcatcggatcggtacgacatacacgcatggcgttccataagtggacggatgtcgaacaattccatcagtccaccgatatcgtctcgcgccgcccgctcctcgccataatgcttgcgcaacacgcaatacacgtcattcaatgacgataccggcgccatgatctcaatgtttggctgtgcaacggcttccatgagcaaatcaacacattgtttatggaaaggcgctcgtttgtcattgcacaaatcgagcagaatactcgtgtcaaacagcagtttcatcccgtcccccaaatcgttccatacgtgcctgcgcgagaatctcctcatcctaaagatcgccttccgcctccggcaaattccggtcggcgaaacgttgaatcaactcctgctttttcctacgctcccgctcctgaatcagggagagcgtcagacgctcgaattccggcagttcccccgtatccgcaaggtagtcggtcagatcacgaatcaggtccgaataggtgcgcccattacgcttaagcactttctccgcgtcgcgcttccgttcggcattgacgcgcgccgtcaccatggccatagtcatatgcaccttcttgtaataccagtattacaagagatggggacgggtgaatcacgtctattaggcggtccgccagcgaccttttcgcgctgtttgccgttgaggtaccagtaggccagcaccacgaacagggccgccgaggatattgccgagcgtggctgcggacaggttatagaggattcccgatggtgtcttcacctgcgcaaccaactagcgatgaattcaacgcgacatcagccgtatctcccctgcctgcgccgtcacctgaacatattgcaaagcgctattgcaccaattgcggcacgccttgccgagtctccgcacgattctgcccaaactgcggcaaacagttggactgatatgtccaccaatgccgtatatcgggcatcggtgacgagccttgattgtgcaacgcctcacgcttccctgcaatcggatgacatattgcgggacggcagcggattttgggcgtttttggcgtggcatcccgcaagcgttatcgcacgttatctgcaccgaatcataagaatggcagaattccaatgatttcgcaggaagagttgcgggacgcgagctatgtgcatcgtttgacgtgtgtggcatcccacgtgattgcgggataccacgtcaaaacggacgaaaatcgcgtgccgtcccgtagtttgccgttatctgggataagcgcgtccgatatatggcgttcgaggaaaagagcagatccgatacaactttttagtgttataggacaccggaatccatggagagcaagggtaaaccgcctcgggcctacaggtccaaataccagtaggacatgtcccgcatggtgccggtggagtcggtggcagcgacgggcatgaggccgaattgggtgaagccgaagcggcgcatgagggcaatggagccgacgttatcggcgaaaatgatgccacaggccttgcgcatgtggcgggcccgcgcctcggtgagcagcctgtcaagcatgaacgtgcccactcccctgccttgccatgccggatcgatgtaataggccaaatcggtgacgccgtcatacccggcacgatcgtagaacacggagagcgcaccgaagccgatgattgaaccgtcttccgattccacaacaaaaacgccgtagggcggcgtatgggattcgacccaggcgcggcgttggtcgagggtgcgcggggtgaggtcggcggtggccccacccgccaccaccgcagcgttgtagatgtcggtgatggcttggatgtcggattcgacggccggatggaaggtgtatggcatgaagttcctttgaatacgcaaatagcccgtccttatgataaggacgggctatgtcagttgaagtaaccgactcccttcagtcgccttcggcgatagctcccctcaccctgagggaagccaagttacttgtcgagctcgatggccttgttgagggcgtcttcaagctcctgctgcgccttgccgtaggcggtccagtcgccgttcttcatggcggactggctgtccttcatggcttgggcggcatcgttcaacgcctgctggagttcggggctgcggtcggaagacgagccggaatccgactttccgtccgtggtgccggactgaccaccattggtatcggaaccagattggtcaccggacacgttctcggcatcgcccgcggccgcaccggaattgccaccgaacacctgatccaaggcctcatccaacgtatccgcgaatccaacctgatcaccgaatgcgaccagcgtcttcttgagcaacgggaatgaggtcacgcccgaagacttgacgtacacgggctgcacgtacaccagtccgccaccgagcggcagggtgagcaggttgccgcgcaccacttgcgtgtcgccggattgcagcaggttcagttccttggatacatcggcgttggcgttgaagttgttctgcgcctggccggggcccggtacgttcgaatccttgggcagctcctgcaatcggatggtgccgtagttcgagcctatcttgcccttctcattgccggcatccgagtcgaccgacaggaagccggtcaggatctcacgggtggactggccagccggaatgtaggtggaggtcagcgagaacaccggttcctcggtgccaccggtctgcaaggtcaggtagtacggcggctgcaggatgtcctggtcctgctgggactgggattcggtcggatcgaccggcgtctgccagaagtcttcgcctgagtagtactggctggcagaggtcacgtggtacttggagagcagctcgcgctgtaccttgaacaggctttccgggtagcgcatgtggctcatcaggtcgccggagatatcggagagctggtggtactggccagggaagatcttctcccatgccttgatcaccggatcggattgatcccacacgtacaggtccacggaaccgtcgtaggcgtccacggtggccttgaccgagttgcggatgtagttggccttctgagagcccagggacgagaccgttgcggaagagacggtggtggaatccttggtggcggagccgaggtcggtcatctgcgagtatgggtaggcatcagaggtggtgtagccgtcgacgatccacttgacgcggccatcgaccacggccggatacacacggccgtcaagcgtcaggtacggtgccaccttggccacgcgctccttgggggaacgatcgtaaagaatctgcgattcgctggtcacacggtcggagaagagaatctgatcggagccgaagcggatagcgtagagaatcctggagaacaggttgccgaccgaagggccgccgtcgcccttgaacgtggtcagagcaccttccgaaccggtcgggtagtcgaactcccaagcctgcgtgccctccggtgcgccgacgatcgagtattcggtggcgttcggcgagaagtagatgcgaggctcatacttttcggattcagtgagcttgccctgagcagggatgccggattcgaagaattcgggctggccgtcggcggtcaccttgttgccgtaggcggccaccacgccgtaaccgtgggtgtacacggtgtggtcattgacccagttgcggttgtcattgccggccagatcgagctcgcgggcggcaatcacggtgtcctgggagacgccgtcaatctcgtacttgtcgaccgccagggtgtcggcgaaggtgtagtactgcttggactgctgcaactgtttgaacgtggggctgacgacctgcgggtcgagcagacggatctgcgcggtggtgtcggcctccttggccagagcgccctgctcacccttgtcggtcaccttgtattgctcggtcttgagcttgtcaagaccgtaggcggcgcgggtggcgtcgatgttgcgctggatgtaggtggattccatctcctgtgcgttcgggttgacgcggaagcgttgcaacagcaccggccatgccacggtgagtacaagacccaccacgaccacgacggcaatggaggtcaccggcacacgccaggccttgagcgcggcggaagcgcgcacgccgatggacgcctggccttcgagcgtgtgggagcgcatgagccagatgcccagcaccacgccgaggatggcggtcagcacggccatgatgaaggtgacggggatgttggcatgtacggcggtgtaggaggcaccggtgatgcgtgaaccctgcacggtgagctggtcgaagacgccaatcatctggcgcactgcccaagcgaacatgttgagcatcagccagatgccaagctggcgacggcaacgcttggtaatggagaacaggccgcgtccgttaaccggcatggtaatgcggataccgcccatcagcacatgcgtgaccacggaaaacacaaggcccacgcccagcagcatggccacggcggcgagcacgagcttcaggcccggcagcacgaacacgtagaagccgttgtccagaccgaactgcggatcggtggtgccgaacgactgcgcgttgaacatgagcagaatctcgctccagttcgcgttaaactgggaaccgaagatgacgccgacgatcagcgaaatcaccacggccacgcggcgagcggttttcgagctgacggatttgccgacctcgaccacatcgccgttaatgcgaatggtggaaccgtcggccgaatcagggcgtgctcgaatggccagccaggcggaaacgaagccggtcagggccatgagcagcgcgtaggccacccacagaccgattttcaccccgagctgggtccagaccacggactggaagccgagctggccgtaccacatcagatcggtgatgaatcgggacaggccgaagaacagaccgacgatgatggccaaggccagcaccacgccgatcagaatcttgctgccacggctggctcctgagccaccggacgctggcttacgggtgatacgcggattggccggaccacgtggagggcgggatgacccggaggggccagcgttggtgttgtgggccggaccgtccccatcggcctcgacatcgaggatgatcggatcgtcattgttcgcattgttgcgtcgtgaatcgccgccattgccgaacagtactgagaaaggatcgttaaaagacataactcaagactatcgaaagggcgggaggtcggttatgccctgagcacagaatgaggcaacatcctgttctacgctctgttctacgcttgccggtatggacagacaacggccacaacatatgcgtccctcagcacacgccacacgccaacttcggcacaggagcattccaatcgtggcggcaatatgtgctttggcggtggtgttggccggtgtggcagtctacggatggcatgtcggatggttcgccaaatccacatcaaacggcaacaccaccactccccagacctcccagacgagtgcgttaccgcgcaccgacgttccttccccgaagaagaacgacgatccggcggcacaagcccaacgtgcggtatccgccatgacgcttgaggaacgtgtgggacagttagtgatggtgccgttgttcgccggttccgaaccctcctcgttggcttcaacaatcgccgacgagcacattggctcggccattctcattggcaattggaataccggcgtcgatacagtcaagaccgcgaccgcgcaactccaaggatatgcgccggccggcaatcgtctcatcatcgccaccgatcaggagggtggtcaggtacagcatctgactggtaccggtttcgacacaatgcccagtgccgttgagcagggcacaatgtccgctgacgcattgcgtcaatcggcaggcacgtggggttcgcaattagccactgctggcataaatgtcgatttggcaccggtgcttggcacagtggttggcaatcgtgcctcaaatgctccgattggcgcgctggatcgtgatttcggattggatgcggccggcaacgccgaacatggcatcgccgttattgaaggtttgcgagacgctcaagtcggtgcggcggtcaaacattatcctgggttgggcgcggtaagcggcaataccgacttcaccaccgaaggcattctggatacgaccaccacgttggacggggccgaggcaggtgcctttgaccaggcgattaccaaggccgatcctgcaatggtgatgatgtcgttagccacgtatcaatccatcgacccgaataatccggcggtgttttcttctacgattatcgacggtcatattcgcaacgtcctgaagtacacgggcgtggtgatttcggattcgatgtctgccgaagcgttgagcagctacgatgtaagccaattgggagtaaatcttgtcgaggcgggcggcgacatgccctgcatcggtcagacggattatgtaaagccaattgtggacggcctcaacgaacgggcggagtccgatccggctttcgcttcgaaggtgacggcggcggcgactcgcgtaatgacattgaaaatcaagatgggactggcctgaccgttcatccttgcactggcgaggattgatgcgcgctgattcgcgctaatcctcaccagccctcgtacaaatgcacactagtcctcgtacgaatcgtcagtcctcgtacgaatacagaccatgcttgccgatgtattgcaccacgccgtcgggcaccagataccagaccggctcgtcgtgttcggcgcggcggcgtacatcggtcgaggagatggccaaggccgggatctcaagcgtatcgaccttgccttcgggcaaggtcacgccgtccgggctggagtagccggggcgcgtgacggccacgaagtgagcgaggtcccacatgaggtcggcgtccttccactgcatgatttcggccacggcgtctgcgccggtgatgaagaacagctcggcgtcgggatgttgggcgcggatatcgcgcagagtgtcgatggtgtaggtgacgcccggacggtcgatgtcgacacgcgagacggtgaatttggggttggatgcggtggcgatcacagtcatcagataccgatcctcggcgttggtgacgtgcttgtccagcttgaacacaggtcggccggtgggcacgaaaatcacctcatcgaggtcatacacccaggcgacttcagaggcggcgaccaagtggccgttgtggatcgggtcgaacgtgccgcccatgatgccgacgcgcaggcgtgtatgccagttgccgcgtgcggaaagcctgcctttgccgtggctgctggccccggccggtacggacaggtcggacatgcgccgttcggtttcgccttgggtgacggcaatgatttcggcgggctcggcggattccactgttttttcggactgaactgacgcagccgttttgtggctgccggtaacaccactcatgcctggccgccctcgccggcggcgtcatcggctgattcggtttcctcttcgatttcgccggcggagggattgtcttccttgggatcgatcttgcccatgtcttcatcccattcgtcttggaccacgcgacgaatctcggcgaaggtgggcagcgggaagtccggctggtagaggcggcggacctcggccacgcgctcggtgatgcggatgagcgtgtcggtcatgccgtcgaggtcgccgtcgtgctccatctggctgtatttgccgatgtagccttccatgagttccatgtgttcgcgcacgatcttgagctgggcatcgttgaggtccacgacttcgggtgaatcggtctcgggccagccgatgagcacggcgtccgcgtattcgagcgacgcacgctgggcggcggaggcgatgccgtcctcaatctgcacgaggaacacatagcggacgatgctgagccgttcggccgcgatcttcaggccgagcttgggatcgttgaggtcgatgtcgggccgcagttcacttgccttgtttgccgtgtcagccgtagtgttcatgttgccgtcctcgttcatgcgcgcacctggcctgttccgtaaccgatccacttggtggtggtcatctcccgcaatcccatgggaccgcgtgcgtgcatcttctgcgtagaaatgccaagctcagcaccaaagccaaacacgccgccatcggtgaagcgagtggaggcgttgaccatgaccacggccgagtcgatgcgcttggcgaattcctcgatggccgcataatcctcggcgatgatggattcggtgtggcccgtggaatgcgtgttgatgtggtcgatggccgcgcccagatccggcaccaccttgatgcccatcttgagggccagatattcagtgtcccaatcctcctcggtggcgcggttgaggtcaaggccctcgatcgccgcgccggagatgatgtcatacgacgtggtgtcggcctgcagtacaacgttcgcctcggccagagcggcggcgatctgcggcaggaattcggcggcgacatccttatggaccaatagcttctcggcggcattgcacacacccacgcgctgggttttggcgttgatgatgatcaggatggccttggcgagatcaccggacttgtcgatgtagatatgcacgttgccggcaccggtttcgatgaccggcactttggagttgcgcacgacggcttggatcagacccgctcctcctcgcggcacgagcacgtcgatatggcctcgcgcctccatcatggcggtggctccggcgcgtccgtactggtcgacggattgcaccagtgcggattcgaaaccgtgtgcttcaagcaccggggcgatgacgcccagcgtggcagcattggtgcgttcggcggcgtgaccgcctcgcagcaacgcggcattgccagatttaaggcacaggctggccacgtccacagtgacgttcggccgggcctcataaatcatgccgatgacgcccatcggtacgcgcgtctgggtaaggcgcagaccgttgggcagattgtatccgcgcacgatttcgccgaccggatcaggcaaggtggccacatgacgcacgccttgggcggcggcggccacgcgcggcacgtcgaacagcaggcggtcaagcttgcccgcatccatgccgttttccttggattcgagcatgtccagcgcgttggcggcttcgatgtccgcggcgtgctcgtccagcgcgtccgcaatggcgagcagcagttcgtttttggcttcggtatttgcctgtgcaagacgctcctgcgcgcgtgcggcctgatcggcctggcggcacaccgcgtcgaacacctcaggactcaattcatcgctcataacagtcaagcgtaactcacaacgcggctgattgcttactccgacccgcttgttatgggatgtctgacgttttgaatcgcaaacagaaccggctcccctccgtctcaggcgggaagccggtgacgtgatgcgctccggtcagcgaatcatcactaaccggtacaccacggtggattagcgaatcagcaaatcagtggatctggtccaggtcggggtagagcgggaagtcttcggcgagcttgtcgacgcgggccttcagcgcggtcacgtcggcggacggtccggcggcgagcgcggtgccgatgatatcggccacctcctcgtattccttcggcccgaagccgcgggtggccagggcggacgtgccgattctcaggcccgaggccaccgaggccgggcgcgggtcgaagggcacggtgttgcggttgatggtgatgccgcaggcggcgagcagatcctcgccctgctggccgtccatctcgctgttgcgcaggtcgaccatcaccaggtgcacgtcagtgccgccggtcagcacgctgatgccgttggccttgacgtcatcggccagtagtcgttcggcaaggatcttggcgccgtcgagcgtgcgctgcatacggtccttgaattcgggggtgccggccaccttgaagctcacggccttgcccgcgatcacatgcatgagcggaccgccctgctggccggggaacacggaggagttgagcttcttggcgtattcctgcttggcgaggatgaagccggagcgcgggccgccgaaggtcttgtgcgcggtggaagagactacgtcggcgtacggcacaggactcgggtgcaggcccgcggctacgagtccggcgaagtgggccatgtcgacccagaatttggcgccgacctcgtcggcgatttccttcatggccttgaagtcctcgatgcgcgggtaggcggaccaaccgccgatgatcatggccgggtgggtttcgagcgcacgctggcggatgatttccgggtcgatgcggaaggtctcggggttcacgccataagcctcggcatggtagaagcggccggagaagttgattttcatgccgtgggtcaggtggccgccgtggtcgagggccaggccgagcacggtgtcgccgggcttgacgagcgcctggtagacggcggcgttggcttgggcaccggagtgcggctggacgttggcgtattcggcgccgaacagggccttggcgcgttcgcgggcgatggtttcgacttggtccacgtattcgcagccgccatagtagcggcggccggggtagccttcggcgtatttgttggtcagcacggagccctggcattgcagtaccgctcgcggcacgaagttctcagaggcgatcatctcaaggccattgcgctggcggcccagttcggagtccagcagttcggcgatctcaggatcggtttcgcagatcggcgcgttgaaagcatcggtcgctttctgcgcaaggggtgaagcggtcatgggtgctcctttggtatggacgacaattgattcgccgttgccgccttactgtatggccggtttgtagccggcctgtttcatgatatggccggtccccgttcgatggcaatggtgattttcgccggtttgaccggtcggctatgcgagacggacggcccttctgcccacggcccacgctagactggtgtggattcatcatccctttcaggcataaggattcaatcgtggcaaccaccttccattccacccgcagcaccaccgattcgctgaccgccaagcaggcgatccgtaagggcattgccgatgatggcggactgttcgtttcggactcgttgggcgagaccaaggtggacgtggcctccctgccgggcaagacgtatcagcagatcgccgccgaagtgctgggcgcgctgctgccggacttcaccgccgaggaactgggccagtgcatcgccgatgcgtacggcgagcagtggtcggatgagcgtatcactccgttgaagcctctgggtgacgattacgtgctcgaactgttcaacggcccgacctccgcgttcaaggatgtggccctgcagattctgccgcgtttcatggcgcacaccacgccggccgacggcgacgcggacgagaagatcatgatcctcaccgccacctccggcgacaccggcaaggccgcgctggccggcttcgcggacgccccgggcaccgcgatcaccgtcttctacccggaaggcaaggtctcccaggtccaggaactgcagatgaccacgcagaccggcgacaacgtgcaggtggccgccgtggaaggcaacttcgatgacgcccagtccgcggtcaagcgcatctttggcgaccgtgccctggccgagcgtctcgccggcaatgctcacgtggtgctttcctccgccaactccatcaacgttggccgtctggtgccgcaggtcgtctactacttctccgcctacgcccagctgctcgccgatcaggtgatcaacgtcggcgatgaggtcgagttcgtggtcccgaccggcaacttcggcgatatcctcgccggctactacgccaagctgctcggcctgccggtcaagcacctcgtggtggcttccgacaagaacaacgttttgttcgacttcctgaccaccggtacctacaaccgtcagcgcccgttcttccagaccatctccccctcgatggacatcctcatctcctccaacctggagcgcatgctgtactacttgtccgagggcgacacacgcttgatctccatgctgatgaacgacctcaaccagtggggcacgtacgagattccggaagagctgctggccaagattcgccagatcttcggcaccggctgggccgacgaggaccaggtgcgcgaatccatcaagcactgctgggatgagaaccactacgtaatcgacccgcacaccgcctgcggctactatctgcttgagcagatgccgcgcgacccgctgaccccgcgcgtgctgctctccaccgccagcccctacaagttcccgcgtgtggtgaacgaggctctgggcttcgacgccaccggcaccgacttcgagtgcatggacgtgctggcccgtgagaccggtaccaccgccccggccgccctgcgtggtctcgagaccgccgacgtgcgtttcaaggacgtcgtggccatcgacgacatggaggactacgtggagaaggccgcccaggcgctgtaaaacatcccagcacattggctcccctcagagcggggagccattttttacatcagaattgcgtttacatcagtatcgcggcgactggcagtcctatggcgattgccaacagcacgatagtgccgatgatcacgctggggcgtgcgaggttggcggtccagccgacgccgaaacgtttaggaaccatgatggccggatcgtcacggttgatgtagatgatgccgccaatccagtgcaggtcatcgtcatacggcatggcattatcgtccgaaatgtcaccgccgtcactgtgccgaacaccggcatagacgcgcgccccgttctgcccgtaatacacgccgatcatcagcgcgccgaccagagccgccacggcgatgaacatgccgatgatgccgattagattgatatccagcacgccaatggtgacaagctgaacgcctaggcccaatccaccggctgccagcagtccgatgaccagcacgtagatgctccagacccgcgagaacacaccataggcatacccggtggcggcggggtggtcgggatcaatcgggtgcttggcgtagatgatcgcggcatggctggccaccatcaccgctgccagcaccacctgcgcgagcacggcgtaccaaatcaccatcggactcttctcggcccaaccgttcacattgccggcgatatccgcatgaatcggcacccgctccggcatccggtcatagcccagcaacccgacagcaatggtgacagcgagacaaacgacttgcagcaattcccacttcaagctcatcgggtcgggattgtcccgctcacctatcaatgctgcacggcgggcactggacgcctcccatccctgatcgactttgatggatagtactttgcggcgaaacatctgctgcagcacgaaaccacatatcgcaatcgccaccgctgcgatggacacagtccagaacgccgcgtcgactccgcagagttgccaaacggccagcgagaccagtatggcgcatacgccaagcgccaccgtaattcccgaaaacgcgactttaaatccgcgaatgcgcgtattgacatgggcggcggccggcactgtgacaccgaacacctcatgccggtcggtaacccatggaacccctgccaggccggcggtcactatcaccggcaacagtaaaaacgcacacaacgcgatgttcatcgacacgactgtattattcatcgttatctcccctgatttccttttgttgcaccgtcagtaacgctctgcgaggagcgcacgccgtatgcccgttcgcattgccgtttggtggcatcgaggaatgcggccgaatcaccgccgcgcgccctgtaggccaaggcaaggcgatagagttcctcgcccatccgctcatcctgtgcttcggcagttcggttcggtgcttctcccccgccgtcatgctcggcgacggttgcaccggcaccacgacgcataacgatgtatccctcgtcacgcaacagcgcataggccttgttcaccgtgtgcaggttgatgccaaggtccacggccagcgagcgcacggacggtaacgagtcacctggcgacagctcatcgcccgcgatggctgcgatgagctgcctgtgcagctgctcgtaaatcggcacgtcactgcgctgatcgatttccacaatcacggtcaattccacccctctcaagaactgttctatttgttctacatcaaatataacagttttgccgtatgagtcaagatatgcgaatctcggttgaacatccggcaatgggccaacggcgtgttgcttgaattttctaggaaggcgggaatcgccatgctgccggcgaatgggaaaatccatgtggcttgtcagattctgttcctgcaactgaatagtcccatgagggagtagacagcattgcggcgaagggctcggcccaaaccgcaataaagcgtgccgagcgccaaagccgccaacaccggtatgacgccgctgcaggagaagctcgcgaagctggacgaacttcatgggcggcaccgccgaacagcagtcgaccattctgttcacgctgttcgtggtattccagctgttcagcagtcgaccattctgttcacgctgttcgtagtattccagctgttcaacgccttcaacagccgcgagctgggcaacgccagcctgttcgccaatctgctacgcaataaggtgatgatcggcgtgttcgcgctgatgttcgcacttcaggtgctggtggtgcagttcggcggagcgatgttccgcaccgtgccgctgccgatcgacatgtggctgaagatcatcgcggtcggacagatgcgcggttagagttctttggctcggtagatgcggatggctataagcatggagccaaaatatgcgagcagacacaacacggcgagaacaagcgccgtatgccaccagatcgtcaggaaatcggcaatattcagcaatagccattgccagtcaacaggcaatcgggccagcagcgcaatgactgcatacaagccgacaatgaccgcgccagaggccatcatcatcttgcgggaggtgaaccggtatgcacaggccagcagcaccgacccaagaatgatagccaaagcgaagatggaagcacctgctgccaaggtaccaatccaccccatatctgctatatcgccaaagacaatgaagacgccgccgcatatcaccacgtccaaagcccagagcaggccaaccaccaacagaaaaaggtaccgacctacaacttgtgcagtgcgtgaaacaggaatcagccctcgcatggcactgtgccctgcagattcctcggatgacgcaggccccaatgcactcatacatgccatcaccgatgccagacctccgagtccgcccatcagaccactggcaacgtgttcatcgacgtgggtcgatatcatcaccagcgataccacgatagacagcaccgggaaaaccagcagaaataccatattcgctacgctaaacagacctgtcccaacacaatcgaatcgacattgctttactacggatttccagctcatcgtcaccattcccttgaagcaaatatgcgagaggcaattacatacgagattccatatgccacaaccgtcgttgtcaataccgcaataaccagccacaatcgttgcgcgatgatggcattcgcggcatgggccaatcctctagtcaccgaagcaggcaaaaaagatagcagtatgaatccagccaatacaacgacataaatcaccatcatcgtgacttgaaaaccgcctagtttggtccacagataacccgtgggcacgataagcgcgaccatcagcgcggtgcagaaacctcccaacggcgccgcccacagattgcccgcgaatgaccaatccggattgaccagcacttgcaacccgtcaatcagaacaatcatcgctatcgacaatacggaaatcaccaatccaaccacatatcgcgcggccacctgactcttcctcgaagccggaataatgccacgaagtcgatatccgttctgtaagtcagcaaccgccatggttagcacccacatggcgcaggtgaataccgtcatgatgacacccatgcgatagccgaagccatcaccataagcttcaccttgaaagatgacggagaacaacggtgccaacaacaacgagaacacagtccgtacgtcgacgcacaggtaggccatatcgacgcgcaatgcagtggtcaatgcatgttgccgagaccgcgacaccctcagtattgcctccatggccgctcacctcccgctcaagtcacgattggaatcatgggcattggtcagtcgaatgatgtcatcaatggaagccgattcaacgacaagccccgaaaccaccgacgcaacggcatcaagcctgtctgaccggaccagcgcatcgaatccggtggcatacgtatgtgagcccagcactacgtccgcaggcagttgtgccagctcgtctggaccgcccttaatcaggcggaacgattcctcaaactcgtctttcggaccggtgtagtagagacggccatcggtgatgtaggtaatgaagtcagcagcacgttcgaggtcggcagtgacatgggtgctgaacagtaccgaatgttcgccatcctcaatgtaggcatgcaggatatccatgagttcgtcgcgggcaagcacatcgagtccgctggtcggctcgtcgagaatcagcagtttggcgtcatggctcaatgcgatggcgagcatcagcttcatctgcatgccgcgggaaagatccttgatatgtttcttgccgttctgtgcgtcaccaaggccaaaagtatccagatacttgtgatagcatccaccgtcccatgatggatacagtggcgcaacgatacgttcaatgttcttgacttgccactgttcatgcatgtagctgaagtcaaacaccacgccgagttgttctttgacgggctcctcgttggcgatgttgtcgaggccgagcacgtgaatcgaaccggcgtcgcggtggatcatgttgaggatgagtttgatgagggtggatttgccggcgccgttcgggccgatcagtcccatgatgtagcccttgggcaggtcgaaggtcacgtcgtccagcgtgaagccggaatcatagtgtttggtgacgtcggtgacctgcaacgccatcgcgtcggattcggatatggcggtcatgtccatggtcctttcttgaggttattccttgcggtattcctcttcgagcatgcggtccaatgcgttcagcggaatgccggcggctttggcgccccggcttgcctcggccaggctttcacgaatctgggtttcgagctgacgttgcatcagttcgttgcccttgtccatcacgaaagtgcctttgccttgaatgttctgcaccacgccctcatcggccagttcgttgtacgccctggtgacggtgagtacggagatgcgcagctccttggcgagtttcctcaaggacggcagggcctcgcccgccttcaactcgccgctgagcaccgccgaacggatttgggttttgatttgctcgtagatgggttcaccggacacggatgagatgatcagtttcatctatgcccctttcgattgtggttgactagcaccccagctgtctagctgttatacaacacagtataactgttctgcttaactgtcaaggtgtgttacataacagttgaacagtgaacaaacacctcgccaacatacagtgtcgaaacatgggccgtgcctacaatggcctcggaaaggggcacc

SEQ ID NO: 3442 - DNA, 33844 bp, Unknown
  R151_18m  MAG No. k141_56122
gtaggttcgacgccgacgaaatcaagaagcgcggtcaggattacaacaagaagagcgataatttcactgattacagcgatatgaacatgcgctaccttcgcatcagtggaatcgtccaaaggaaaggtcgaggccttgtcatcgttccggccaagcatttcctagcagaaaagctggcctcaacaacattgagccgtcgcccaattatggacgtatacaaggagctctgccatggcgcgtccttgcctatggatgatcttgagaccgccaaggctttgcttctcgatatggaagcacagctgaagaagaaccatgtgtattacgattttgggaatcgcccggtatcgacggtacctgagatcaatgcagcgcgcctccatctcgaagaactctggcagagaaccgacgaaatcaactacgccgccaaacagccagaacagtggcaggagatctccgactacatgacactgttgatcaaaggcggcggcaagaagatcgatgacgccgatgaggacaacggcatcgaagtaccgaaagatgaaactccggcatatctcgaatgggtattatggcgtgccgcgctcgccttcggaaacctcgtcaaccatcccagcgatatgcgaggtttccgattggactcggacttccttcctgtatcggcagcaggcggcggacaaggagacctgtactgcgaatacgataaattcaccattctgactgaagttactatgtccacaggctcccgccaggaatccatggaaggcgagcctgtaagacggcacgtatccgaagcggtgctgaagtatgggaaaaacgacattccagtgtatggactgttcatcgcagtcaagatcgacaccaacacagccgagaccttccgccacggcgtatggtacgcaaaaggcgatgtcaagcaacgactagacatactgcctttgacgcttgcgcaattccagaaatgctttatcgcactgttccagagcaacgaaagcgccaaacacgaaaaaatcaaagagctgattgaagtgtgcgaagcgcagagagatctcatggaagctcccgcttggaagaagtatatagatcagacggcggaatctggcatatgagatgaaagggttgccggatggcgcgcatgctgcccggtaaccctttcctttaaatagccccagagtctttgctcagcttgccatcaaaagcttggttgacaagcgtatacacggtctgcgcgacgcccaccacgcctgcgagcacgataccccacgtgtaggtgccgtcgaaaccgccggtggcggcgatggcgatggtgccgagcaggatggacgccgcgagggagacgagtccgacgtatccgctggggatgtatttcttgaacgcctgcacgaatgcgggcacgatcaacgccacgagcccggatgcgagcgtggttgcggtggaaatatccatagttttctccttggtttgatgatgaaggtggcctccggcacggtgccgaaggccacgatggttgtggtcagtagcggagccgctggccggggtaaatgaggttggggttggcgaggttgttcaactgggcgacgcgctgccagccggaagctccaaagatgccgctgagcgtttcgccgctcttgacgacatgcacacgtccacccgtggcaacagatccgctggaagcaacggtcgccgcgcctcggtaggtgacgatgttgccgggatagatcaggttgatgttgccggacggcacgctccacgcggacagcggccaaaggccggttctggtggcgatgccggacatggtgtcgccgctgcgcacggtcacgctcacgctccgggtggaagcggcgggcgtgtatgccgtggatccgttgagcctctggttgacgatgctcatgaccagcccgtagttcgctcccaacgcggccctgcgggcttcgccgttgccgtagtcgccacggatcgtcgcggtcgccaatgcctcgtagtccacgctcggcgcgggctgtggagccggcatcggagtcggcttgaaggatttgcccgggttggcgtacttgtcccactgttcgcgggtgccacggaagtagttcagatccaacgggccgttgtagccgttgatgcgcccgttgctggtgtactggcgcatggcctcgccgtacttgccgtagttccacggtcgggactgccagccggtgggattgttgttggtgtactgagccacccacagaccgcagttggcacgcacatcggccgggatctggggaatgaacgcggcggacacgtagaccagcggccatacgccggtgcgttcgtggacgttgactactccgacgaactggtgtcgcaggcaggcagattcctgcatttcgtcaccgccgacagccacagcgccgagaatctgggacgtatgttcgcaacccctttgttggagccatacaagcatctgttctacgtgctgtacggtggcggcggcaacggcaagggcatcctactggacacactgcatcgcagccttcccgaactgtctgcggcggtcacgtcgaagaccctgctgggagggcgcaacggcaacggcggcttcgccaccgatcaggagactctgaagctgatcggcgcgctgtgggcctacgacgaggatgccgacaccatcaccctggaacaggctaccctgctgaagaagatcggcaccggcgacacgatggtcgcccgtcgagtgcaggagaacgcggtcagcttcaagaacaaggccacgttcatcatcgcatcgaacaatccagtcatcatgagcatgaccgaggcgttggaacgccgccgcgtgttcgtgcgcatgagggacagccgagccgaggaggaattcgccgacctgctgaaattccgcgacgaacatagcatagcaccgttcctgatggcctcatgccgcctgtgggaggtgcgtggcgacaagccctggaacgatgtcgtcatcggatccgccgacgacctgaccgaagcgcagcagtggatcgtggactgcatcgtggcgaacgggtacgccgtcagccgcgacaacccgcaccacgagaccgacatggcgcaccgcaacaccgtcacgaagctcggtctgaaatcgaagcccaagcgcatcaacggcgaggtcgtgcgcgtgctggtggtcaggaacgaacgcgtgttcagcgtgtaccgcgacggcaccgccaaggacatgaccgaagccatgcaggaagaagacgcagccaagacggtgccaccgttgccggatcccatcgagggaggcaccgtggtcacgccggacgattgcggctatccggtcacgttcggcacggtcaacgaggggaaacgctcctacgactgggccaaaaaccgcacgctgccggaaggcaagcaaccgccgacgggcgtggccgcgtatgcggtcgttcccgttgcgggcatggcggtcatcgatctggacgtggccaaggatccggccaccggcgaagtgctcaaagacgctccgaccggctgggacgtcttcaaccgcgaaatcggcgaatacggctccgaggacttcccgaagacgtacctcgtaggcacacccaccggccgcaggaacggcttgccctccgcacacgcctactacctgatcccgcccgaactgcaaggccggctgaagaacgccgtccacgagaagggcatgccggtagacatccgctgcgaaggcaagggctacgtggtcggagcgggcagtcatatatccggcggcgactacctgctgcttgacctaccagacggccagccgccgatgatgccgcccaggatggtgcgatggctgatcgaccacggctacgtgaccgaacccgatggccaagcttccacgcccaagccggagcatgcggcgcggatcccgtcattgagcgagctaatgcgccggcccgtcacggtcggatccatagcgaacgggaaacccgacatgacgccgataccggccggaagccgggacaacgaccttcacgcgtgggcctacggaagactgctgaaccaccccgacaatgccgaggccattcgccgtgatctgttcgagcgcggacagaccagcggactgaaggaatctgagttggagacgatctggcagtccatccgccgccagctgggaggcgaccgatgatgccgagacggaaaccaccgtggctcaaactcctgtgcccgtcgggcgcgaaccccgcgcacctgacagccagacgctgcggcacatgccgtgaatgggtggcggtggacaccggagggccgatcgaagagatttacgaccccggcgtactggacgcaacggatctggccgtggccatcatcctgggccgcaggttcacgcgcatccagcccatcgccggcaccacgctgattggactgcgcacaccatgcggcacgcggggcatcaaacctgacggcatgtacctcgcagcccacgagtgcttccgcacgccgatcagcgtgaagccattcaaaccacccaaacgcacggcagcgtccaaatggaacggaccgcaactcagcaaaggggagataagcgctttcgagacagcctagaggaataaaccatgaccatcacacaccaaccacaaccaccaagcatccacacgcatcggctcgccaaactcgtgccggcggtactggccacgctgcgcacaccggccctcacggtcgggttcggcaccgccgccggatacatgcgcgtctgccaatgcggatacgccacacgcgaccccaaccggttcgccaaccatctggaacacaagatcggagaaaccatcatgagcaacccactggcattccttgacgaccccacacccaccatcaggcacaggctcgtggacaccgcgaagcatgggcggatctacgtctgctcgtgcggccgcaactacccgtcgctcaccgccatgcaggaacacatccgcgccatgaacgaaagacacgacgatgacaaccacgagtgaaccgcatctggtcatcaccgaatctaccggccacggactgcgctggtggtgctcgtgcggatatgacaccgacagcctgcaagacctaagacaacacttgaacggagggaacgacgatgacagggccatgcgtgaacaatgacggagccagcactgttgctggaaggctgctgtgcaaggagtgcgagcgacggctcatggaagccctcgccatgataggtgaggatgccatgccgctgctgttggtcgccaccaaacgggccagcgtcagcatacagggcaacaggcattccacgccggcgcaggcaccgtcgccgttgcgtgacggcatgtgggaactgtactgcgagacggaacagctactgcgacaactgggtttgcgtttcgactacgcgaaggccgtggacccgcgcgccactgtgaaggcgctggcgaacgccgcgatcatggatccagttcccttgctgtcgagcggggacgtgctcgcctggtatcaggacatcaccaatcttgcccgacggatccacacggcggtcaaccccgccaagccgcgtatagcgttcggcgcttgccccagttgtggaagcgtggtgtggggcgatcccgacgaacggtacggcgaatgcgctggatgcggcaacaaggtgaaccgtcgtgccgtcgccgaccgtctgcttgccaaactggtcgtcagcgaagtacgaggtacagccaagcaactgagtgctgaatgcgcgaaagcggggatccgtctgccggccaacactatccgctcatgggtgaaaagagggcaattgcattatggcaatgatgggaaactcggcttaagtgaactagtgccgttgcttgataggcgacgggcataggcatgcggtgagtaatgttgcttgcgcagtatcactcaccgcatttacttattcgcctttatgtgacggggcttccagcattgctcggtagggttctagactcaatgccgttcgtaaggcatcgctgcgtaggggcacaaatttgccatcactggtcatcttccctaaaagcgcagaccaagcgtcgaatttctcctgcttctcaagaagcggaatgttccgttccaaggccttgttgataagatctgtcacgttctgcgttgtcagcttttccatggtctgacgcaactccagtttcgtcttttcatcgaaagcggattcttgaatgttggccgaggaaagttcacgaatatcctttgcgagatccattgccttgtacatgatgataagcaaacgattttgtgcctcctcgctgtccatgtgcaactggcatgcttcaatcgcgtcatcgacttccttggagaatgcgtttgtcgtttcaggagcggaagtcagtaatgcaatcggctgaggcgtttcgacatcattcttttttgaacgacgagtcactttgttccaaagtttacccatcgtaggtttaactgaatcctcccaccaatgaacgacggttttatcccaccagcttctgaatgtctcattgttcgctagatagtatgcggttccgactattgcggcaatcgcaattgcggcggcagccatagccgctgcaggtgtgtctccgtcatcgttgccgatttctgcgccgtctccgtcgtcggtattgtcgaagacgggttcccaacgtgcttgtcctttcaaatggttttcatcatcgaagaaggctcccagatagacgctgggatcgtcttgaggattggccaaatgcatcccgtcaggcattatcaggcggtacagcggctcgtcttccatatcgactccttaaatccttacgcttcgacgtcgaaagcgcatgaatcacttgtttaacaagtataaggtggaaagatttgcgtcggtagactcagtaaaacccagtaaaactttttcagcctccgaaacggcctttcaagcaaaagaaaaagccttaattcccaagcgggagtagggctttcgtggtcgggccggcgggatttgaacccgcgacatcttgctcccaaagcaagcgcgctaccaaactgcgctacggcccggtaattatgtcacttggcataacttttttagtctacacatacctcaagacggtctgtgcctccagatgactcatttttgacactcagataggccgagaaaatcggaggtctgcggtcattgttactgagtgttactggcggtcatttttcagttttagttgaagtcctaaaacccaagcgggagtaaggcttatcgggtgtcgcaagcgcaacgctttgggaacatcctgttgtattcgacctgttttcgtctttctccatcaaattctgtaagacctaaaacggttggaatttcaacgttttgtgcctatgtagttcattcgttgagttcggtgatatatgtcgttttcagaggtcatcggataaaaatcggataaatttacaccgtctcggaccgcgcctacaacgtgaaaaatcggccccgtccggccgcagtcaagctcatgagagccgtctgcgatgcctgagcggggcgttcggttttcagggcatgccttggtcgtcggcgagcgcagcatacagttcgagtgcgagtacggctgcgatcaggcccgcgcattcgacgagccattggatgcggttcatacgccgagctgttccatggtcttgcgcacgagcgcgtcgacctggtcgaaacgaccccaccatggggcgccgttgttgccgtggatgagcggcacgccggcctgctggagcaggttggcctggtcggggtgtgtgagagcggtgcggcccttgccgggctcgcaatagtagatgaccccggtgttgtcgttgcggatcatcattcctgccatgatgtctacctcctgcccggctgtggcgccggatagcttctgttggacgagttggacgaaggcgccccagttgtagccgaagcgcgtgaagtacgggatggggtccgtatggtcggatccgccgtaggtctggctgaaccattggtgtgggtgcatgcggtcgacgccccacccgtgcgtgcggaggcgctgggctatcacgtcggctgcgatgtcgatgccgcgccagaagtccgacgcgttggtggcctcgcagatctcgatgccctcgcacgtgccgttgccgttgccgacctgccagcacagccggtcgtagggcacgcaatgaatcgcctcggtccagtcggacgtgaggtgcaccgcgtagtcgtagcctcgcgaccacaggtcccggtggttgcgggccgtggcgccgggattcgccgtgctgtggacggcgaacagggacggattgaggtagccgtgccctgcgttgacgatctcctccttgatctgcactattagtcactccgtggtggtcttggcgtccggatcggagatcatctcgctcatgggcacgacctcgcccggcatatccacggcgttacctgtgtcctgggcaagcttgacggcattgacgacctgctggccctgcacggcggccacggtcaagttgttgttgcgccaccacgcatatacggatgcgatgacggcgatgacgccggtgatcgccgtgctcacctggtccgatgtgaacggcagctggctgatgcccgcgatggacagaccggtctggacgacgctgaacagctggacgagcagcagcacgatggatttcgtgcgctccgcggtcaggccggggatattggtgttggcggccttgtggtcggccacgcctttggtgtttgccattggtgttcctttctattggtggttgtttcctccgcgccggaggtcgttgacctcgtggcgcagttcgatgaggttctgctcggtagtggtgatgcgacgattgacggtcgcgaactcgccgttcatgtcgtcacgcagaccgtctaccgtgtcgcgcaataattcgatggcgtccaatgtgcgccggttcttgtcgtcgaggtcgtcgcgcaacggcagcgcgtggttgttcgtgatctcgcctcgcgtcgcccggtccctttcgtcccctctgtggttgatccagatggcggtgacgatctgggcggcgagcaccagggcactcaccacgatgtacgcccatgctggcaatccctcgggcaggttcatgcacggctcctacggtatggaaaacccacacgcagatccgcatggaacggccatgctgcgtatgggttttggaggtatgaaatgttgctgaatgagtattgggacgagtcgtattggccgtcatgtggcaggctgcgcgaatgcacgcgcgtcggatatgcaagtgcatggcgacgtcacatacgacccgaattgggtgacatggatctggcggatctgacggggccgcgtatccagtcgtggcttgactcgatatcatcaccaggtgcggcgcgtaaggcgtgggccgtattgcggcagatgctgcgttcggcggtgcggctcggaatattggacgtggacgtggccgggagggtcacaccgccgaagccatccggctatgagccggaagtattggatatccgccagatacggcaactattgcaaggtttccatggacacgagttggaggcttggctgatctgcagcatctgtctcggattgcgcaccgaagaagccctcggattggaatggcaggatctgaacctcaacaccggcaaagtcaggatcaggcgaggcctgcaatgggttgacggccacgaagtgatagtggacccgaaaaccgagttgagccgtcgcaccgtcgtgctgccgcgattcgcggtacttcgactccgtgagatcaggccacgagaaggtggccgactcatcggcctgttgaatcccggccaggtcgctcgtcgctacgccgcatggtgcaggtcgcagaacctgccctacgtgccacgcaggaacctgcgccacagttgggccagcaccgcgttaggagccggcgtggacgtggcagtcgtaagccgcgcactcggccactccagcatcgctaccaccgcccgctactacctgcgcccagacagcgaggtgctgcgcgaagcacaacgcacatgggagcacgccctcatacgctgatagggattcgctaacccaatcgtctgtattgtttactggcccctacgcaatgagggtaagactcatgcgcataggtcgcatcgttacagcggtcggtcaaccttcgccgtcatctagttatgtgaccggagaattgaaagctgtagagataatcccggaaggatacaggcctgcgactaacggcacgatcctgtttgtatcgaacaatggcggtgcagtcagcagctggtacatagactctgacggacgcattaccattcgaggcagagcggataaagggtattaccaaacctgcaccggcagctggctgaccgcctagctttcgctaacccccaccgtcctatgggagggcaccagcggcaaaaccggcaccctcccgctcgccgaatcgatcacggatttccgcgagctgatcatcgagggtaatgatgatgaccattacccgaggctgttccacactgccgccgaagcaggatcgatcgtcctctcattcgtcggcatgaatttcacgaacgggctcgcgtcaggcaaggccactctcgtccggatctccgacacgagcatgcagatcatcggacaccgaatccacgtgatggaaggcaacacgtcagacacgcagtgcctgaccatcacgaggattctcggcgcgcgttagacggcggggatcaccgcaaaccggacatccatcgtgatgttctgcggggtgccgacctggatggcgcggacgatcttatggggcacgtcgtagcatgcgaccagcgccgtattcactccggtggtgacgggcgtgaaaacaaccacatcgcaaccagtgtagctccggccgaccagggcacggtattccgcatcggacaggacgtcagcgacgttgccggtgaacgtcacggtttttttgccggaccgtataggggttagcgaatcccacatgtccttcattggtttcagcacgttgaagagcgggacgagggtgccgacggtgatgccgtccaatgggatgcggtagaggggcatgtcgtgggtggcgacgccgtcgaggatactgccggtggtgtgggctggatccgtcggggcgccggtggtgggggtgcccttgaggaccacgattgagcaggtttccacgccggtggtggtgttcttcgtgtatcggagcaccactttgtcgttgcgtttctggccttgggtgccggattgcacggtggcggtggtggtgccggtcaggtgcacatggcggccgttcaatacggcgtcgcctgattggacggcgatggtgttcgcgttgctcatggtggccttgagctgattaccggtggcgagcgcgtagtcgccgggtccgacgatgccggcctggaatgcgccgatgtcggcgctgccgatgtgtggggttccggcgtagccggtgatgagttcgactgtcatgtgttctcctgacgtttatgcggtgcgtttccagaggcggcctcggccgatggtgtcggggaggcgtgtccatgtgccgccgattgtgttggggtcgaggttgggggtggtttcgatgatctcgccgatggggtgggcggccgtgaacatagtgcgtgtgttggtgcgttgcagcaggttcgtgaccgcccgtgcgaggccgtggagggtgacgtatgtttccgccatggccggggtcccttaggcgaacagggcgtcgatttcggcgtcgctggccggggtgatgtcggttttgcgcatgtagccgctcaggtcgatcatgcctgtgagcgcgtcccatttcatgacggtggtgtcgccggtggtgacggccacggcgacgacgttggtgccggcgggcagggtcttgcctgagccgtcgacgaactggtcggtggtggtgaactggtctgtgatgttccacacgtcgcccttggtggcggatgcgggggcgggcaggctggcgaacatcgtggatcccttggcgcggaatgcggagccgagcgagttctgcagttcggtcttcgcggcgttgaccttggcgtccacgttggcggcggtctggtagcctttgccggtgacgatggtgttgacctgggcggcgttctggtagcctttcgcgctgatggcggtctcgacgttggctgcggtctgatagccgagattcttgatgtcgttgacggcgccggtgcgcgcgttgttggcggcggtggtcacgtccgtgggggtggcgaggccgaggctggctgcggtctggttaccgctggcgatctccttgccgccgatggaaggcttgccggtcaggtccgcgtatgcgccggagaacgtggagtcgccggcgttcttgatcttggtgacgagttcgtcggtgaggttgttgtcggagagcaccttgtaggtgttggggctgccggtcttgagttccttggcgacgaacagggtcttgagtttggcgaggaatgtggcgaggttgttcaggttgatgaatttcgtggccatgatggtttcctttcgttggttacttgctgctggggttgaacaggttgttgatgtccgcgtcggtggcggtctcgatgtttccggcagccgtttcgagctccttgagtttctcggggagtcgtttgccgtcgacgtccacatccttggctttgaccatggggaacgtgccgttgttcttcggcgcgagcgtgtcgatcagttcgatggccatcagggttctcctttacttcacttcgacggtggtgttgccgagacccgcgttcgtggatttccagaccgcgtagctgatggtcgcgccgctcgcgttcttgtggtcgaacgtcttcaacaacgcgaagccgccttcgaagccgccgacgaagaatcggggcgtgccccacggcgcggggaacgcgtagtagatgtgctgtccggccgcagcgttcagggtgaacgttttgttgtaccatgtggcgagttcgccggttgcctggttgatgatctggtcggtcactcccgccgcgtcgaggctggtggcgacccaccagtggcgcttgtcgcggaaagcgacgttggcggtgcgggtggcgacggcgtttcgcgcgtcggtggccttgagcgtgtacgtcttgctcgttttgaggttcacgccggagagtgtcgtgcccttggatgccgtgtcctgcgccttgtcgtccagggtgagtgatttcggcgtcttggacaggctccatgcgacggtcacgtccgcgaccgtcgagccgcgttccgcctgcgatggggaaacggtgaacgagttaatgcccatcgccttgtacaggctgatggtgccgtcctcggtgatgtcgaaatcgccgccgggcttgacgatgcccgccttgtcggccgtggcgatcgagccgccttcgcccttgagggcgaacttggcgtcgttggccgcgtcctgctttgctttgaaccgggcgagccggtccaggtcgatgaccttgctggtgttagccatcgtgttcctccttatctgtggttggtgttgggaacaggttgtcgatgtccgcgtcggtggcgtagacgatgctcacgtcgccgatgatcgcgtcctcgaggatgattaccggcccctcgtcgcacgagcagccgtccaatgcgcggatcaatgcggactcctttcggtgtcgctcacggtggtttcgacaagcgcgggcccggcggccaggcgggtcacgtcgcccgaggggtcttcgaggagcaggtcccacgcgcccgcgcccgcgggcaggccttgcgtggcctcgtccgggacgcggatggtgatggtcccgtccgtgtccaggagcgtgtagggggcgaggtcgatgacggtgagcccgtcgcggcggacctgtatgtggggcgtccacccggtcaggtccatgggtctgacgaccgtgaccccgtttttgtcggtgaccctgcgcagccatctgaggcgataggtgttggtgacgccggccacgaggatgaggttcgcctcgagcaggcatgtacggcccagtgtcttcatgtgtcatcccgtcctttcccacatgtgcgcgcccagggagggccgttcctcccagacgccgccgaaatcattcgccggatccgagccggtggtgttcatgaccacgtagccgaccgggaacaggattccgttgccggtcgatgtggcgtgcgcggtgatgacgccatcctcattgacggtgatggtgctgccgtcaggtctgactccacccaacgtggcaatggtggcggccggaagcgcgtaggtgtccaatccgtcgagtttccgcttgtccgcggcgctcatgagcccggatccttcggccgtggcctccgttgccgtgatgtgcacggcctggccgttcctgctcgcggacaatggcgtggccgtggttatcgaggccacgttcatggctgccgcggcgatggcggcgatggaatcctgctgtgccttgccgatttcggccgaatagttcgaggcgagcgtgtaggcgtccttggctgttttctccacgtcgtccacgcgcgaaggggtgacgaccgcgctgaacgtgttgttgcgcatggtgatggtgaccccgtccgcgtagtacgcgccggagccgcccgaaccggtggagccgttggattccgcggagccgctgagactcgtcgtatcgcctgacgcggtgccgcactcgtagtccacggacaggatgccgccggatgatttcacgatcttcttggccacgggcacggtgagcgtgatgccgagccggttgtcacggccggtgaccgtgtcgccaatgtccatgctcaacgtgttgtccgttatggtgacctcgacgccgccctgggattgcagttcgatgagcttcttcctagtctcggtgttcagctcgtcgggtttcgcgttggaatagtcgtagacggcctgacgttccgccaatccggtcaatgattgggtttggctcacgttgccgttgacatccgcgtaccagtggacgaccgcacggtctttgagttccccggtgcccaatccgatgagatggttcaccggctggctatcgagcgaggccttgaattcgagcagatcactgtcgatgctgtcgccgtagtgttcgacgggcagcgcatacgcgttcacacgcccatccgcccagataagacggagtttcgcattgttggcggcgagcatcttccggatgcccgtgtacgcgtccgtataccggtcgaacgaataggagccgatggtgaccgcgtgccgtgcggacgcggtgaacagcgcatccaatccgatgcgtttgaacaacatattgagcacatcgccggcagcgccggatacggtgaggtaatcccgacccgtatcgggttggaggatgcggcgtgagagcaggccatgccaggtggggccctccacgctgccgtccgtgttgcgcacggtcaccaacccgccgtattcggtgccgtcgatcatgatcagcgcgctggactccggctgcggcaggcaggtgagtttgaacgaattctcatcgctgccgtaggcgagatcgagcgtgtagtcgtccaccgcgcgcaacggcttgtgcttcgcgtcggtgactatgaggctgaccacggtggttcgctcctctcctcgacgggcgtgagttcgaacgtgtagcctcccggccagctcacttcggcgcgcccggcgggcaacggttggaagacgtagctgccggaatcaaggccggcaccgcgttccgcgttcgcgaaccagttgacccggtcaccggccgcgttgacgaacgccaccgacttctcgccttcaaccgcatccacctcgacgcgtgcgccgccggggatgtcaccggtgatccggtaccggtttccgccgatcgtgacggtcggattcgagcagggcccgtatatggtcatgcggaacggcatcgggtccaacccgtccacggctatcaccggcggggcggatggcggcccgtaatcgtagtccatgtcatacgggtgatcgagatactggtaggcgtcggggtcgctgggcgcataggtgacggtcggcaggctgcgtcgccacatgcccaattgggtcacggtcaattgggtttcgatgatgcgcggcgtgatggattgcggttcgcttttggtgatgagcgccctgcactcccacacgtcgtccacgcgcagcaggcccgatatcgtggagtccctggagtgcgcgagcacgtcatggtcggtgagcatgcgcagccggtccaattgggtttcgccggccacggccttcaccgtaagcgtgagttcacgggcctgccatgccaccccggtaagggtgcgcgcgccgagcgtgtacgtccacgcgcgtcctctcaacgatggcatcgtctccccgtagatagggccttcgaacgagatcgagccgccggtggaacacacgtactcaagccgttgcatagcgtcgcaccgcccttccgaattcccgcccgtcgatgttgatgcccaactgttgcagaatgaacggcatatcctcgtggaacgcctgcacctcggccagcagctcgtccaactgggattgcatgccctgctggttcgactgcatgccgttgaccatctggcaggcgttggccggcaggctcatcacgggggtgggcatgccgaacgtgtagccgtccaacgtgagcccatcggcgagctgtccgaggctccggttgacgacgtcctggctgcggtcgatgcccacggccatgccgcggccgatcatcacgccgacctggtcgcggaacacgcggctcggcgagtggatgccgagcttgtccttgacccagttcagagcgtccttggcggcgttgaccgccgcgtcgacgagcttgccggcggccccggcgatgccggaggcgatgccggtgatgatgttcaggccgacctcgccccagttcacgcttgtgaacccgttccagatggagcgcacgatggcggggatctggctgatgagctgcgggatggccttggcaaggcccccggcgagggtgatgatgatctgcgcgccggcctgcagaatctgtggaaggttcgaggcgagcgtgttgacgatcgacgcgatgatctgcgggatgtagcccacgagctgcgggatggcctgagacaggccgtcgatgagcttgaccagcgcgttgacgccgacctggacgatgcccggcaggttgctggtgagcgtggatatcagcgtctggatgacggtggggagcatcgcgacgagctgcggcatggctgagaccaggccgttgacgatgttgaggatgatgtccacgccgatgttgaggaccgtgggcagagcggtcgtgaacgcatccagcagcgcctgcagaatctgcggtatcgcggcgatgagcgtgggcagcgagttcatgatgccctgcacgagcccctgcaggagctgcatgccggactgtatgagcatgggggcctgttcgatgagcgccgtgatcagcgtggtaatcatctgcaccgctgccggcaggagggtcggcaacgcctgggcgagcccctgtacgagcatgctcacgatctgcgcggcggccgagacgagctgcggcaggctcccggtcacgccgttgatcagggcaagcaggatgttcgacccagtctggatcatgcccggcagcacggcggaaatcttcgccatgccgtccgtgatcatggtgggcagttccgcgaacaggttgctgatctgcacgaacaattgcccgcccatgctctggtcgagcatgcccagtcccgcgaccagggcggcgatgatggcgccgatgccgaggaacttcaggaagttgcccgggctgaagaagctgccgaacatgccgccgatcttgccgaggcctgcctgcaccttcggtcccacgatgtcgcccagaccgccgaatatgtcgcccagaccggatagggctggcgtggccgccgtcttgactttgccggcgagcgccgtgaatccggtggcgagtttcgagtcgccgattttggagatcactccgccgaatccgttggagagtttcgtgccgaacgcgagcaggttgctgtcggccgcgctggtgagtttgccgaatccgctggtgagttttgacccccatgcggtgacggattggccgatgtcggtgccggcgattttcgagccgaacgatttgaacgggcctgtgagcctgtcagtgccttgggtgatgcggttgagggcgttggcgaacgggtcgccgtcgacggcgagggcgtcgcgcaggtccttgttgaaatacgatttgaactggtgcaggcccgtcaggctcgactggagctggccgggcatctgcttgagtttcccggtgagctggccgaacccaccgtcaccgattttgccgagcgtgtcgaacacgttggtgatcttgtccacgttgccgccgacgccggcgaacagggcgaacgcgccggcgagttggccgacctgtccgacgatgtcctggatggtgatgctgccgtcctgcagtccgttcgcgaaccgttcgatcaggcctatcgctttgtcgatgtaggggtcgagctggccgttgagcttgtcgaggaacggggtgagctggccgctcaacgcgtcgatggcggggatggcggcgttgaacgccttgcgcaacgattcgagcgcgagcttgccggggccttcgcccagtcggccgagcgcggccttcacgttggcgagcgcgccttggaaggtgtcgccggcggccaatgcggctccgccgaggccttcctgcatggagtcggcgaatgtttggaagtcgatctggcctttggataccatgtcggagacctcttccgaggttttgccgaggtgtttggcgagcagttggaggacgggtacgccggagctcatgagttggagcatgtcgtcgccctgcagtttgcctcgggcggcgacgctgctgaagatggtgccgatgtcggtgaggctgcggcctgatatctgtgcggtgtcggcgacggttttgaggacgttggtcatctggtcgccggatttgatgccggcggcgctcagggtcgcggccacggtggccgcgtcgcccaggccgaacgcggtgcctttgacgctggcgagcgcgttgttcatgatttcggcgatgcttttggagtcgtggccgaggcccttgagtttggcctgcgcgttttcgatggcgagggcgcgttggaagccgcctttggcggcgagtgcggtgatgcctccggcgatggtgccgatggcgccgagtccgattttgccgattttgccgaatgcgccgccgaatttgccgaggatgctggtgccgccggtcttggcggcgttgtcggcggcttgggtgatgtcgccttcgagtttcttgccgaagtctttgccgcttggggcgacttcgatgtagacgacgccgatgctgctttctgccatcggggcttctcctgtgtggttgggaggccccgatggcggtcggggtcattcgatgtggtagtggtcgttgaggcgtttgcggcgggccatgcgcgcctcataatcggcgtgggtttccgtggccggtcggcggaacgggtcggttctccggtcggcccatggccggtagcctttgcgtttgagtcggccttcgagttccatctggtcccagagcgcgatttccgctccggtgggcgtgtatgaccatccggcgagtgcggcgaagctgttggaggtgtggtcgcgcaggatttcgcgggtgagcgcccatgcgctctcatagtcgaggttgccggatggtttgcggccggctggcgcgtcgagccatacgttgaggtggcatggcttccagacgcgccggtagcgggtcagccagtcggcggtcagcgccgagtgatgctgttggtggaggatgaggaggtaaacgattttgggtcgaggcccgagccttcggcccagcctttgacgatggcgctgatccagccgagcgggttgccggccttccgcagcttgttccacagggtcggctgcatttcctgcaggtaggcgaggaacacggcggtggcgtggaacgtctcctcctcgctcaggacgaccttgcttttgacgatgagcacgacgttgaccagttcgatgggcaggtcggcggagttgaggttggggagtgtgacttcggtgtcgagtcccttgaggctgaggcatacgtcgggctgctgttcggcgtcggtgttgatgtcgggttcgatttcgatggtcttgttttctgcgctcatggcggtctcctgaaaaaagtgtgtgcggcggtctggtgggtggggttccccgtccgcagggaccgccatcggtgcggacggggaagaatgtcagggtcaggcggtgacggtgacgggcacggtcacgttcttgccgccggcggtggcggtgatggtgacgggtttgccggtttcggtggcggccttgccggtcacggtgacggtgttgccgttgacggtgacggtggccttcgcggtgtcgccgcttgtggcggtgatggtccagcctgaggcgttcgccggggagacggtcacgttgaacgtcgcggtcctgccggcggcgacgttcagcgtgttcggggtggcggccagcgagtcgaccttggtggccagtccggccttctcggccgcgagcagaccatagacgtggaacatgtagccgtccgaggccttgaacatcttgaacgtgacgttgaaggtcacgacctccgtgctcacgagggtcatatcgtcgcggtcggagaccttgcatttgccgatgggcagcacgatggggttgccgtactggtcgaggcatgcgagcacggccatgtattcgatgttcgtggccgcgtccctgacatggaagttgccgtcggtgtcggccttgacgccgaagtaggcttcggcgatgtcctgacggcattcgatgccgggtatctgcagcgtccagtagccgggctcctgttcggagaccacgatgtcgccgttgtggcccttgatctcggtctcgtcgcccggctcggggtgcagtaccgcgccgtcctccgagttgtagccgaccggcttcttgccctccggcggcgtccagttctcggagtccggcatctcggggatgttcgaatcgtcgagattccacaggaagagcgcgtagtccttgatgagtttgaccaggtcggcgcggttgccgctggtgatgtacgaagtgtctgtgaccatttgccatacgcctttcgatgattatgcttggttggtttcgacggtgagcaggagcgtgaggtacgccatgaggcagccgttctcgtcgctcatgcggatcggccccgactcgtggtcgatggtgacgaccggccgtggcggatacaggccggtcagatacagttcgatgtcggcggcgaggttctgcgcggcgtcgatgtcgccggtcccgtcgtcgcggcgcacccacacggagatgcgcaaacgcgcctgctggctgacgggggtggccttctggcccggcacggcgaccagcacgcattccctggtcggattgccccggttgcggacggtgccgaactcaacgtcatggaaccggtcgcgcagacgttcgagcagcacgggttccacgcgccggggacggacgggtggccggatgacgctcatacgaccaccatgcccagcatctggctcagcactccgtgggcctgttcgaacgcggccggagcggtggcgaccacgttggtgcggtcagtgtcctcgttgcggtacaccttgatcgccggatccaccgccgccatgccctccacctgctcctgcacgtcgtccatgaccggcttgacggccttgtgcagcacctccgtgccgaaagccttccggttcaatacgaccctgactttcttggccatgattcatccctccctgacgaacgcgttgaccacgtcgccgatatgacgcccgtgcctccaccattcgagcggcggaccgtccaccatcaacggcttgccgcgcaccacgaggcaatccgtatcaaggatgcccgtgggctccccgcggaaatacagggtgaaacgacgggccacgccctgcgaatccgcgccaggagactgcgaggcctccaccggggcaacgaaacccatgagcgtgtccacatgccgcatctcaccctgcaccgggttcccgtcggcatccacctcggccgcgccccggtacacgtcaacacgctccatgatgcgatccttccgccatgtctatcgaccacatgcgttggccggacaatccgaggttgcgcagcatgtcgtccgtgaaccgcagatacccgtcggggctcagccacgagtaggtgctggagaacgggccggtcgtctccgtggattgggtgacgccggtctgcccaccggacacctgcgcctccatggccgtgcgcaccatctggcagcacacgagctcgagcccgcgctcatgcgcgagccaccacgccgggtcatgtgtctcggggtaggggcggacgcggttgcggatgatctcgctcgcgtccgcgagcaggatgtccgcctgcgcctgctcctccggaagcagcttgtgccaccggtcttccaggtcggaatgcgtggcgaacgaaacggacgggtccatatggtcctcctttatccgattctggtgagcacgggcgtgatgtccccgtcgacggtggtcacgcttttgggcgcatgagacccgccgtgacgagagcgtcgcgcaaggccacgtattcggccttcgtcggcgtatcgccggccgggtcggccacatacgcggccttcgggacggtcgggatcacgcccgcggcgagcttgtccgcggtgatgcctcccgccagcatcgcgttcgtcacactgccgtccgcaggcgttgatgagcagccagcgaacggggtgccatccgggttccacaggcgtgcgggcacgtccatggcggccggcttgtgcttcttcctgttcgtcttctggacgatgaagtcctgggtgaacgcgcccatcaggcaccttcttccgtggaggtcttgagcacggcgaacgccttggaatcgacgaccgcgtaggagaacatggcctcggtgcggtaggcgatctggttgtgggccttgaggtccacgccggtctggtcggggtcgccgtaggggatgatctcggacgtgatgtctcgcaccatgccccatttgatgaggctgaaatcgcccatgatggcgagcacgttggtgggtgtcttggccttggccccgttgacggtggcgctggtggcggccttgatgccgtcgagggtgccgacctgcaggttgagcgggatctccgggtagtagcgcatgccggtggcgggcacgcggatcttgcgcaggcgggaggcccacgtgcggctgatggcgatgccgttgatgtcgtaggtctcgttgagctggtcggccaggttgtcgacgttggtgatgtcgtcgtctccggcggtgacctgcatggcgcgggccgtgagcgcgtcgaatccggtgaggggcccgccggtcttggggttgacggcgtggtagacgacgtagtcgagggcgcgtccgatggcctcggcctggtcggcctggatggactggatgatctggaagcggttgtcctcgtcggcccatttgagttcgctggtgactcgggttgtggtctgcaccttgaacgtcttgccgctcacgtagttcaggtcctgttcgtaggagctcttggtctggccttcggcggtcacgtcggcctcggcggcgccgttgaagatcatgtactccttgtcggtgaagatctgcgggctgctcggggacagcgcggcgatggtcgatgtctccttgaccttgttgacgacggccgtggcgacggtcttgggcaggtggagtttactggtgtccattgccatgatgttgtgttcctttcagatggtttgtcgatgttcagaggttggagaacaggtcgttggcccatgcgcgttcgtcggcgccggcggccttgccgtcgggggtcttgccctggttgggcatgcccttgggcttggggtgcgcgtactggtcgatggccttcgcgttcgcgctcatggcctccagcgaatcgccgtgcagcagcgaggcgggcacgccggtctccttggagacctgcgccctccactcgttctgctgtcgttccgccgcgtaggcggcgttctgcgcttcgagctctttgatgcgtttggcggtcttctcggcttcggacagctgcgagtccttgaactgttgcagttcctcggcggccttgctgttgtccttggcgcactgctcccacttgcgcgagtgggcgcgctgctcctcgaacttcgccttccagtcgacgtttgcggcggcgggttcgttgccggtgtctcccgttgcaggttcgccggaaccgccttcgtccgcgccggaatcgatgaaacgaaggttgttgcggaatcggcgccagtgcgacatgtcgtgcatgatggttctcctttatggttgatggggcccgtttcgggcataaaaaccacccgtgcgggcggcgtggagtggcgggtgcaggattcgaacctgcgtggcgtggagcagccgatttacagtcggccccgatcggcctcccgatgtctatttagaagtgcaacccgccgtcgtatggtagaatcgaagtaacggggatcccacgcaaccggctctttagaccggaacatcagtcggggggttatccccgtcttttcattccttcagattgatgcggtgaaatccctcggagtcgaacacccacagttctctgatgcgccgttcatgcgccagattgtaggtttcgagccttcgcatgagtttctcgggcagtttcgcgtctccgaagtccagcacgaacacgtccttgacgacgccttggacggcggctccgttggccgccttgttgatgcggtcggccacgttcctgtacttcaggccggccagcgatttcagttccgcgtcgcattcgtggctcagccaatggaagtcgttgctgggcttgccgtcatggcttttcggtatccactcgtattcctcgcccagcttctggaacttctcgaggaacacgatctcgtgccgttcgaggatttccctgctcgggtcgacgccgacggcgagctggcgccggtaccaggattccgccgtgcctttggtctctcccttcattgacaggagcctgacggactgctcccacgacatggtcggcgtcgggtagacgccgtccgtgaacgccaggggattgttccggcgcatgcgcttgagcttctcccggtagtcgccgccttccttgctggcttcctgccacatggcggtgagccgttcggggttgtatccggcgagtgtctggcggccccagctggggacgatctggcagtcgcagtcccggtggtattgcatctccagacctgccgagtcctcgctcaggtaggtgaagccccgtgaggcgagcatggtgcagaacgcgcatgtccttgctccgcgcggcactctggcccatcgtggtttcgacgggtcgatgcgcatgttgcgttgggtggtcaggcgtgcggaggcgttgatcatgtcggcgacgaattgcatcgcgtcatccgggttgcccagatcgggccacaggtcgtcgatcgtggctcccgcgcgtgactgtccgttcttgacctgcgtgtaggtcaggccgttgtagtcggtgttgttgaagccgccctgcacctgccagagggcgcggtcggggtcgatgagctgtgtgtggtcgaagtcctcaagctctatgcccgcgtattcgccccacaggccgcgcacggtgtcgtaatattcgttcgccagctgggaggcgtcgcgggagaagtcgcggatcgcgtccttgacgttcagggggtcgcgttcgaccatgttctcgatgacgtcggccgcgccctccctgaggttgtcaaggtcggtctggtagtccctgtacgccttgtccagcagcggctgcagttccggcggggctttcggattcgctgccatcagccgcctccgtgtcctgcggattcatccgctgctgtttgagctggtcgatgttccgttgggccttcatccgctgctggtaggcgcggaacgattggagctcgccggccgtgagtccgagcttggccagtcccacgtcggaatccgcccagtcgccgttcacgccggcgaccttggtgtagtagtcggctcttgcggcgtcgctcacctcgcgggtcggcgcccacagggggcggatgccggtcaggtcgggcggctgcgggctgttgtcgcgcagttgcacggccatgcccatggcgttgaggagctggcgggagaacatgcggttctgccggttcgcggtgcgcgtcagctggttctcggcggcggcgagcgcttcggcgctggtggggttggccagtcgtatgccgagttgttcgggtgggatgtcggtttcggccgaggcgagcatggcgatggtttcgagcatgtcgccgtggggttgcatcgatgcctgggagacctgtttgagttcggggatgtcgccgttgatgtcgcggctgatggcgttgatgctgctgacgagcgcgctccacgtgtcctgttggaaggattcgcggctcaggccgaggaaccagattttgggcaccgagtagaattcggcggacgcttccatgcggaccatggtgcgcatggccatgtcggtcaggttcatgagggcgcggttgatgcgtgagcggccgaaggggcggtccatctgcttgtcgtagacgatgggcaccacggcgacgcggtcgagccggttgtattggggttccgcgtcccacccgtatccggttttcatgcaggcgtagttgcggccgggcagccatgcgttgaatgcggtgatgttgccccatttgtcgctgtcggtgatggtcagcgctgccttgatgcgtcggcgttcgttgtcccatagtgcggcggaccagtcggccgagcgcggggtgatgaggatgcgctcgttgtcgtccgggtcgtagtcgatggtcaggaagctgcaggagtgcttgtagcagctgatgacggcctcgctcatgtcggtttcgagctcgttcatgcgcatgatctcgtcgatgccgtggttgtcggccccggcggcggtctcgaagccctcgaacaccgatttgtcggcgagcgcgcgcacgcttttctgtggccagccgaccacgacgccggctttctgggcgacgatgttcgggatgctgatgccgaggttgttgaagcgttgtttggcgtcgtagaacgcggagcgtagcaggttgcgtgggtatttgttgcgccagagttccagtaggcgggtgatgtcggccatgtcgttgtcgggcacgttggcgatgtgtgtcacggacgaggagccggtggacaggtaggggttgccgaagctgatggattgttcgctcatccgatcatgacctcctgtactcggtcggggtctcgtttggttatggtggtgccgtagagggcgagcgtgcatgccacgagcgggcttatgtcgatgtcgctgcccatcgggttccatccgacggcgccggatttgccgatgctgcgtgtggtggcgttggccacggccgtggcgagcgccggtgctttgtcgtccggcaggtgggtgagtttgccgtctctgagcatgtcgaggaatttgccgcaggcgcggcccatgtcgctgtagttggtgacgatgactttcacgtgccgggctttgaggtcggccagcaggctcatggcgggtgattgcgagtcgatggccacgcttgctgtgcgcggccagtggtcggcgatgtagtcgaccgcccattgggtgcctttggattgggtggcctcgaagcggcgcagttcgatgtgcgcggtgccgtccctgtggttgacggcgccgccgatggccagcgagctgcggtcgggtttcatgtcgagcgcgtatccgatcagtcctttgatgttgggtgtgccggtggcggctttggcccattgttcggggttgatggcccgattggtggcggtttcgtcccagatgcccagtgcctcgcggcggaagctgtccttgccgagctggcgttgcatgcgcagcatgctggtttcgctggtgcggcgcgggaagctcgggttggctttcctccattgggcgcggtcgtcgctgtcggcgtcgcggtcggcggagaattccacgtagagcatgtcgtcctcgccggcgagcgcctggcggcggcgttccgtgaacgcttcgccggggtcggcggggcgcggtggggtgccgatgtagaggacgagcgcgttggggctggtgttggtggcgggcaccatgtcgctgatggcctgttcggtcaggatctgtgcttcgtcgaacacgatgatgtctacggcgtcgttgcctcgggcgaagccctgggctcgtgcgccgaacagtatcttgctgccgttggcgaaggtgatttcctgcatgccgttgccgccgcgcacgccgtcggtgcggccggagtggtcgaggtatccgatgagcgcggggttgcgtaccagggtgcgcacgtggtcgaacgtgttgctgttggtgcggttgtggtgcgcggtccagatgacggtcaggttcgggatgagcgtgcacaggatgaccacgaggctggagacggtgaaggtcttgccggtctggcggcagatgctcaacaccacgccgccgacggaggcggcgaacgtgccgtctgctcttcggccgaggatgagcgtcagcagtccctgctgccagcggtcgtagcggatgccgcatgctttggcgcgcttgttgaccttggggaacatgctggtgacgatgccggagggcatgacgatgtggcgtgcgacctcagatagcttcgggtcggaattctccgtcatcgtcgtcgtcctccggatcttcttgcgtcgtcatgccttgtgcggggttgccttcgagccgttcgatttcgcgggtcagggcgagcagctgcttgctgatgccggtcaggctgcccggcggggtgccggtgctgaacatggcttccttgagccgggcctgcgtgcgtttgagcacgctcacgtagtcctcgggcccgtcgttcatcatcgcctcgaaatcggcggcggtgagggcgtccatcgcctctggctcatgttccgcgtcaccggccggggcgggaggggtggtgacgcggctcatgcgcttggccttgcggtaggcgcgctgcttgcatttggccgaacagtatttcgctttctttccacggccggacggggtgaacggctggccgcattcctcgcagatcaccgcgctcacctccaaaaaaacgtaacgggataacgtaacggccgtccaaggcgttacgttttgacatgccggggagatatcggccctgcgcccgagggggcttcgaccggggcggacgggtctcctccccacgtcaccagtcgccgctcgtggtcaacggcatcgaggtggccttcaggtcggccgtgtacccctgttcgaatgtttgtttgatgtgttcgcgcgcccacgcgacgctgtggttggagcggatgcggttgcaccagcggtgcgcgagccggcagttggagaacaggtagggcgagccgcctttgctgaccgggatgatctcgtctacctcgggcgagcccggcaatcccggcggcaatgatttgtccacgggcctgccgcacaggtggcatgtgtcgtaggccgccagcacgcgggccgcgacctgctggcgtcgccagccattggcatgacgggtgttgccacggtggccgctcatgacccggccttgtcgcacgactgctgccaggcgtccgcgaacgcctgcacggcccggcgcatgacgggttcgagggggtcgaccacaatatgcccggccggggtgacgctcacgggcaccgggagggcgtcgatgtcggcgagggcgttccccttgcacgtgatctgcaggctgatggtcggcatgcctggcattgtcatggcgtcatcgcctcacaatcaaatgaaaaagagtggcggggcgaacatcaccggcgctttggacgtgccggcggagtactctcgccccatgcaatgcggtcagatacgcgaaaacccagccacgtgagctgggtttttcgacacttctgccactgcaatcatcggttacagtcgagattttgtcaagctgcacctccgaccacgagccggtacacgtcgcagtaggcgatgccctgagggccgttgcacagcttgccccggttgacccacacgttgagcgtgcccctgcgcacggtgattcccgcgtcggtgaacgccttggctatctccgccgcagacccgcgcctggaatcatcccaacacaacgtcttgagcctacgcagtttgaccgtctgtgctcgctgttccctcccgcacacgggacaggtgacccactggtctgccgcgcctgcggtgagcatggtctcgcatagttcgcatgtgccgatctccctgcgttgttcgggcggatccaatgcgaggtcgaccttgcgggcaaggttgttgatgatgtgcatgtagaggcctgcgtcgtggaatgtggcgagtttggggtggccggcgcatgcgatgagcgtggcctcgaggtcctccatgcgtggatccttgtgccaatccaaggcgtcgatgccgtcgaggcagcgccagagttcgcgtgcggtggcgtcgagcatgtcgatgaggtcgagcacgtccagcctgataggcgtgggcggcgtggccgtctggatgcgcacgggcgcatgcccgcccggatgcaatgtggcgtcgaggctgtcatgcaatggcgtgacgtcacgcgccaattgcagcagcgtgccggcgaagcgcagctcgcacgccgtgcacagcgcgtacccgttttcgattatggtgttgcagttctggcagttcacgaaacccctccacatcggctaaactggttgcttgctgacatgccctccgcctttggtggagggtttcgttttatttgcctcgtcgtcgtatccgccggtccagattggatgggattggcggtattccaatgattcgtttatttgcgttgaatcaaatcaatggttcgatgaattccggggtggaatcgtccttgtggggtgcggacgtttccggatgggcgatgatgtacatgacctcgttcagcggcagtccgaggagcttcgccgtgtactcgggtgtcgcggccttgctccgatgccatttgagtatcagctcacgctggttgttcgtcgcgctcacttcacacctcccgtatgcgggtcgatgagctggcagctcatggcatcgatacggttattggtgcgggcttcgatgcagaggcgtttcacgtcgcccgtggtttcgacccgttggatgatggtctgttccggtgccggggtcgtaaccgcgtaggcggtgaggccgatgacggccagcaccatcgcgacgatgacggcgatgacgatggtgaagacgagcccgatggtggattccaccgaccagcttccgcgcttcatcgcgtgcctccgagcacgctaatgtaaaaatcggtggtgattaatgtaatttctttcatcttgtctccttgagcacgttgatggagcggaagagttcggtgttgagtgtggggttgccgttggcgtccggtttgatgacggtggtgaggttgtccgcgtcctggaggatccaccagccgttttgggggaagtaggaaaggtagccgtccagtgtctggccgctcttcgtgatggcgacgaaccggtgcaggaacagttcgctcggtgttgagtgctgccagtcgatgctttcgctcacgttcattcttccgtctcctgttcgtagaagtctttgggtgtgacggtcacgctgatctggcatccggcggcgagcgccgcgtcgatgatgtcggtgagggctgtgttctcgttcattgttgttcctttgttttcatggcgttgacggctgcgagcgcctttttggccgcgtgcagccatgcctgtttggagacttcgctgacggcgtcccagttggtggggccgggtgtgccctcgaagaaccctcgggcgcaggtctcgatctcctcgtctgtgggctcgtccgagttgagttcgttttcgatgcggatggccaggttgaacgccttgtcccagccggcctggtagccgacgacgaacgcttcggcggctgactcgttgcccagccccgcgtcggcgagcgccgtgagggcttgttggatgaggtcactcatcgtcgtcctccacgatggtcggctcgccactggtctcgtacatggtcttggccaccgccttgaggttccggctggccgtatcggagtattggccgaagtgcaggatgctcacgccttccagcacgcaggcgctcgccaatgcctcggtgagttggtcttgtgtccagattcgtgccgtgtggctcatgcgggtctccttcgggggggtgcagtgctcgtgtgccggttggtcgtccttcatccattggtcctggttgttgagccagtgtttgacgcatcgggtgtgattgtcgggcacgggcttgcggcacaggatgcagcgtggcttcatggccggtcctccttttctgcgagcgccggccccgtcatgagggtgaggtagtggcggtattccgcgatgtccctgttcaggcagtcgtggactcggtgcgtgggcttcgcccggtgcgtgtaggggtcttggccgagggtcttggcggtgaggcgcagtgtggtcacgtcgagggcccggtaggacagcaggctatcgatgggcgatgaatcgaatacgcgggccttggcgcagaatctgaggatcatgggcaaatcgaagtgttggatgttcgtgcctgcgggatgcaaggtgtacatgccggccatgtccccgatgaaccttgtggcttcccgtgcgattgcctcgggtgagcagtggacggggtcgctggtctcgcattgggcgagcagcccgttgttcaggtgcaggtccagggcgggcagttgcgcggagagcatggtctcccggctgatgtggacgaccgcttcgaggcgcgcgtgctcgcgggttgcgtccatgctggtgcagcgcaggccgatttcgagtatcgaacatctgttcgtgttgaggccggtggtttccacgtccatccacagcaaagcgtctggtttttcggggctcatagttcctccccgtggtcggcgagcgcgtcggcgatggcttcgcggatgatccggtgttcggcgagggtgaagccttgggggatgatgatggttctggtgcctaccggggtgtcgggtgggatgagcatggtcacgctggtggagtcgtcgcgtagcgtgaagtccacgttgtcgatgacgccggtgacgcaggccgtgttgtaggtgttggggttggtcattgttggtccctttcttggtcgatgcattccatgccggggtgtgagcgcgtgtaatggttcgggctgttgacggggtcgttgatccatgcggtggtgtgcatgcttaccagtccttttcgagttcctggcagtcggggcagatggatgacgtggtgtcggtgagtggtgcgccgcagatcgcgcagatggtcggatcgttggccggttcgggtcggtgggtggcctttcggagacgtcggatgagttcgatgacggggttggggcggttcggggttgctgtgtgggcgttcattcgttgcctttcttgatgttgatgtgggtggggaggtcttcgggtggcgggcatgaatgccattggccgtcggtgtcgagcagtatccagccgcgccggcagctgtacacgggcacttggcttggctcggggtcggagcttttgagcaggtagcccaatgctcgggcctgttcggggtgctggtggacccatccgtggcatccggtgctgttgtccgtgccgcacacgtcgatgacgttcga

SEQ ID NO: 3443 - DNA, 36445 bp, Unknown
  R151_18m  MAG No. k141_56137
aagattccgaccgccgacgaactggccaagtgcacggtcgccgaccccacccagccggatgccaagaagtccacgctgaccgcggtcgacggttcggccgtggccgacggcaaggccatccgcacggtgcaggcaacggtcaaggattcgttcggcaatccgctggccaatgccgaggtggcgtttgaactgcccgaaggcgtctcggccattggcggaaacaccaccgtcaagaccgatgccgccggcgtggcttcgctgaacgtcgtgtccacgaaggtcggcaagtacacggtgaaggccgtgctgaacggcaatgccatcggcaagggcgtcaccgtcgaattcaccaaggtcgcggtgacgccgaacaagcccggcgaccagaacaagcctggcgataccaagccgaacaagcccagccagaacgacaacaagaacaatgacaagaatggcgcttcgttgagtgccacgggttcgtcggtcattgcgattgtggcggccatggtggtgctgcttggcgcgggtgcggtggtacttcgcgctcgtagcaagacggagtagttcgtcgcaatacgggtgttgatactcgtgccataagcgggatttaggggttgcccaatgggtgcccccctaaatcccgtttgttttgtcgcaggacatatgccgagaccagtgactaaaatgctttagttatttgactaaaattattgatatcataagagttagcgcacggttgatgcatatggcccaatgcgggggtgccgtcaaccgtatcgcaatagtcgcaatgcggtcgtaaaaaggagtgttcatgagatctgctcgcgaggcatcgtcatcgtctgacggcacgcagcgtgtgagcctgaaagacatcgcagatgaattaggcatctcgcagaccgcggtatccttcgccatcaatgatcggcccggcgtttccgcggaaaccaaacgtcgggtcaaagaggctgcagccaggctcggctggacgccggtctacgccgcacaagcactgggatcctcgaagaccatgaccataggctttgcccccgcacgatccacgcaggggctcacggatgaaagcttcatgctgcacttcatggcgggtgtgcacgcctcgctcagccccaaaggctatggtttgctgtaccgcccatgccgattcctgaacgaggagatgagcgtatacaaggattgggcgtcgcgcaagcgcgtggatggcgttatcctcgtcgatttgcgagccgatgatccacgcccggaattgttgaagaatctgggtgtgcgcgcagtgcttgccggaggacccgacccgaacaattatgtgccgtcactgtccatcgatgattcacgcacgatgggaaccgtgctcgaacatttgtcgtcattgggacaccgccgaatcgcctatctttccggcgatccgaacctggattattcacaggggcgtgtcgcggcgttccgcgcatttgccaaacggcgaaagctggaatccatcaacatcgaattcaccgattttgttgcggaacaggccgcgatgctcacgttggggatgctgcattcaccgaagccgcctaccgcgttcatctatgaaacggagatcctcgccgcggccagtcttcacgccatggccgaagattattccgctcggcagatggaggcgggggagggccatgcggaagtctatccgaatgggctgcccgccattgtcagttttgaagacagtttcatttgtgaggcggcgtatccgtcaattaccgccgcgcatcgtgatgccagcgaatacggtgccaaagtggccaaactgctgctcaaagtgcttgccggagagcaggtgagcggcaaccggcgaatcctcaccccgaaactggtgattcgggacagcaccgccaagcccatggataccatggcgtagaacggtcattgcatcggcttgcagacaatgacatgtgaccagtacggcgttggcccccgtattccacgggggccaacgccgttgagaaagaggaagaaaaaaggatatagaggcttagatgctgtcgattattcagcgttcttcacggccgtcgcaatggccacggccgggtccaagaacggaatcagcgtggactggaaggcgtggtacaggtcggacttgcccggccagaccgtgccgatcacgtggttgttcttgtcaagctgatggaaccaggaaccgccctcgtggtcgatgacatgctcatcgacatactgggcgaatgtggcgtaccagttggcgtacatctcctcgccggtggccgcatacagcgtggcggaagtgttcaacgattcggccagcgtccaatgcatgcgatcggtgaccacgggcttgccgttccagtcggtcgtgtaggcgagtcccacggtgccgtcggcgttccatgcgtcggccacggcacgcgcgaacagatgctcggcggcgtcgacgtacggctgtgcgccgtcaaggttggcgaaggagcttaacgcccactgcgtgatcaagcgggcccattcgatgccgtgacccggcgtggcgccgtacggcttgaactgatcatccttcttgtcgacgttgcattcgaggtccagcgaccaatcggacttgaaatgttcggggatgcgccactcgttgtgcttcgcccagccgatcacatgatcgatgatgtgtccggcgcgtactcgataggcgttgtctcctgtggcatccgtcacggccaggaacgcctcggtggtgtgcatgttggcgttgagaccacggtacgggtcgagctcggtgaattcggtattccaggtatcgacggccaaaccgatttcgtcatcccagaaatgctcgtcatatgtggcgagcgcctcgtcgagcagttccttggcacccggacgcccggccagcagggcggaggacgcggcgagaatcacgaaggcatgcgcatagcagaccttgcccggcgcatgggtgccgtccgcgaacacctgcggataccagccgccgtgctcgtcgtcatgcagaatgccggtcaatcccttgagcgccgcgtcggccagctcgcccgcacccgggtatccgagcatggcaccaatcgaatacacatgggccatacggctggtgatccacgtttcgacgccgtgggaggggtcgagggtgccgtcggcgttcagccagccggaaccgccgttcggcgctgggaagcccttgccgaacttcagcagctcataggtttcggaagccatgaaaatgcggttggcttcggtgccgagtgcataacgtgggttattggtcataatgattgttcctttccttaacgagaacatgcggtgggtgcgcaatgagcattcagcgggcacgtcttagtgcttcacacgaatgtcgaaatagtccatgaccagttcgcagaacatcatattcgaccagctgaaccattcgcgcgtgtacttggtcggatcatccacgtcgacgccttcgtgcatgagatgtgtaccggcgtcggtggttacaagacggtcgaggatatgcgccttgaagtccttgctgtcgctggtcatcgcctcgatagacagcgcgatcggccacacatagcgcggcggggtgtgcggtgagccgatgcccttgagatactcgccctcgtagtagtacgggttttcgtcgctgagcagcgtgcgtcgggtcgccagatacgtcggatcgtccggtgcgcagtaccccaagtaaggggccgccatcaaggagggcacattgctgtcgtccatgatattgacgtgacccaggccgtcggtctcgaacgcgtaaatcgtctcgccattgcggttcgtcgtcttggcgtggttttcgatgccttcggtgatggtgcggcgcagctcgccggcacgggcggcgatatcggcgtcatccagaatctcaccgccgaagatgcgttccagatagcccatcaccacggcggcgaacatgttcgagggcaccagatagtggtaggtgcaggcgtcgtcgctggggcggaagccggaccaggtcatgccggtgtacgccaccggcgaccccttgccgtcattgctcagcgattcggtggggatgtccgtgtcgcggatgaagaaatacggggagcgttcatgatgctgctcggtctcgaagacgtcaagaatcttcttgacgccggcaatgaattcggcatcgaagtgatcggcgttgccggtgttcgcatacagcatccaagccaactggatggggtagcacagcgaatccacctcgtacttgcgctcccaaagccaagggctggagaaatcggaccggtcgtccttgtcccaggaggcgccgttcggttcctcgttgaaggcattcgcatacgggtcgatgatgatgtagcggaactgttgccgtatcagaccggcgatcaggttcgcaatatcgctgtcttcggcggcaagggccagatacgggcgcaattgcgcggtcgaatcacgcagccacatggccgggatatcgccggtaagcaggaatgtggtgccgtcgtcatgccgtttgaccgtggtggtcagggtgtcggcaaagcaggcattgaagttctcggcccaggcggcgtgttcggtgccacacaggtccgtgatgtgctgcatgaaatccgagaccgacttcggtatcgcggtggtcgtcataaattcaacttctttgtttgagggatatacgtatcaagggaacagcattattctaaaccgctttagttcatgacacgcgaaaggatgtgaagagcatgagtgtgagcgcaccatatgaaaaaccggtgagatttcctgttcggagaatctcaccggttgcgatcagtcgattcgtgaagtcgcacgaatggcggataaggggatgggtggattacttgccgatttcagccagatagtcgggcatctcggccgggtactgcggccaggcaccggcctgggtgcagacgtaggcggcggtgttgacggccttgcggtgggcttctgccagcgtgtcgcccagcaggatgcgggcggtgaaggtgccggagaaggagtcacccgcacccacggtgtcgttcacctcgacgtgcggagtgtccagcgtggagacctcgcccttgcgggagatgatggtggagtaggcggagccggcggtcagaatcacgtagtcaaggccgaattcctcgatgaaccagcgggaggcgtcttcgccggaggtgccgcggatgtcgaacatgtcgcgcagcagcaggagttcctcgtcgttgatcttgaagacggtggccgccttgaggagttcctcgatgaggtccttggagtagtggtcgccacgcaggttgatgtcgaagaacttcatcgcgcccggcttggtgtgcttgagcagctccgtgatggtggcgtgcgattcgggggagcgcagggccagggtgccgaagcagacggcgtcagccttggagaccacgtcgatgagctggcgggtgtacaggatgtggtcccaagccacgcccttgacgatggtgtactccgggatgccgttcttcagcgcgacctcgacggtggaggtcggccaggcgttgcgctggatgacggtgttgatgccggcctcgttggccttggcaatcagttcgtcgccgagctcatcctcgccgaccgcgctgatagcccagccttcggtgccgttcttcatcgcgtggtaggcgaagttgacgggggcgccgccggctcgcttgccgctcggcagcatatcccacagcagttcaccgaggctcagaacgatcggggtagtcatggttggtttcctttcctttgtttcttttaccgggtgtttcgtatggaacatcttgtgatgtcggcgcttggtttaggagacgtcgaagaacaccgaggggtgttcgaggaattgggtcaccgccactgctgcggcaccggagaccgccgcgtcggcggacagggtggataggctgatggaagtggaggcattgatttcggggatggcccgttcggccaccgtggcgcgcacctcatcgagcagtatcgggccggcttcggacacgatgtcgccgatgatgatgtgctcaggattgtatccattgaagatggtgacgcatccgtagccgacgtatcgggcgacttcgcggacaatggcgattgacgcttcgtcgccgtcgccggctttggcgaacagggcgcgggcggcttcggtgtgggtcatatcggccgcgccgggaaccacggtgccatcggcgatgagcatgtcgtgaatggcgggggtggagcagtagcgttcaaggcagccgacgttgccgcaatcgcaggggcggccgttgacgtcgatggagatgtgtccgatttcggtggcggcaccgaggaagccgttgatgagacgaccgttgtcgatgacgccgaggcccacgccttcgccgaccagataataggcgaggttgccgtcggcgtgcaccgacgggtcgaagagataatgtgcgagggctccggcgcgggcgtcctgttcgatgaacacaggcacgcggaaagcggtggcgaattcgtcgatgaagttgattttgcgccagccctgcatgctggacaccacggcggtgcggcctacgttacgcaggtaggggccgggcaccgccatgccgatggccacaatggacgggtcgttgtcaagcagttgttcgacgcgctggtggatggtgacgatggtgtcgttgatggtgttgtcgtacaccgtgggcaggttttcaaagctcagggtgttgccacataggtcgaacacgccgatctgcaccagcgagcgggcgaatttgatgccgatgatgcggaaccgcgtggtgtcgagtttgagaccgatggaacggcggttcttggaaccttccaaatcgccggtctcttcaatcatgccggcctcgataaggcgtgcggtgattttggtgatggccgcgggggtgagttccagtgccttggcgatttgcgcgcgggagctgatgccgttgtgatacaggtgcttgacgatgcgggagcggttggattcggagacactggcttgggaagtggcatgggtggtgtttgttgccatcggtcttaagtcctccttgtctgcaccgttgcgagttgttccgctcgtctttgaatctgaacttgattaagatattaacgctgttaattgattgacgcaatcaatatgtcattcggtgtgtcgtgcatgtgagtgtcgtcttgggggaatttgttaagatggttgtcaatagtcggatgcacactgatatcaagcgaaacgttcgatgaagaacaggggaggactgatgtctgaaaacactatgaacaatctcaaaatcggtgttgacgtgggcggaacaaaaatcgaagctgtgctggttgacgcaatgggcacggtattgggttccgcccgtattcccgccaggcatggcaacgatgccgtgatcgaagacatcgtcgctgtagcacatcaggcagcgggtgagcgttttgacgaggtgagggccatcggtgtcggtaccccgggcacggtggattcggccagcgggcatgtgggcaatatcgtgaatctcgacgtggtctcgctggatatggggccgttggtctcgcagcgttcgggcgtgccggcccatgtggaaaacgacgtcaatgccgccgccgtcggcgcggccaccgtattgggcggtgcggacggcatggccggtaccattgcgttcctgaacttcggcaccggactggctgcgggcatcgtcgaaaacggcgtgctgatgcatggctatagcggcgcggccggcgaaatcggccatatcccagtcgaacctcatcgcctcaagtgcccttgcgggcaatacggatgcttggaaacagtctgctcgggcgcatccgtggggcgtctgtggcccaacgccgacccgccgatgcccgacctgattcgtcgcgcgaaaaagcgggaggccaaggccgtcgatgtgctggacatggtagtgcgcgccatcggcgacaccatacaaatcctggctcagtccgttgatccgcgactcatcatcttgggcggtggcatggccaaaaccggcgaaccattggtcgaggtgatcacggctgagctgcgccggcgcgaatcgcaatgccgattcctcgaaacgctggacctgccggcccggctgcgtctggcacctgtcggccaaccagtcggagccatcggtgccgccatggcggcgtagcctggcatagtgccggggcatgggagatgaggcctcagatttgtctccgaggccccatctcccatgcagtcctatatcgctttatgtcgtgctgtgccgcgcttggtcttgcgcgtttcgttgccggggtgaccggcttttatttggccaagtgttggaagaccacggcgatggcctcgccctgtacggtgatgtcaggtccgcattcgcagcgccggattaccgtgtgtttgtggaaggacgaggatgtggcggcatccagatattgctgggccgcgccgatgaacgtcgcgttgatgatgttcggctggccatagacgcatacgtctgccatatccaaaaggcccacaggcatggccagggcttggccaagatagcggcccgcccgagcaaggataccctgatgctgctccatgtctgccgcgctgagttgcttcttcaatgcggttccggaaatcatcgtctccaagcaaccgtgcttgccgcaagggcacagcggcccgtcaagatcgatggaaatatggccgagctcgccagccgcgtgcagttcgccgattaccggcgtgtccgagagcagaatcgccgaaccgatgcctctttcgatgcgcacgaaaagcatattcggcccgccttggccaaagaaacgttcggtgagcatggctgcggtggcgtcgttgctgacgtttacttcaagtccgaaatgttcggcgattggcgtggacaggtcgagattgttccagccgcgcatcgtggaggagcggaccacgccgttgtctaccacgccgggggaggcgactccgatgccgatgacctcgccatcggacatgcccagcatcttctcaatgagctcgatgatcacatccacggaaacgaatgagccggtgttcagggtgacttcggcgtgacgcagcggctggccgagcagattggtgactgcgccgtgcagcaggtgctcctgcgtcaggtcgatgctgatgatgcgcagtcgatcgatatcgatgctcagcagtgtgcctcgtttgcctttgccgccgctgggtgcctgaccggtctcgcgcagcaatccttcctccagcatccgaccgaccacatcggaaacggccacgcggctcaatccggtgcgtcggccgagctcggcgcgcgaatactggttggtggggaacaacaacctgaagataagttggcggttcttgcggcgcacatcggcgggggaagccttggccgcatggtcgtcggtcgttgtgttgagaccgagatatgacatgtttcctcctacctgatggtgagcgagtggacggcgattgttgttccatacacagcttagacggtgaagcgcaatttcgtcgttgaaactgttatgaaacttcactaataaattccagtgtacctgtgtgaagcgtcaggaaacaccgtgagtgttcatgaggtccaaaattgttactatcattaacaaatagcgaatcaccaatcggcgctacgccgaacggtggttggaacgccgcgcggcacccggacgtgacaaggatgttgccattatccgcaagacgggcggcggtacagcgactcgcatcgggcgggccgcacggaactggaggaaaccgatgccggaaatcatcattgtcaagaacgaagccgaggccggcgagatctacggccgttgcgtggcggacctgatcaaagcaaagccggacgccgtgctgggcctggccactggctccagcccgctggccgcctatcaggcgctcgccaagatcgtcaaggacgaggccattgacgtttcgggcgtgcgtggtttcgcgcttgacgaatacatcgggctgccgctgacccatcccgagtcctatcatgcgaccatccatcgcaccgtggtcgagccgcttggcctggacccggccaaggtccatgtgcccggcgacgtactcaacggcactccgctcgaagacggcgacaaagtcgcgctggccggcccggcctatgatcatgccatcgaagccgctggcggcatcgacgtgcagatcctcggcatcggcaccgacggccacgtcggcttcaacgagcccggttcctcgctggcctccggcactcgcgtcaagaccttggccgaacagacccgcatcgacaacgcgcgcttcttcgacaacgacatcaaccaagtgcccacccactgcatcacgcagggtattggcacgatcatgaaggcccgtcacctcgtgctgctggcgttcggtgccggcaaggccgaagccatcgaggagacggtggaaggcggcgtgtccgcgttctgcccggcttccgcgctgcagatgcacccgcacgccacgattatcgtggacgaggaggccgcctctcgtctgcgccacaaggactactatcgctacgcctacacccacaagccggcctggcagggcatctgagttatcgtgtgctggctcccctctttgtgtgaggggagctgtcgaatgtaatgagactgagggtggttatcggcggcggcatatgtgtattgcttcccgattggaccaccctcagtctcgtttcgcgagccagctcccgttggcgggagcgcatgagcggtaaggagaacaacatgtctgataggaacgagatagtctcgcgcgtgaccgcggcactggagggcaagccggctccggtggcgattcgcaacgcgcgcaaggtggatgcgtgcggcgaacggcgcggatattgggtcgtctccgatgccgccggcgtcatcgtggcggccggcacgggggaggaggccttcgagcactactgccgcacggtggggctcgacccggccgatcgcaacgcggtcatcgacgccgaaggccgtattctgacccccggctacgtggacatccacgcgcacggcgcatgggagaagagcttcgacgacgggtcggatggcatcgatgtggcgcgggccggccacgccgtgcacggcaccacgcgccaggtgctctcgctgatcaccaatcccgtggacgtgatctgccggaacatccgcaccgtccgcgccaagatggagtccggccgccccgacatcctaggctgtcatctggaaggtccgttcctggctctggcccgcaagggcgcacatgacccggaatgtctcaaggatccggtacccgacatcgtcgacgacatgcttgaggcttcaggcgcggcgaacggcaagcttggctgcatccgccagatcaccatcgcccccgaactaccccacggcatctccgccatccgccagttcgccgctgccggcgtggtgccggccgtgggccactgcgacgccgactacgagaccgccaaagccggtttcgacgcgggcgcgggcatcatgacccacatgttcaacgcgatgaacggcctgcaccaccgcgagcccggtccgattccggccgcggtggaggatccgcgcgtcatcatcgagctcatcaacgacggctttcacgtgcaggatccgatggtgagcctctccttccggttcgcgcctcatcgtacggcctttgtgaccgatgcgatggccgcgaccgactgcccggacggtgcctacaagttgggtgcactggacgtgaacgtggtcgatgggcatgcgcgtttggtttccaacggcgccattgccggctccactctgctgctggaggtcgccgtgcgccgtgcggtgtgcgaactgggcttgagcccggtggacgcggtcgaggccgccacattgacgccggccaaggcgttcggcttcgaccggccgaacccggtcaccggggtgcctatcggcctcatcgcccccggcttcgccgccgatttcaaccttgccgatccgaccgattggacggtcgaacaggtgtggtgcgcgggccgcaagctcaagtagcagtaggccgaccggttgacgaatggaaagcattcgtctacaagcatgttcaaatggtgacatgatagcatgttcatctcaccatttgaacgttattcacgtcgtaatacaagaatccgtaatactgctcgataccgcataaaaccggccatggtcgccacaagcgaaacataagtcgatggctgtggaaacgcaggggtaacacatcctcaccatagtcaggcggtaatccacgcccgcagtgatggcgtggaaacaagttatgagagaggattcctgttgaattccaagaagattctggccgccgccgtctccgtggccgccatcgcatccctgaccgcctgcggcggtgtgaaggatgacaccaccgcaggcgccgattccggcaaggccatcaccatcggcaccaccgataagatcaccagcctggaccccgccggctcctacgacaacggctcctacgccgtgcagatccaggtgttcccgttcctgtatgcccaggactacaacacctccgagctgagcccggacatcgccgccgatgacggtacctggaacgatgacggcaccgaattcaccgtcaagctcaaggacggcctgaagtttgccaacggcaacgacctgaccgcttccgacgtcaagttctcctacgaccgcatcaagaagatcaacgacccgaacggcccgagctccctgctcgccaacgtcgaatccgtgaccgctaaggacgacaccaccgtggtgttcaaggattccgtgcctttcgacgtgactttgaagcaggtcatgtccagccccgccggcccgatcgtcgatgaggataccttcgacgccgacaagctcaccgacgccgacaccatcgtctccaagaaggccttcgccggcccgtacacgctgaccgccttcaagatcaacgagtccgccgcctacgctaagaacgactcctacaagggcctgaccccggccaagaactccgccgtgcaggtcaagtacttcgccgacgcctccaacctgaagatggccgtccagcagggccaggtcgacgtggcctaccgctccctgagcccgaccgacatcgaggacctctccaaggactccaaggtcaaggtcgtcaagggcccgggcggtgaggagcgcttcatcgccttcaacttcaagattcagccctacggtgaatcccagcccgacgccgacgctaacaaggccaaggccgtgcgccaggccgtcgccaacctcatcgaccgcgacgagctctccaccaaggtctacaagggcacctacaccccgatgtactccttcatcccggacggcctggccggtcccgatgacacgctgaagtccgcctacggcgacggcaacggcaagccgagcaccgagaaggccaagaaggtcctcgccgatgccggcgtcaccaccccggtcgacctcaagctccagtacaacagcgaccactatggctccgcctccgccgacgagtacgcggccttgaagtcccagcttgaggaaggcggcctgttcaaggtcgacctgcagtccaccgaatggacccagtactccaaggaccgcgtggtcaccgacgattccgacggtgtgtacccggtctaccagctcggctggttcccggactactccgacccggacaactacctgtccccgttcttccgcgacggcaacttcgtgaacaacggctactccaacaaggaagtcaacgacctgatcgtcaagcaggccggcgagaaggatgcctccgcccgtgaggacatcctcaagcaggtccagaaactcgagaccgaagacctctccaccatcccgctgctgcagggtgcccaggtcgccgtcaccggcacctccgtgaagggtgtcaccctcgacgcttccttccgcttccgctacgcctccgtcaccaagggctgatccagcatgagctcccctctttgaggggggagctgtctggcgacggcagactgaggggagcccaactcgtatgactcccctcagtcggcttcgccgccagctcccctcggagaggggagcctttattgctttatataccgattaccaacaccaaggagcatcgcgtgtcagacagcgccacagcgacctccagcaccactccggcgaaagccaagacgaagaagaaccgactgtcaggtagtttcttccgcttcgtgctgacgaggttcctcctcattatccccaccgttttcattctggtcaccatcgtgttcttcgtgatgcgcgccaccggcgacccgatttccgccgccctgggcggccgcctgacacccgccgaactccagcagcgcatccacgcggccggctatgaccgcccgctgatcgtgcaatacgtcgactatcttggcggcctgctgcacggcgacctcggcacgacgctgaccgataaccagccggtgatcagcatccttacgcactacggcgccgccacattcgaactggccttcctcgccctgatcgtggcgctgatcgtcggcatcggcctgggccgactcgccgcccgcaaacgcgaccgtgccgccgacgccggcatccgcatcttcgccatcctgtgctacgccaccccggtgttcttcctcggcctcgtgctgaagctcatcttcgccgtctggctcaacatcctgccagcctccggccgctccgacctgaactccgaaatgcagttcacccgtctggtatcgccgaccggcttctacatcatcgacgccatccagctcggcgacatgaacgtgctcgtcgacgtgctgcgccacgccgtgctgccggccgtcgccctaggcctgctgaccgccggcgtgttcatccgtctggtgcgcaccaacgtcatctccacctacaattccggctacgtcgaggccgcccgctcgcgcggcgtctccgaaaagcgcctgctcaacaagcacgcctggcggccggccctgatcccgatcatcaccgtcatgggcatgcagatcgccctgatgctcgccggtgcggtcctgaccgaaaccaccttcgaatggaagggcctgggcttcatgctgtcccagtacctgaaggcccgtgacttcgtggccgtgcagggcatcgtgatccttatcgccatcatcgtggccgtcgtcaacttcctcgtcgacgtcatcgccgcgcttatcgacccgagagtgaggtactgagatgaccaccgcatcctccgacaagatcaccgtccccggtgacgaccgcctcaccaagctcaacgtcagcaccaagacgccgttctggaccaagattccaatcatcaaggaactgcgcgtggcggtcggctggcagaagggcatgctgatcaccggtctcgcgatcaccgcgttcttcctgctcgtggccctcttcgccccgctgatcgccccctacggccacgcccagatcaaggccgccgacggcacgtccttcccggcgcaggccgcgccctccgccgaacacatctggggcaccaccgccgccggattcgatgtgttctcccgtgtggtgtggggtgcccgcaccgccgtcatcgccatcgtcgtggccgtgctgctctccatcttcgccggcgtgctgcttggtctggtgtccggctactacggtggctgggtggaccgcatcctggtgatgatcgccgacgccgtctactccttcccctcgctgctgctcgccattctgatggccatcatgatctcccacggccagtccggcctgtggagcggcatcctggcctccggcatctccatcaccgtggtgtacatcccgcagtatttccgcacaattcgcgccgaagtgatccgcatcaaggaatccgcgtatgtcgagtccgcgcgcgtggtcggcgcctccacctggcgcatcatgaccaagcacctgttcaagaactccacccgcacgctgccggtgatcctgacgctgaactcgtccgaagccatcctgaccctcgccggcctgggcttcctcggcttcggcatcgagccgaccgccgccgccgaatggggctacgacctgaacccgttcggtttccgacgtgaccgccggcatctggtggaccgccgtgttcccgggcatcgccatcgtgcttatcgtgctcggcatcacgctcgtgggcgaatcgctcaacgatctggccgacccgcgtctgcgcgcccgcaagtccgccggcgaagtggtcggatcgatcgaagacacgtccgtcgacccaaacgagaagccgtccgcacgcaacgaggtgatcgccgaactcgacgcgaacgtcgacccgccggccaccgtcaccgaccatgacccgaccatcgtcgcctccgaatggaccggcgaaggcaagccggaaggcaaggagtgagagatgagcgaagacaacaagaatctcgccgatatcaaggacctgtccgtctccttcatgaccgacgccggttccatcaaggccgtcgaggacgtgaacttcaccattccgcgcaagaccgtggtcggcgtggtcggcgaatccggttccggcaagtccgtgaccgcgcgctccatcatcaagctgctgccggagacggccaccacctccggtgccgtctacctgtccaagcgcgatggctccgattcgctggacgtgctctccctgagcggcgaacagctgcgcgaagtgcgtggttccgaggccgcgatggtgttccaggagcccaattcggtgctgaacccggtgtacaccatcggctggcagattgaagagggcctgcgcgcccacggcatgaaggacaagaaggaactgcgcgccaaggccatcgacatcctgaagaaggtcggcatcccggatgccgaaacccgcgtggactactacccgcaccagttctccggtggccagaagcagcgcatcgtcatcgccatggcgttggtgctgaaccccggcctgattctggccgacgagcccaccaccgccctcgacgtgaccgtgcaggccgaaattctcgacctgctgcgcctcgcccgtgacgagttcgacgcctccgtgctcatcatcacccacaacatgggcgtgatcgcggacatcgccgaccaggtggtcgtcatgtaccgcggccacgtggtcgagcagggcgacgtggagcagatcttctaccatccgaaggacgactacaccaagcgactgctgggtgccgtgccgcgcatcggtcagaagctggtcgtgcgcgaccgcgagggcaagccgatcgagcgcaaggccgattggcgcgaacagccgatcgccgttgaggccaagaacctgaccatcacgtacccgggccatctcatgcagcccgacttcaaggccgtggacggcgcgaacttcaccatccaccgctccgaagtgctgggcctggtgggcgagtccggttccggcaagtccaccaccggccgtgccatcgccggcctgcagaaggtgtccggcggctccctgaacgtgcttggcatcgagatgaacggcgtcaaggagcgtgacttcaagcccaagcgcgcagacattggtttcgtgttccaggatccgggctcctcgttcaacccgctgatgaccatcgcggagaatgtggccgagccgctgctcgtgcaccacaagtacggttccgtggccgaggccaagaactatgtgggcgacctgctggagatggtccagctgccgcgcgcctacatgaaccgtttcccgcatgagctgtccggcggccagcgccagagggcgtctttggcgcgtggtttggcgttgaagccgtcgctgctgatcgccgatgagccgacttctgcattggacgtgtcggtgcaggccaaggtgttggagctgttcaagcgactgcaggcggaaatcggcttcgcgtgcctgttcatcacccatgatttggcggtggtcgatatgctcgccgaccgcatcatggtgatgcataagggccagatcgtggagcacggcgatgccgaccagattatgcagcacccggagaacccgtacaccaagaagctgctggcctccctgcccgtgcccgacccgcgcgaacagcagcagcaccgcgcccacctccacgagctcctagcccaagaggcgtaatcgcatagcattggagctccctcgtcagagggagctaactttatattcgctagtactgctgcccatcgaactggaacagggcgtgggcgtcgccgtgctttttgttctcgatgtaagtatggaacagctccagccgctcgctcgtgctggccgccaggggagtgggcaggtcatccagatcgaaccagccgacgctgaggctttcctcgtcgcccacgaacggctcggcattgccgccgggcttcagggcgcacaggaacgaatgatccatgtacatggtgttgtcgccattggcgtaggtcagcaccttgtttgacgaggtgacggccaccaaatcggtgacgatggcatcgatgcccgtctcctccttgatttcgcgcaccaccgtgtccgccggctgttcgcccggctcgttgatgccgtagaccatcgcccattcgcccgtgtccgaacgacggcccaacagcagttgaccatgttcgttcagtacacaaccggtcacgccattgagccatagcagatcatggccgatcttcttacgcaattccaacacaaattccggagtaggcacattgcctccttagtagaaaaaaaggagctccctctgatgagggagcttaagggttacttggcttgggcagcctgcttaatatggtgcgcttcgcgcatgatttcattttcctcgcgcttgtcagcgttcggcgtcgcctacaatcagtccaccggactgattgctttacggctccgcatccacgcttcgacgtcgtcgatctgcttcgggatgccggcggaaatccattcggggccgttctcggtcatgagtacgtcgtcctcgatacggatgccgatgccgcggtattccggcggaatcagcagatcatcctcgcggaagtacagaccgggctcgatggtgaagatcatgccgggacgaatcggcgcgccctgataggactcatagcgggcctgcgcgcaatcatgcacatcaagacctaggtggtgggccacgccgcaggcgagccaacggcggtgctgctggccttgcggggacagtgactcctcgacgctcaccggcagcagaccccaatcgtgcagacgctcggcgatcacacgcatgcaggcgtggtggatgtcggaataggtggcacccggcttggcggcttcgaaaccggcctgctgcgagtccagcacggcctggtacagacgcttctggaagtcggtgaacttgccgttggtcgggaaggtgcgggtgatgtcggccgtgtacagggaatcgacctcaacgccggcatccaccagcagcatgtcgccggtcttcaccacaccggtattgcgcatccagtgcagaatcggggcgtgggggccggaggccacgatggagtcgtaaccgatggcgttgcccagctcacgggacacggcgttgaacgcgccttcgaggatacgctcggaacgcggcttgtcgagcgcggccggcagtgcggagagcagacggtcgaagccgtgcttggtggcgtccacggccttgcgcatctcgttgatttcgtagccgtctttgaccatgcgtgcctcggcggcgaactcgtgcagcttgtcgtcggatgcggagttcttgtccggatcggcgaaaccgttggcctcgcggatggactcgaccatcgaggtgatttcgggatcggtctcgctgaccacgcgcacacgcacggcgccggcctcggcacccacgtccttggacagggcgtcggccagctgggcgatgtcgtgggtctcgatgccggtcatcgcctgcatctccttgaggccagcacgcgggccaacccagtattcgccgtagtgggcggacatgaagaagtcctcggtggagttgtcggcgcgaggtgccacgaacagttccggagtgtgcgtcttgccggcggcgacttcgggggagtcggggtcgaccgggttcaggaccagcacggcgccggcctcgtaatcggaacccagaccggtgtagtaggcgaacgtggtgtccgggcggaacatgtaatcgcaatcattgttgcgcaccttcggctggccggccggaatgaccagacgctcgcccgggaaggctttgcccagcgcctcaaggcgggctggcgtgaacttggaggattcgagaggcttgatctccggatcatcgtcggcccagccggacttcataaactccttgaatgcagccgactgcgggcgcagcgagcggttgttcacacggtcgctcatcgactggttcgcgcccggcgccgtagcgcgctcctcggcctcatattccttgtccttggcggtgatcacttcacccattgccactctcctgtatgtagttgttgtcgaatcatcgattcccacctcatactagtcggctttatgcgatgtgccacgattgacggctgacggtaaaaccaagtacggaatttggacggtcttccggacatgcccatatggcgagtgcatcgggctggaatgcgggcccgtttattgttctcggtagggaaggaggggcatgggctggagcttgccgattgatattggcgtattttgcgggctgaatccatgtgaacccatgcgatgaaggttcatcgcatcacgggacccgctgctctgcggatgcctccatctggggcactctggctttgagcagttttacccgcagcggagtgcgttcgatgacgtcggcgtatgtgaaatggacgatttcggtggcaccggctcgtttcagtccctcgtcgcgtgctcgttccttggccaccacctcctgaatgctgcggttatcggtcatggctgggtccacgtatttttgtgtgccgtcgtattcggccactatcacgcgcccgtcatcgagcttccatacgaaatcaacgcggtgctcggtattcgtctgcgggtcggtcaccgttacctgaatacgcggcgtgaggaagcgatcctcgatgatggtgcctcgcgcgagggattctccaccattctcgctcctttcgtttgcatagcgcagcaggcggaatactcgggcataatcgattctccattgaacgcagtcggcggctatctcttccttggttattcccttggcaagggccgaatcaaagatcggcaacgcaaaccgaaaatcaaggtctatagcggcctcgaccaaggttctagccggtgatatcagggataggccggaggcctcgtaatgtgtcttcggattgttcatatcgggcatatagacatgtcgtaagcgctgatggcattgacgagatccatgatcggaagtcacgatggttatgcagccatcatgcaaatgccattgatgttcgaatccataagcacttactgccaccaagccgccaaaaacccactgaggatgctcttgcgcaagagcgcgggccatatgcaacgttcgctccggcggcgtcaaaccatcccagtatgcggtatttgcataaagactgggaatgccgtcatacactttcaacaactcgccactctgggcacggcggcgtagagcggtctgttccgcttcatttcttgaatagacgcatctcagctcattctgcgcggctgatatgagcgaggccactgctttgtgtgtcttcatgacgtcgagcgtagccggaacgaagcagcgtaagtatgaatttcagccattgtggttctagcctcggagcttggctgtcttggagtgagatattcccgataatttcaaggtattaggccgctaattcggaatagtggataacatacaaaacttatccaccatcagtaatgtcattcgaacaacgtgctttggggattcgaacaagatatcatcggcgaagacggatgtagctggtagagggcggcgaattgacggttaacggtgcttatgctttgtacgccgtcggtgctggttcagatattggctggcttctgtctgagtgtggaatctagcgtcggcgtgagtccaatggttgtatcgtggccgacgatttgctgcaatttattggcggcatagatccagggcttggacggctgccgacggtgagagcagtcataacagtgaatgagcctctgcgagttcaaaagatgatgtagaggacgtttgtgagagtcgtttccggggcaagacatggtcgattgacgacgttgaaatttctcaacgacggcagaatggcatgccttggcgaggagacgacactgagaggcgatggagtcgggattaatccaggttttggccagctaccgactcgcaagagcatcatagcgtcggtgtaccgccagaagctggcactgtaccgacgctgaatagcatcagcgtcgccggacatacaagttttggattgcagccgactaagaatgggatgccgacggcaagagccgcattgcaactatatgagatggcttcactgtgcgcgctgcaggaaaaggccgcccgcgcggcggcgacatatgagacggtttcactgtgcgcgcacgataaaccaccccggcggctaggatagagggaattgagggagtgcggctccacgcgtgaaggcaagaatcccgaaccatgcagggcaaacctgtgcgaggggagcttcctgcgcatgcggaagcggaatatatgcgggcatgcgtagacatgacgagaatggcacgaacacgtaagtggcatacgcactccgaacggttcaacagcaacacgagcagaggtcagaagaggatatgtcattcgagcatccgaatcggaacaacgagagcatgcgggacgtcgaactggacatcatgagccgcccgccggagcataacaccaccaatctggatctcgaccggatgaacctgatgctcgacatcctgggccacccggagcagtcgttccgcgtgattcatatcaccggtaccaacggcaaaggctccaccgcacgcatggccgaggccatctgccgcgcctacggcatgcgcaccggcctgtacacgtcgccgcatctggagaagatcaacgagcgtatcgccatcgacggccagcagctgtccgacgacgatttcatcgacatctgggaccagaccaaggatctcgtggccctggtggacgccaagatggaggagcaaggcaagccgaagatgagcttcttcgaggtgctcaccgccatggccatctggaagttcgccgacacgcccgtggacgtggccatcgtcgaggtcggcatgggaggcctgtgggacgccaccaacgtgctcaacgcggatgcggccatcatcggtccggtggacatggaccacatgcagtggctgggcgacaccgtcgaacagatcgccaccgagaaggccggcatcatcaagccgaactgcaccgccatcatcgggcctcagccgcatgaggaagccgtcatgccgattctcaccgaagccgccgaacgcaaccacgccatgctcgtgcgcgacggctacgaaatgaccgtgtccgaccgtatggccgcagtcggcggccaggtcgccaccctgaccacgcccaacggcacttacgagggcgtgccgatcgccaagttcggcgagcatcaggcccacaacgcgcttgccgcgcttgccgcctctgaagtggtgattccggtcaatggcccgctggacggcgacttggtgggcgaggcgttgagctcggtcaagattcccggacgcatcgaacagatccgcacctcaccgaccatcattctggatggcggacacaacgtgaatgccgccgaagccctacgcaaggccatagaggaaagctacgacttcaagcagctggtcggcgtggtcgccatgatgcgcgacaagcaggtcgaggaatatctgggtgttctggagccgatcctgagctccgtggtggtcaccgagaactcgtggcgcgagcgtgtgatgccggccgatgagctcgagaagattgccgtggacgtgttcggccgtgaccgtgtgatcaaggaagcgaacctgcccgacgcgattcaggctgccgtcaacatggtcgatgccgaggacgagctgggcgtgggctacggccacggcgtgcttatctgcggcagcttcgtcaccgccggcgacgcacgcctgatgcttgaggagcatgccagccccacgatgaggcaggccatggccgtccatcagccggcggtcgacccggacgattcggatcggccggcagacaaggccgaggatgaggccgccgacaacctcgaggattcggtgagcccggacgacttcgacgtgttcgacgtcctcggcctcggcaaggaacaggccagtgacgccggtaacgccggcaccggcacggccagcgccgacacaggcgccatcaccgacgattccgccgacgtccggtaacccgcatccaaggcacatcggatacccggacgcccgacatacggaaaacagtctcacgccatgtatctcaaggaactcaccctccgcggattcaaatccttcgcctccgccaccacgctgcgcttcgagcccggcatcacggcggtcgtcggccccaacggttcgggcaagtcgaacatcgtcgacgccctgacctgggtgatgggtgagcaaggtgccaaaaaccttcgcggcacttcgatggaggacgtgattttcgcaggcacgtcctcccgcccgccattgggccgtgcacaggtgagcctgaccatcgataattccgatcacacgctcgatatcgattacacggaagtcaccatatcccgcaccatcttccgcaacggaggctccgaatacgcgatcaacggctcgcaatgccgtctgctcgacattcaggaactcctctccgataccggtcttggccagcagatgcacgtgattgtgggtcagggacgattggatgcgattctgaaggccgacccgtccggtcaccgtgcgttcatcgaagaggccgccggcatcctgaagcaccgcaagcgcaaggaacgcgcgttgcgcaagttggccaataccgaaacgaacctgagtcgacttgacgatttgctgggggagattcaccgccagctcggccccctcggacgccaggcacgcatctcccggcgcgccgacgcgattcagatatccgtacgcgacgcccaagcacgcctgtatgccgaagacgcccaacgctcgatgaaccgccgcgacacggtacgtcaagagcttggcgatgtgcgcaaccagctggccgtcgcccagcgtgaactcgcccaagtcaaagtacgcatcgaacaggtcgaggcgttgagctctgaatccagtccggccatcgccaaggccaaccaatactggcatgaattctcacagacccgtgaacgactgaacgcgctcgcccagttggccgaagagcgcagccggtcactcaccggccagatcgtcaccaacttcggtgaggatcccggcatgctcgtcaaacgagccgaggaactggagtctcaggccgcggcacaaaccaaggccgtggccgatgcacgcatcgcactcgacaaggccaccgaggaacgcgccgacgacgagaagaagcttgcctcagtccgccagacattgactgaactgcgcaaaaccgcacaggagcgcgatgcgcagatcgcccgactgcgcgaactcatcgcccgcgaggaatccgccgtgcaactggcgaccagccgcgccaaggattatgcctcccaacgcgacttgctgacttcccagcgcgacgatgcccagcaacagctggacgcattgcgcagcgaagcagactccattgccgacgatgatggtgccgcattggacgccgcgcgtgcaacgctcgccgaatgccgcgaacgactgaacgaactcgccgataagcagcgcgagatacagtccaagatcatctcgctcaaatccaaggccgatgcgcttgccgacacgctaggcagccgcaatgcctccggatcattggaacgcgacacggacgtggcctcgcttggccgactcaccgacttcatccatgtggccgaaggctgggaagaagccgtggcccacgcgctcgaccagtatgccagcgccatcgtggtacccgaggcaggcaacatgttgcacgccctcgaacgcgctcgggaagataagctcggcaaagccgtggtgctgaccgcgagcattgccggcgatcccgccacagagccaggcacggagtcggaggagagtagcgccgagaacacggcggccgccccgcaatcgggcaacgcgctggcagcactcgtcaccgcgaacccggatgcaaagaacccggcacaggccgaagctgtcgtgcacaccgtgcgtctcctgctggctgatgtagccatggccggcaccgccgacgaagcacagcacatcgtggcatccggcgaagccatgcgggccgtcaccaagaacggcgagaccttcacacacggcgtggcggcggtcggcggctcttccatctctcaatcggacctgtctctggccgcccgtcgagacaaagcattggcacaggtcaaacagttggccgcccaagacggcggaatggctgagcaagtggccgaggccaaagccaaacgcgatgaagcggcccgactcgtcgaccaggaatccgccaaacgcaccgaagcccggctcaaagcccaacaggcggagaaatctctgaaatccgccacggatcgcatcgcatcgttcacccgtcagcttgagcagctggataggaaaatcaccgagacccaagagaatcgcaacgagcatcagcgcaagctcgacgatctcaatcgcgctttggcatcggcccggcaatccacagcggaacatgccgatttcgacgaacttgatgaacgtgaacgcacgctggagcgcggactgaacctgactcgcgagcatgaggtcgccgcgaaaatcgcgtggaccgaagcaagccgcaaaggggagtcactgagccgacaggccgggctgctgcgggacaacgccagagaagccgccgaacgccgcgcccgcatcgaggcgttgaacgatcgcagacgcgagcaggccgcacacctgcaaggcgtggccgatgacgcgcgagcagtggccgccatggtggaacatacgctgcatgacgtggccgccaaacgagacgagctgcaggccgccgcctccagccatgacgaggaactcaaggccctgcgcgcgcagcgcaaccagatcgagcccaaggtcaccgatctgaccgggcgcgaacatgccttggatgtaaaccgcgaacggttggccgccgaatccgggcagctcatgcaaaaagtgtccgacgaactcggtctcactttggaggaattggttagtggttacggccccgaacagccggtgcccgtgctggatgatgagggcaaccctgtgccgttggatgagacggaagctgaggctgggaccgaagagggagaaaccgggggagagaccggcaccaacggcgattccgccctctttaagaccgtgccgtataaccgtcaggagcagaagaagcgtctcgataaggctcgccgcgatctggccgcactcggtaagatcaaccctttggccaccgaggaattcgaagcgcttgaggagcggaacaagtatctcaatgatcagcgcaacgatgtggtcaaatcacgtgacgatttgatgcagctcatcaaggatctcgattccacgatggtccaggtgttcaaatccgcgttcgacgataccgccgaggcattcgagcagatgttcgccacgctgttcccaggcggcaccggacgactgcgcctggaaaacccggaagacatgctcaccaccggcgtactggtcgaggccagcccggccggcaagcgcgtcaaacagctgagcctcctgtccggcggcgaacgttcgctgaccgcgctggcgttgctgttcgcgattttcaccgcccgccccagcccgttctatgtgatggacgaggtcgaggccgcgttggacgacgtgaacctgacccgtttgattaatgcgttcaatgagctacgcgcccatgcgcagctcatcatcattacgcaccagcaacgcaccatgtcgattgccaacgcgctttacggcgtaaccatgagagccgatggcgtaacagccgtggtgagtcaaaaactcgaacgataaacgaatggttcccgctggcaggaactggtaccacaggtgacagagggcggtccatatcgaaagatcgccctcagtctcgcttcgttcgacagctcccgccagcggaagcggggcggtattagcgcaatgccttgcgcacgccctgtacagtctgcagcgtcttgtagaagaccttcttgatgggtacgtcgcgggcgggggccaccggggtgatttcctcggtgaacttgcacttgaactcgttaaggcccttgagagacggcgcgaaatcggagccaatgcccatgagatcgtattcagtaataccctgcgagcctaggatgcagcattcggaatacagcagcttgtcggtcacatgcagacgcataacctcgttgcgcatgccggcatagtagcgcaccgcatgcgtgccgttcacggtgacaatcgaccatgccaccacacggtcttcaatacgtgcggcgaacacacggcaatgatcggcacctaacgcgccgatcatatcggagtagtcgctcatcggagcaggcgtgaatccatcgcgctggccggtctcgaccatcacatcgtaatattcggagaaatcggccagcgccttatccgtctcatcggcaacctcggccgggcactcacgtagagacttgcgcacgtcacggcgtccacgacgcttcatccgagccagaatctcatcatcgccaccggtgacgtcgatgaccacggtctggtcgtacggcactgtggacagcaccttctccgtaccatcggcgaaccaggtgtcgatacgcaggaacgcgatgttcttgtcggccttcttgacgttgtccacgatggcgtcgacgacctcgcgctcctcagcctcggtgggcttggcgacccacgccggcccatgcatcgagcgcagataatgataaccgtgcgtctcaaaatcgataaaggagatcacggcgaccaattcaccatcacgcttgatcagataatcgccccatggtgtgcgtccgtcgatatccgcctgaaaaccagaccaaaccttggtctgttcgataggcaacgtgatgccggccttctcggcttcggcttccagtgtggctccgtcaactttctccaacgtgatcattacgattcagctatcctttttcgttcgtatccgtatgtcgtgtttctggtttggtcgtattgcgcgtgatctgatgtgggccaatcggaatccgatcaggatctgattggccggaatcccgtcacaagccaaacatgcgttcgacgacgtgatcgtcgccgtcgaacggcacatgcttgtgatggtccttgatccaacgctcgttgcccttgccgatgatcagcaggatgttgaatcggtcggcgtgcgcacgggcatcgtaaatggcgttggtgatggccgtcggacggtcggaaatcaccgtggaggccacatccttgttcgtgatgtagccttgcatttccatgcagatgtcgatgaacggctcggtgtccgtatcttcggcggtgaaaatgaagttcgcgatacggttctcggcagcctcgacgatttccttacgacgatcgtaggccttgttgccggccgatccggtcaccagcgtgatacgcgggttttcctcgccccaacgctcgtagacgaagtcaagcagcgcggtgacggatgcgtagttgtgcgcataatcgacgatggcgagcgtgttcgactgcggatcgcggaactgttccatacggccggcgatacgtacggattcgatggcgtgcagtgcgtcggcgtcatcgagcgatacgccagccgcatgggcgatggcgatggccgccgccgcattgaggtagttgaagtcgccatcgatggacagatggtagtcgccaagggcctgatctccgtcggcgatgtggaaggaggcgtgctccgggtcggcgggccaggcgacgacgtccgcactggtgccggcattatccgcgtcatgcagggcgaaggtggttgcgccgatgccggctgcctccgcgtcctcccgcaacagatcggcgtgcagactgtccgcgccgagtaccagcgacttcgcgttgacgatgatctggcgcttgcaatacaggtaatcctcgaacgtggggtgttcgatcgggctgatgtggtcgggggagatgttgaggaacgcggccacatcgaaagtcagtccgtagacgcggtccaccttgtacgcctgggaggagacctccatcaccagatacttcatgccgttatcggccgcctcgcgcatcatgcggaaggcgtccatcgattcgggcgtggtcagatcggattcgacgtaggtgtggccgtcaaggcaattatcgaccgaggagaacaatgcggccttgccgccggagacggcgttgataagcgcctgcgtgaagtacgaggtggtcgtcttgcccttggtgccggtgacgccgatgaccgtgagctcgttctgcggatatccgtagaacgcggtggacagcaggctcatcgccttgcgtgcgtcgttgacgatcaggccgggggtggcggttgcggctgagtactcggtttcggccacgtatgcggccaggccggcttcgtcgatgccgttcagatactcggccttgaatcggcccttgcagcacagcagggtgcccggcgtgaccttgcgggtgtcgtaggtgatgccggcgaacggttcatccgccgaagcgatacgggccgggtcgtcggtccagacatccccttggatgatttcacgcagcagatggtgttccttgagcaggtcagcggccgaagccaaagtcaaagccataattgttactccctattatctagccgatacgccattctacaggtggggtgtagcgtgttgtggctcacacgtcatcgaccacgatatgggcacatgatttgattagaatggtgaaccgtgacgacaagcgaagcaactacgcaatccgggcagtcagccggatcgggcgagtccatggcagccaagcgcgccagattcgagcagctcgccatgcccgccgtcaatgcactgtaccggcaggcgatgaggctgaccaacaatcccgatgacgcgcaggatctggtccaggacaccttcgaacgcgggttcaaggccttcgactcattccagccgggctccaacttcgaggcgtggatgaccaccatcgagcgcaatgcctacttcaaccagtatgccaaggccaagcggcgcccgcagcgtgccaacgactccaccggcgaatacgacgattgggacatttacgatgccgccgaacatacgtcggacgggctcaagtccgctgaagaggaatatttggacgccttcgcgcccgaggaaatcatggccgcgctcgccaaactctcgccggaacgccggcaggtgttcatcgacgccgccatcgacggcaagtcctaccaacaggtggccgatgagcagggcgtgaaaatcggcacggtgatgagccgcctgaatcgcgcccgcacgcaactcaagcgtgagctcgcctcgtatgcgaaagagcgcgggtatgcgactggttcgtcggctggttcaccatccgcgaagttgagcgaaaacgttggtcgaatcgccgattccggccataatgaaagtagtgaacaaactgttggcagcaatggcgacacgcaagccgtagtgagacatagtcatgcgactcacgcccacacgccacaacagtcaagcaagctttcgggaaaggagatctgatgaacgatcagccggtagagcgtactcgccatatctccataacccgtacggcggccgatggcacggtaagccagaccgaagtgcatatcacggcggtgcatcatcgttcagtagataccggctcggccgctgcgtcggtccagacagacgtgcatatcgttacggagggcgactgttttgacccccgtacctgctgcgacgagcgtgaacaggcgttgattgccgcgttgcgtgcctacttgcgcccggatgtggcgcccgaatgtctgatggcccggctcaaggccacgcttgatcactgctgcggcgaagataagtaacgacatatacaacaaggcccgtctgatgtatcatcagacgggccttgagcgttctataagaaacgcgaagaatcaggcgttaggacgcttgccgtggttggcggccttcttacgacgatccttgcgcttacgtccgcgcatgcccatgatggactcctttgctgcagtaaaaaaataagccttcggaattatgccacataagtacgacgtgatgcaacacgggtgtccatgtggcgatgatcgtcaggcttggttattcggtttttcagatttgttcggcgtggaaggtgaccacggtggtgtagtcatcgcccggctcgagcacaaccagatccttgccggtgcggaaggcgtcggcgtaggcggtcatcggttcgacggccacgccggcctgacgagccttcccgccgatttcgttgccggtgcacacctgccaggagttgatggtcttgtcgccggtcagcgtgaccttgatgccgtcggggcgggtgaacgcggcggaagtgctgccgtcttcgccgcggttggtgatatcggtccaggcatcgtcgaagccacgtccctccagcgtggggttatcgcgcaggtcgaagatgccggaaaccggctcttcgccggtgggtagcaggtgttcgtctacggtcacgtgggtatcgcagtgcagctcaagacggcaggactcgttgtcggcggtaatggcctgaccggtggcgtgcttgccgttggccagccacgggtggatgccaaatgcccatggggccttcacgctgtcgttgttgtgcacggtgaaggtttccgtgagaccgttctcgtcaagtgcataagtggcggtgatggtgatatcaaacgggtagccggcgatgtcgggggagcgccaggagagcgtcacatgtgattcctgcaaatcaacgagctcccacatgtagcggtaggcgtagccgtgcagggaggattggcggtcgaactcgtcgatcggcatctggtagtcttcgccatcgaaagaatactgaccattggtcacgcggttcgggtacggtgccagcacccagccgttgcagcaggggatgaccttgttcgggtcgaaggggacgatgaggtcttcgccgcgccacttcagctcgcgcaggctggcacccagttcggtgacgacggcactccattcgccggacgagatgacatattggttaccagtgcgaggcttcaaagccatagtgcacactcctttgtgaaacagattgttaccgctcacaatcgtatcgcacaagtcccaagacgcggcggcacataaggataaaaaattggctcccctctggaggggagccagcgtaacagaactacttctggactacttcgtagcggaccacagtggtgtagtcgccattgggggcgagcgtcaccaagtggtcaccagtgcggaaggcattggccggggcggtcatcggttcgacggcgataccatacggatgctcggcgaacggcgcgccagtggcggtgtagcactgccaagcattgatcgtctcatcgccaatgagcttcacttcaataccgtccgggcgggtgaatgtggtggtggtcgtaccatcggcggcacgctccacgtcgacccaggcatcatcaaaggcgcggccttcgagcgtcgggccatcgttcaggtcgtagatgccggtaaccggttcggtgccggtgggaatcagcgcctcgttcaccgtcacatgactggcggccttgatctgcaggtggcaggcggcggagtcggcgtcacgctcggcggaagtcgcgccctgcttgccgttggccagccacggatgcaggccgagagcccacggtgccggctcgtcgccatcattgcgggcattgacggtcacggtcatgccgttgtcgccgagttcgtatgtgacggtcacggtcacatcgaacgggtatccgtccaggttggggaagcgcagtgaaagcgtcacggcgctatcggtcaacgattcaagcttccacatgtagtggtaggcgtatccgtggttcgcgttgttgcgcggtgcgggatgatattcgttgaccggcgcgcagtaatgcttgccattgaaatcgtattcgccgttttcgatgcggtttggccacggggccagcacatagccgttacaggtgggggtcaggtcgttgactccgaacgggcagaaaatttccttgccttgataatcgaatcggcgaatcttggcgccgagttcgcagatgacggcggaataatcgccatagtgaatcgaatactgatttccggtgcgtggtgttttactcgtcatggaatcactcccgtagtgaggttggtgggccggtagctcctgctatcgctggccccagtctagcgcgtctcctctatcgaggcggggattggcgatagccggcatataataaacaattcgtacagacacggtagcaatacgtggagtgacgagtctcacaccatcatgcgagaagcacgtggattccttggaaaccggtgattcgtgggagacgcggaaaagttgtgacggcagattcctgtaatccctgctttacactggaaaacactattgacgttcaggaggttccgatgaccaaaagcgttgtgctcgctgatccgcgaggcttctgcgcgggtgtggaccgtgcgattcttaccgtacagaccattctcaaagccgcggaggcttccggaaagctgacgcgcgaggatgggctgcccccggtatatgtgcgccggcagatcgtgcacaacaagcatgtggtcgaggacttggccgggcaaggcgcggtgttcgtccaggaattggcggagattccggatgctgctgcccaagcgggtattccggtggtgttttccgcccatggcgtatctccggtagtgaaggcggaagccgaacgtcgtggcatgcatgtggtggatgccacctgccctctggtgggtaaggtgcaccgtgaggtgctgcgtttcgtgcgcgaggggtatgaaatcgtctatatcgggcacaagggccacgatgaagcagtcggcgtggtgggggagaaccccgaacatgtgcacttgatcgagcatgaatcggatgtcgattcgttggattttgcgcccgacaacaagctggtgctgctctcgcagaccacgttgagcgtggatgagaccgccggcaccattgccgcgctgaaggccaagttcccgtggattcaagagccgccgagttcggatatctgctatgccacgtcgaatcgtcaggctgcggtcaaactggtggcccagcagtccgattgcgtggtgattgtcggatcggccaactcctcgaattccgtgcgactgatggaggtggcgcaggagggcttgggagagcgcggcaaagcgtatcgcgtggatgatgccagcgagcttgacccggcatggttcgagggtctggaatccgtaggtatctcctcaggtgcctccgtgccggacgaactggtgtccggtgtgattgacgctctgcaaaacttgggcttcaccggtatgaagtccgtcgaaaccatcaaggaaaacatgcacttcgtgctgccgtcggagttgcgcaggaagaagtagtcatccttggctcccctcaccgagggaagccaagaacggtcaccacgtgccgattggtgcggcaacggcgttcaagaccttgagcaggtcctgcgggttcacgcctacggacagtccgcgtttgccgccggagaccagaatctggtcgaattgcagggcgctttcatccaacacagtcttatgacgtgtcttctggcccaacggcgagatgccacctaccacatagccggattcacgcattgccaccttgggatcggccatagaggccttcttggcacctacagccgcagccagggccttcaaatccatatgtccgctgaccggtaccacgcccaccacacgctccgaaccggtgtccgccatcaacgtcttgaacacctgatgctcgtcgaagccgagcttggtggccgcctccacgccgtagccgtcatccatatggtcgttggagtgctcgtattcgtatacgtggaattccacgcccgccttctccagttggactgtcgccggggtggaacccgcgcccttatcatgcttgcttttctttgccatgattaccgttctactacgaagagacccccgcacaaggcgggggtctcacagcttagttctcaaacgaaccgtagcggcctagaccgcagtggttcactcggagatctcagcgaagtacagcagggtacgg

SEQ ID NO: 3444 - DNA, 12200 bp, Unknown
  R151_18m  MAG No. k141_57282
gctccctcgacgtgctggcggcggtgcagttccgcgaggttcgtttcgcgccacagtcccctatcgctcgtgtcgtcgcatggcagcggcgtggcggcgagcaggttgtatgcgtcgagcacgtggtcgaggttgttccattcggcccctgcgatcaggccgtcgcataggttggtgccggtcagcgcgagcaggctcagacgggtgttggccttgcgcaactggccgccgttgaatccggtggcgtgcttcctgatccagtccgtgcgcagcgtgtacgccagcctgtcgaattccttgcgggcggccagcgcctcctggaatgccgcctgctcccgttccctccgctcgctcttggcgtcacgttcggcgatctcctcaggcgacaattgcgggaagcacaatacggtgcgctcggagaatcggatcaccggcccgccgtacgggttcttctcgcgccactgcccataccatttctcgaactcgtcggactcgccgctccacacgtcgtagaaccggtagccctccggcgtcgtccacgtcgaagccgagacatccacagtcaggcccagagcttcaagcgctgttctcatgctctgctgccacgcctcgacgcgaacccgcgaccgcagctggccacgcttccaatcccagttcttggtgcccgccatcgaagccaactcagccatcatgtcgggataagcctcgaactccgcaagatcacccaactgggaaagcgacaactgagcgaacgcctccgacccggaacgcacatcggcggggatacgcgcgatccgcaaccggccacgcacgaacgactccgaacggcccgtcttcgccgcaagctcacccacaccggcacccaggtcaagcaaaccctgatacccgtcagcctcctccaacggcgtcaaatcggaacgctggcagttctccaccagcatcagctcacgctcggtcttcgcatccaactcacgcaccacacacggcacagactccaaaccagccaacttgcacgccgccaaacgacgatgaccaatcaccacacgaaacaggcgctcgccgtgctcctcatggtcgggggttaccacaagcgcctgctgcaggccctgctccttgatgctgtcggcgagttcggtgacatcgcccacgtctttgcgggggttgttcgggttcgggatgaggctctttacgttgatatcgatgatgttgatagccactgaatcgggtcactgctccttgatcgatagattctggtgtacgggcaggtgcggcatgcgcttcctgcgccggcgttggcgctcatgctccagttgctggcgtccgtgcttgcgtttgctcatgattcagtcctccttgatttcaccggtatccggatccacaccagacgtgggcagatcacgccacggatccaacaaactgcgctcgatatccgccttcaccacgcgctcgcgggcctcgaccggatagttaatgaggtcgttgaccgcgttggcggcgtcgaagatgtgctgcgagagatcgcaggcgtcgtacaaggcgtcggtgatggggtcgatgttcttgtatttttcgatgtattcatccttggtggccaggtcgagcatcttgctggccgcgatgcggaacgcggccgcggcgtccttcatgcgtgatgccttggctgtcagggcgagcagcatgagcggcgtgatctcgtcgggtatcagcgcgtcctgcacgccatcggtctttttctttcgtgacattgaatctccttagaattcggggtcttggctgtctgatgaaaaatcgttggaagcgccgaacgtggcgccaggagaggcgggtgccggctgagcccacgggtcgccttccggcatgccggggttctgcgcgggagtcggggagccgttctgccagccttgttgctggttggcgggtttggccgggtccccataggtcgagccaccggaatagccgcgaccggattggacacggttgacggcggcggtcgcatacctcaatgaggggcctatctcgtcgacggtcatgtcgatgaccgtgcgctgggagccgtcctgcgcctggtacgagtgctgtctcagtcggccctgggcgatcactcgcatgcccttcttcagggactggacgcaatggccggccatgtcgccccacgcggagcagcgcatgaacaatgcctgcccgtcctcgaactggttggcctgccggttccagttgcgcggcgtcgaagcgatcgtgaagctcgccacggtcgccccgccgcccgtggtacgcagctcggggtcggcggtcaggttgccgacgatggtaagaacggtctctcccgccatcacgcatcaccatccaacgcgcgcagcagggcaacggcggcggaacgtgcctcgtcggccaggtcgaacagctcccagtcgccggcgccggccgcgccgtcggccagcaggctcgtcatgtcatacgccctgcgcgagaggcggcggctggctttcgccacatcgtcctcatggtccgccggcgcggcggcgtgctccagtcgcagcccggtatgatccatcgcctggtcaagcatggacagcatcacgggcagcgtgggcttgttcggcgactcggccaccagcgactgcaatatggtggcgaaggccacccgcggcgtcacggtttcggtttcggtttcgggtttctcgcacatctatccctccttatggtttttggctggttttcgtttccacaggcagaccgccgagatctggcggcgttcccggtcgaccatcacgtccgtccagcgtggcggcagtatggtcagtggccatgcgtccgtgcggttgagatgctggatggtggcgagcaggctgtccaatagttcgcccgcgctcatgcgcatccccgcggaatccaacggccattcgaacgtggactcgccctcggcgcgatgctcgtagtcgttcggctggccggtcatgcgctggccttcttgcattcgcgcaggttggcgcgcatgaagccgagcacggcctccttcgggtagaggacgcggcggccggatttcacgtaggcgggtcccgtgtgcgttccgcgccattcggccagcgtggattcgccgatgccgctgagctcggccagctggcgtgcgctgttcaacggcatcagcgccttttccaacgcgtcgaacatcgcgggttctgtttcgtcggccatggttctcctttccggcccgtatgaggggccttcgatgtcggtggatatggggggtggaccgtgccgaatcgaacggcttcccgctgtttgccacgtacatgacaccgtgatctccagcgggggcgaacctgccggccccatgcgccacacccgctgctccgagcgcggcgcgatggtgttaacgactgtccttgtcgattgccggggaaggaaagaacaggaaccccggcaagcctgttattcgactcccgcctcgctcagcgcaaggcacaggagccgcaatggcgcgcaaccgaatcccacaagggaggccaaaccattgccgatgggatgcgcgcaaccggcgtgcgacatcacccagccgatgcagaaggcgaaaaccacggcccagagaatcaaccggaccatgaagccgcgaggcaattcgtcgagctcgggcctgcggtagccgctcgcgtgctgtccgtaatcccgggcgttcatcgtccggcctccgcgtcgaggattcgacgggccaacgccacgagctcgctgtgcggcccgcgccacaccgcgtccgtgatgcccatgtcacccaaacggatttcgtcgatgccgtggctgagagcctgataggagaggggacggttcccgtcctcggggttcgcgatggtgagtttctcgctcattggttttcttcctttttatgcgttggcccacctcccctaagctggacattgcctaactaccagcaatgagaggaggtgaagaataatgacgtatcgactcgtgtttgagacgaccgccgataagcgacggtttgtcgatttagcgggagaagagtatccgtcgaagattctcgatgaattggagagcgccgccgcgtcgggtggcgtggtttcggttcgaggtcgggctctcggtgtccccgaggggtctcttatctatctcaatccgcgtgccgccctgtggtggtcgctggttgagatcgacgactgactccggcatggcggcggcgcggacggaacgatgtccgccgtgccgtcgcccgttcatgctgatttcgtaatcgaactgtttggcgatggcatctcgcgcgtcgatcaggtcgctttccgactggggatagccgatgatgagaacgatgcttccgagcccgtatctcaggactttgaaaccgtccccttcttcaatgcgggtgctgacggttcccatcacttcacctccttgccggcgagttcgagcgagacaatgagggcacccacgcaaagaagggaggtgattacatggcgcaatggaatatccgttttaacgacgagctgatcggaccgttcgacgacgccgaaacgcaggcgatctcccagaagctcaccacgtcgaccaggacgcaaggaggggtcgtcttcagcggcaagctcgcggattccgggaacgacgtaactgcgtactggacgcccggatgccccatcagcttcgaacagatctgagaacgggccgtgaccacacccctgtgcttgcaccgcaggggttgccttatatccactcatttcgtaccttcctttgcaaggtattggacgatgttccagacgcccaggaaagcgactacgcttttctgcatggttttgggacagattgatttgggacagattcttgtgaccgcgctggtctccgcagtcgtgtctttcgcggtgacggtgattctgcgtgtatgggatcgcagaacggtcgaatggctggtcgtcggagaagcgcatcccacgtacttcgccggcgagaagaaagacatggtgcttaatctcgagttgtggaacaccggtgatgccgatgcgtatgacgtgaggctgatcagatgcaatggcgtcaatccggatacaggcaaggagtgggagtgttgggagacattcgaggcgggatgcatcaaggccggggaacatgtcgttttcacgatgaagccttcttttgcgtcctgggagacttgctgggtaaaggtcgtgtttcgtccctcacccgtgtatcggcacgatccacgctgttcccgtaaatatctcttgtccaaggagatcggcaatcagttcgaatatcgtccggaggaatcggagatggccgtgtatgggagaggcaagattccagcacgtccgaaagacgcctgatataggagaaatgcataatctgtactcccgcgattatgacaatcaagacaaactgcagaacgtcgacgagattctggccactcatttcgcacctccagcgagaacaaggatgttggattgatgtagtgtgtggttcatgaattggattgcggaacatggcgtcgagcttgccggattcgtgctgaccctggtcgtgacgattgccggatgggtcatggagcacagaagctccaaggaacgcgacaacgaccggcgtgatgacatcgatttactgaaaagccagatagctgccctgcgcgaccaggccgacagtctgaacgagcagaccgccatgcaacgggcggagttcgacaagccgccgttcggagaggcggaatgggttcgcggatccatacgacgtgtgacaatcaccggttctcgcagggtgtacgtggagtcggtgacgcttgatgatgattcatatgtgcttcggttgcgaacgaagattccggattcgttcgagccgtccgagaccatcgagtacgtgaccaacggcccggttccagtggtgttctcatggcgttgggacgacgagccgaacatgccgctgaagaagcttcggagagtggcatacaagccggaacagtgatgatccgccatgaggtagccgttctgcagtccggtgagatacgaccatgtcgagtcgaatccgccggtggatgaagtatgtcccgtccagctcacttggaactgtcccggtaccttttgtccgtcgatccaataatcgcagaatgccactttcacgtgaggcccgccgtctgccgcgattgcagcgcatttccacatgagttgtttcaatccccagtcggaatcgtccttcgggcagcgtttatccattcccgtaacgccgttgccgaagtcaacccgttcaagagactcaccgggcagccactcccggacatcgcccttgctcatttttctcatttcgcacctccttcggcgagcgccggaagggtgttctcagcagtgagcgttggagtgttggtgggggcggcggagaagctgtcgcccccgttttctcctagaatgctggtaagcgccgtgtaaagggcatggcgcgcattcaaaggagaagcatcatggtcgcatcccagagggaattgctcaggaacgcgctgaataacatcgccaccggaacgaatatcgccgtccggctcaaggaaagcgcacagagcgcggaggtaagggaacttgccaaggccgtgcacttcatcggctacggggcgcaggagaccatcctcgccttgacggatgagggccgagtcaaggatttgtaggcagaagcgggctacggcgtcgagttggagcagtcgggcctcatggttcatatcctgttccagctgggcgaagtcgtccgcgccgagcacgtcggcgagcgcctgcgggtcaagcatcgcgttgtccaagcggtggagttccccgacccgcaggccgtcgagcagtagcctgagcttcagattcaaagacgattcaaaactcattccgcacctctagcgattgcaggagcagtgaattggggaggaagtaacgcagcgggagattcgttgatagcctcagcgattgccacgatgtcatcaaggtcaaatcctcgatagcccttgattttgctgttaagactgctgtatggcataccagatttttctgatacgaactttttcgtcagtcctttttgctgtattttcgtttcgacttgatggccgacccatgcattaacgttgctcatgtgagcaatgctatatctcgatacaaccacggtcaacgtcggcgtgtctcatttgagcaacgttattgcgttttgtgaattgcaattgcttaatttgagatgtaaagtactcacatgagtaatattcaggacgaacgcagccacaggttttcgcaacttgtcggactggagcttaaagcaagttttgcgagacatgaaacctctcaggctgaagtggccgtaaaacttgggcattcgaagtccggttactctcgatggctcaacgctaaaccatcaatgcctatggaagcgttgctgaacacgtgcgagttaatcggtgttgatcctcgggacattatagatgccgcatatcggaggctcattgctgagatgggcgaatataatttgtcgtccgattcggatgacgcgaacgctcgtgattactatgcgatggccgcgaagcatggcgacatcgaggcggaacaggaagcctacgaggagatgccatgagcgagttatccggaatttccatacagattgagcgaatcgcaaaggagtgaccatgaccgaatacaacctgtattgcgacgagagctgccacctggagcgggacaacagcaatgtgatggtattgggcgcgctcatcctgcccgaggacaaaaaagaagaggtcaaggacaggatcgtagacatcaaagcgaagcatggcgtctccgcccatgtcgaggtgaaatggacaaaagcgagcgaaccaaaaatcggcctatacaccgatctcgtggattacttcttcgatgatgacgatatgcggttcagggtacttgtcgccgacaagacccatctgcggcatgaagattataaccaatcgcataatgattggtattacaagatgtatttcaccatgctcaacaggttgtttgattcatcgaacacatacaacgtgtatctggatgtcaaagacactcattccgcgcaaagggctgccaagctcaacgagatatgcgcgaacagccattatgatttcgatcataagtgcattaaaaagatacagccgatacgatcggatgaagtgcagatgatgcaaatcgtggatgtcatcaatggtgccgtgtgcagggcgaatcggacagacatcaagccaccggctggggcaaaaagggaaatcatctggcgcatacagaatcgatccaagttgaagctcacccaatccacgactcctggcgcgcgtaaattcaatctctttgcctggactggaggccacgcatgacaccgcactgggttccgccgctcatgtctcaaatcgtcaatgagaccttctcccattacgagaacagactgtacgcagtgttcgagaacgatttcatagtttcccaccctcactaccgtggattgcccgtgcatgtgagacgacgggaggaagagtcggatggcaaatgggccggtttcgtgcatatcactaccgaggaagaccatgaaacaggacagcgcatgacggatatggaccgttgcgagcgcatcagatacccccgtcccagcatcgactattgcgaggaatgtccttcatgctcctacacgcaatgcgagaaaccgttgatatgggaggaggattggcgcaacagaacgcgagtacacatactcgttcgccccgaacgatacctcgttatactggagccgcatccggagaaggaaaggccatactgcatgctggtcacggcatactatctcaattacgagagcagctataacggacagcttcgcagatacgaccgcgcgaaaagggcgggaaaaataatccaataaaataataaacaagggccgccgtagcgacccaggaaactcgttcacgcacctaggcggatgagtactttttactctgccatgcactgtcaaggaagtcaaattagaaacgcacagaatgaaacaaaagggctcaggatcgttcccaagcctttgtcgaccgggcgctcccaatcctgagtaccaacgacattcggcgagtgtcggctgggctgttcatatggatactggaggataccatgagcgaggacgctttggagtacatcgccctgcagtgggcgagtcgaatacgtgaccgaccgcttccggatgggcttgagggcgtatacgacgtggaacgcaacgagatcattctcagcgacaggctctcgtccatccagcgtcggtgcgtgctggcgcacgagatcagccacgccaagcaccacgacgttggatgcaaggccgacgcctacacggagcagcgcgcagacgcggaggctgctcgaatgctcataagccaagccgactacatcaccgccgaaatcctatacggcaacgatgaatgcgcgatagcgcgtgagctcaacgtaatgccttggataatccaggcatacaaaaactggctgcacgacagtgtggccctctaagagaaagaagaagagaaccatgaagaagtcagtcgcattgatcgcggccacactattactcgccggactgaccgcctgcggagggagcaacgccgcttccgatgcgccggccaaatccgatggcacgtcaaagaccgagaccaataaggaagagcccaaaccccagctggacgacctgaccggcacgtggaagcaaaccaactccaacgacccgaactcgtacatggaggccaccatcagcggcgacaccatcgaggtcaactggatcggcaccgacaccaagagcctctattggaagggcacctatcaggccccgaccaaggccggcgactggaagtggaccagccagggcgacaccgaaaccatggctcaatccctgctcgcctcgcaggacgccaccaaggacttcacctacagcgaagccgacggcgtgagctgggagaccaccgcgctcggcaccaccatcaccgtcaaaaccgccaagcagtaaagaaaagccctgctaacgcgccaacgtcaacagggccggtcggattctggccggaatggccggagtaaaacgaaaggctccggaatcacttccgaaaccttcgccgaccgggtactcccaatccacacaaaccattgtactcaccataaccgtccaaatcatcgaagactacagggcgctgctctatgagcacgtgagatgaagatggagcatacctatggcacgagtgttcatcgttgaccgttggctcaaaaacgacgagaacggcaatccgccgactgctgcgatgaagcgcagtctcgccaacgccaaagaccccatgaaggccaaggtgcccgccgaacaccgcagcagcacctacggaaagtacgaccgctggcgatgccgctggtacgccgaggcacagggcgtgaagaccgagaagtccaaaacgttccggctcctgtcggacgcggaggagttcaaagccgccatggaggacgacatcaggcgcggccgctaccacgaccccaagctcgcgcagaagccattccgtcgggtcgccgaggagtggacggcaacgaaagccgacatcaaacccggcaccctgcgccgctacaagcgagaacttagaatctacatcaacccccaatggggcgacacccccataggggacatcaagacggaagcgatacagaaatgggtgaaccaactgtcggagggcggctatccggccgacagaaaacgcggaacggaaaacactcgcgcgttgaagccacggtcgatccgcaacatcgtgcgcgtggtcatgggcggtgtgctcggccatgctctgaaacagggatatatcaccgcgaatcccatgcagtccgtcgccactccgcgcgtcgtcgacgatgacgacgacatggtatttctctcgatttccgaggtggaggatctggccatcgaggccggcagagtaaagaacgacccgcaggacacgctcatcgttcgatggcaggcctacgtcgggccgcgcatcggcgagaccttcgctctgcaggtcaaggacatggactttccccgtcggcgatcgcgcatccgccgcacctgggcggaggataaggacgggaagatgattctcggttccccgaaaaacgggaaggcgcgttgggtggcgttccctgaatttcttgtggctggtttggaacgtcagtgcgatgggcgtgatcctgatgattatgtgttccgtgcggtccgtggcggcaatctgtgggtcaacacgtggaggtcgcgcatttggagtccggccgtcaggcgtgcgggtatggaggattccggcgtgcgcatccacgacctgcgccacacgtatgcgagcatcgcgattgccaacggctgcgacgtgaagacgttgcagtcccagttggggcattcgagcgctatggtcacgcttgacacgtatgcgcggttgtggccggagaagctggatgaggtggccgatgctgtgggccgtgccagggcggaggaactggacgaggcggcgtaggttctgcggtcatcggataaaatcggataaatcggtttgaactggataaaaggaaaaaccccggaatcgttgagattccggggtttttggtcgggctagccggatttgaaccggcgacatcctgctcccaaagcaggcgcgctaccaaactgcgctatagcccgatgcgccattaaggcacaatgaatcattgtaaacgacgctggatacattgcgtgtcgagcatatgaattcaaaaaaggttctggattctcttgatagcttatgagtgacatctttattcattgatgctctacaacgactaggtttggatctgcatcgatatctggcgcatccgctggactaacaaggaccgtgcaaacgatgtggcccccgacttcctgcgaggaagtcgggggccacatcgtttgcacggtggactatcggatcaattctgatcagatcagctcgaggtcgacatcgaggctgatcggcttgtccgccgggatatggtactgggggtgcaccggcgacatccaggaatcatcgccgccaacgcccatctgtgcggcaaggacgcgcaggaacatgtgcttcggcttcggcagctcgtcctggtgctgagcctcctcaagcatgaagctggagtacggcaacaggcttaccgcgaacggcgcggcaccatcggcgcggctgacgcgcatgccgtggccgtgatcgtcggtaatctcggcccaac

SEQ ID NO: 3445 - DNA, 25512 bp, Unknown
  R151_18m  MAG No. k141_57845
ccaacgctggccggcggccgcggccttatcgagaatcttatcgtcgatatcggtcacattacgcacaaaagtgactttgtaaccgagcttcaaaaaccagcggcgcacgatgtcgaacgccacggcggcacggatatggccgatatgcggtgacgactgcacggtggcgccacacacataaatgccgacctcgcccggcttgagcggcacgaaatggctgacctggtgcgaggcggtgtcatacagattcaggccttctgcggccttggcgacatgcaccggcgtcaggcttgaaggcatgacggaaatgttgaaatcctgcggttcttggctgtttcccataacgctcaagcgtagggtccgaaccagacatgctgaatcgttactcgaagagtttgatgaacgtttcacaggcggggcccgaacgaggtgacagacggatgagaagcgggacaacagtctcgcgagaatacgtctttgaccgctgcggaaactgcgagattcatggatttgccctgctcgttacgcaaacggggaacgctcgtgccacaatagaagtcatggccacaccacaagtgctcattttgcaacatgtcccatgggaacgtccgggacgcatattgtcgaacctcgaggacatcggtcttgagacggtgacgatgaatatcgtcgacaaaaagaaaccggacttgcctgatttcggcgaactggctggcgtggtaatcatgggtgggcctatgggcgcgcttgattacgacaagtatccggggctgaaggcggaagccaagttggcgcgtgccgccgtggcttcaggcaagccgattctcggtgtatgcctggggcatcagattatcgccactgcgcttggtgcgcagctgcgcaagggcgatgcgccggagattgggttcgcgccgatcaagcgtgtggacaagcatgacttcttctccatgtgggataagcagctgacggtgctgcactggcataacgacgtggtgggcttgcccgagggaggccagctgctggcacgttcgtcttccaccaaggtgcaggcgttccgactgggatccgcgctgggcatgcagttccatcttgaggtgtgcggctcgctgctggacgaatggctggatgagccgagcatggtcaaggatctcaaggccgcgggtgggtccaagtcccaattgcgcgagcagttcgcccaatacgatcagctactgcatccgctcgccgagcaagtgttctccggttttgcggcccgctgcaactcctacgctcagacgctgaacaaataacgtttgtggaccgccgctgggcaagcgtggcgctacattggtgagtcatgccgacttatgacattggactggaacacgtttcgctcgccttcgccaccaaaaccatcttcactgatgtgacgcagggtgttttcgagggcgaccgcatcggcatcgtcggcaagaacggcgacggcaaatccacgttgctgcacctgttccgcggcacccaggagccggattccggccgcgtgacgaagcgcggcggactcacgttcggcatgcttgaccagcgcgatccgctcgacgacaacgccaccatccgcgaagccgcgctcgaaggccgcgccgactacgaatgggcgtccgacaacacttcccgtgaaatcgtcgaggcattgctcggcggcatgagtctggatgccaaggtcggctccttgtccggcggccagcgtcgccgcgccgatttggcccgacttctgctcaaggattgggatattctcgcgcttgacgagcccaccaaccatctcgacgtggtcactatccactggcttgccgagcatctgaagaaccgctggtccaaaggccagggcgctctgttgctcgtgacccacgatcgctggttcttggacgaggtctgcgaatcgatgtgggaagtccacgatggcgtgatcgagccgttcgagggcggctattccgcatatatgctgcagcgcgtcgaacgcgaccgccaggctgatgtgcgtgaaacgaagcgccgcaatctggcccgcaaggagctcgcatggctttcccgtggtgcccgtgcccgttccaccaagcagaagttccacgtcaaggccgcacgcgaattgattgccgatgtgccgccgatgcgtaacacacttgaactgaagcaaatggccacctcacgcctcggcaaacaggtggtcgatttggtcgacgtgacgcagattttcgaaaaaccgcagggcatggccgatatcgacccggatgtggcggcgctctccgcgtccgcttcccgcgtggatgtggtcaacgccatgtacgccgagccgcagctgcacggttccgttgaggtggcggtcaccgacatgactgacctgcgcctggtggacgccggcgtgccggaagccgtcgaggccgctgaggaagcgcgtaagaaggccgaggctgagagcggcaatccgcagcttgctgacgatcgcgaggttcgtcgcatgaacacgggtggtgaaaccatcggcggtgacactgctgcaacgaattcggatgatggcactgctgcagccggtgtcacctcggctgcacgcaaggtgacggtttccggccgcgagattcttgacgatgtgacttggctgattggccccggcgatcgtttcggcatcgtcggtgcgaacggtgccggcaagtccacattgctgaagttgattgacggttcgattactccgaccgtgggccatgtgaacatcggcaaaaccgtgaagttcgccgtactctcgcagcgtcttgatgagctggagaaactgggccggtacaagatcaaggaagtgctttcccgctataagccgagctacattgtggatggcaaggaagtaacgccgggacagttgatggagcgtctcggctttgaatccgcccagttgatgacgccgatccgcgacctctccggcggacagaagcgccgcatgcagttgctgctgattctgcttgacgagccgaacgtgctcatcatggacgagcctggcaacgatctggacactgatatgctcgccgtcatggaggatttgctcgatacttggccgggtacgttgatcgtcgtatcccacgaccggtacctgctggagcgcgtcaccgatcagcagttcgcgctgattggcggcaaggtacgccatctgcccggtggtgtgcaggattacctcgatatggttgaggctattaagaacggcaagggattgccggctgacacgcctggcttcgcgggcaccggtagcagctcggcgaagtctggtaggggtaaggcggccgccgtcaatgttgctgcatctctccctcagtccacttcgcggacagctccctcgtcagagggagccaataacggtgaggactccacctcgaagctcaccggcaaggccttccacgaggcatccaagcgcgtgaatgccatcgagcgcaagcttgccaaactggaagagcggaaaaccgaacttgaggcacagatggccgcccatgacccgagcgactacgagggtctcaacaagctcaatgaacaactcaccgccgtcaatactgaaagcgataatctcgaagccgaatggctcgaactctccgaacaattggagtagcgggagaaaccgtaacgttcacaaggcctcggtagtttgccggggcctaccgctatgcaaactcccacggattaatcaattccacgtcggtaccttcgaagtccttgatattgcgcgtggctatggccgcatcccaggaacaggcaattgccgcaatcatggcgtcttgaatactggtaggtgtgcccctgcgttcgcgttcgacaaggatatgggcataatccgcagctgcctgggtgtcaaatgcgaacgtcctgtcctctaatgtcataagcgccagcttgacggtcgtatctgtgtactttcgtcgtttgccttcaggcatgcgacatattccgaccaacaactcggcgacggtgatggcggtggttgccagattgcttgtatcttggttcctcagccaattggcaacgtgttcgtctggctgtttcttgatgatttcgctgatgacgttggtgtccagaataatcatggccgattcctattcaaaagatactggcggtcgggaatcggcggaatttcgctcggatagtgggagttcccccttgtcgagtccctcaaaatccatgttcttcatgaattcgcggatctcgtcgtagaaattggtctttcgtgtgatttcatgcgccaccgtgccggccagccattcttcaagaatggatcgcacctgagattccatggagcggttgtttttctcggccacttctttgagctgttgaatctgctcatcgggtatttttcggatggtcaatgttgccatgatgcacctccttgttgctgtcataatgctagcataaggtgctgtcattttgcttgcagcacgggtgatgaggtatgcacgcatgaaaaaggcggatatgcatcatgcacatccgccctttgagcttggactgggtctccccgcagtcgccgaatcagcgcccggtaacctcggaaccgacgaccttttcgctcagggcgcgcgggccgcgggtcacggctacggcaccggagcgcaccagctcaatcacaccgtaatgctccaaaagccccagcagcgcatcgatcttaccttcggcaccggtggcctcaatggtcagcgattccggattcacgtccaccacacgcacgcggaagaggcgcacgatctccagcacgtcggaacggttggattcgtcggcggccaccttgatgagcaccagttcgcgttccacggtggagttcgggtcgagctccacgatcttcagcacgtgcagcagcttgttgagctgcttgatgatctgctccagtggcacggcctccacgtcggcggtcaccgtgacgcgtgagatgtccggacgctcggtgggggagacggacagtgagttgatgttgaacgcacgacgggcgaacaggccggcgatacgcgccagcacgcctgggcggttctccaccagcacggacagcgtatgacgctgggaaccaggctgggatgcaggatagttagccatgagtgttctcctctcctcagtgctcgctcgcagcggcagcggcggtctcgtgctcgaacacgccggtcgcatgctcgtccggaccggttcccggagccggggtgccgccggtcagcggcttgatgccgggcttgtacgtcacctcgtcgttggaagcgccggcggctaccatcggccacaccatcgcatccttccacacgcggaaatcaatcagtaccgggcggtcgttgatctggttcgccttttcgatggcggcaatcgcctcttcctcggtgaacgcgcggatacccacgcagccgtatgcctcggccaacttgatgaaatcaggcacttcgagcggcgcatcgccgtcgaccagtgccgccgcaccatcggcaccgtgcgcctcgccatcgagcaggttggtctgcgagtagtggtgctcgtagaacagcgtctgccactgacggaccatgccgtacacggagttgttcagaatcgcgatcttcaccggagcgtggtccaggaacgcggcggccagctcctcagaggtcatctggaaggaaccgtcaccatcgatcagccacaccggcttcttgccctcgaactcgcgggccgagcccacggatgcgccgatggcggctggcagaccgtagcccatcgtgccgaggcctccggaggagatccaagcgtgctggttctcgaaatcgatgaactgcgaagcccacatctggtgctgtcccacaccggtcacccagatggtggacggatcggccatctcagagagctttttgatgacccactgcggggccattgatccgtcggtcggctcatcccacgtcatcgggtattcctcgcgccagccgtcgatcgccttccaccagggggtcagattcggcttgccctgaatggcctgcgtgcgctggatttcgggaatcaagtcgtcgagcacggtagccgcatcgcccacgatcggcacgtcgggctgacggttcttgccgatttcagccgggtcgatgtcaatatgaatcacgcgggcggtcggtgcgaaggcgtcgagcttgccggtcacgcggtcgtcgaaacgtgcaccgatggccacaagcaggtcagcgcgctgcacggcaccggttgcggcaatcgtaccgtgcatgcccagcatgccgaggttcttcgggtcggagtcgggaatgatgccgcgtgcgggcagggtcgtgaccacgggggcgccggtcaggtcggccagagccttgacctgtgcgccggcgttggagcgggcggcgccgccacccacatacagcaccgggcggtacgactgagagaacagcttcgccgcgtcggacagcacacggccgtgcgccttggtggtggggttgtagccgggcagaatcatgcgctgcggccatgagtagtacatgtcgccggtctgtgcggtcttggtcagatccacgaccaccgggccggggcggccggtgttggcgatgtagtacgcctcggaaagcacgcgaggaatgtcctgcgcgcgggtcacgaggaaggagtgcttggacaccgggtaggtgatgcccacgatatccgcctcctggaaggcgtcagtgccgatggcctgcacgcccacctgaccggtaatcacgaccatgggcacggagtccatattcgcatccgcaatggccgtgaccacgttcgtggcacccgggccggaagtcacgatgcacacgcccaccttgccagtggccagtgcgtagccttcggcggcgtggccggcggcctgctcgtggcgcataagcacgaagcggaacttcgtgttgtctttgatctcgtggtagacgggcagaatcgcgccgccaggaatgccgaagacgtcctcgacgccgagatcctccagcgaacgcaccagcgcttgggcgccagtcatcttctcgccatcgacgatggtctgcttatcgggggccgcgttgattttcggcacgccgctgaatgcctgcaaaggcgtgggtaaagccatgattcctctcacctcatagattttgccgcgaacctgcccgaccttgggatggggccgggtgcccgcgtgtctgattccagtcgcttctccgagacttgtggccccggcacgactcgtcgctcatgttggtatcagtctattcgcaaatctgacagcgggcttacttagtccgcgtcttgagcgagtccagtgacttccagcccgcttcggcggccgccagctgcgccttacgcttgctggagcccttaccgatgccgatgatgtcgccgttctcgcccaatgagacgcgcgcggtgaagatctgcgcgtactccgggccggagacctccatatggtagaccggctcatccttgccgaggccgtgcgccttgacggtcagcgaggtcttccagtcaagtgccgggccctcggtggccacttcggcgagcgtgtcgtcaataagccggtgaatcaccttgcgtgcctcgtcgatgccgtgttccaggaaggtcgcgccgatgagcgattccacgatgtcgcacagaatggagttcttctccgcgccgccctgctcggtttccccgtgacccagcagaatgtaggggcccaccttgagcttggttttggcgatggcgctcagcgcgtcttcggagacggccttggcgcgcatcttggccagttgcccctcggtcatatccgggtgaatggtgaacagcgtttcagtggagaccagttcgagcaccgcgtctcccaggaattcgaggcgttcgtaattggccacgccggggtgctcatgcgagaaggagcggtgggtgagtgcctgcacgagcagatccgggctgagagtggtgcccaacgcttcaagaagctcgttggccggcgtcggctgctgtggggtttcattgctcatgattgttgtatggtccttcacgcgatggtgatgtgttgtgtgttgtgttgtgttgtttgcgatgcgatggtgtacgtaatggtgcacttatgcgaagaccccgccacccgtcgatggcagggccttcattcaagccgttatcgcaggactcacttggtgtgagccggctggatggcggagcggtaggtgcggccgcggtagttaccgcagctcgggcaagccatgtgcggcagggccggagcgccacagttcgggcagttcacggtcgcagcagcggtggccttccagttcgcgcgacgcgagtgcgtgttggcgcgcgaggtcttgtacttaggcagtgccatttgagtatcctctatttcgttcgaacaattgagcttaagcgtccgttatcttaacgcacggctcgtacaaactccgttcaggcgcgcgtcactcggcctgctcgccgttctgctcggcctcgagctgggctttgagccccgccaatccggcaaaacggatatccgtcacatcgtgatgatggtcgggatcctcgttcagatcggcaccgcactgcgagcacaggcccttgcaatccggtcggcacagtggctgcaacggcagcgattcgaccagcgtgtcgcggatcatcgcctcgatgtccgcgaatgcgccgttctccagcagcggatacgtgtcttccgactcgtcctcgccggcgatgatgtcgatctcgtcgtccttcttgttcttgccgcccttgccgttggccttgtcctgacccgactcatacgggaagaacaccgtcacatcaaccggccagtcctcgtcaatcggcttcaggcagcgcgtgcactcgctgacgaatggcgcgaccaggcggccggtgaagatcaggccgtccacaatcgaatcgaactgcccgctcacatgtacgggctcaccatccttgatgccgacgatgctgtcgccaatgccggaaggggccgggaaatcggcgtcaatcggcttggattgaccggcgcgcgaagcaatctgcgctaccggaatggcccacggggaatcttcaactcgtgccatggtatgttcttggtgcctttcgtatgttggctggagttattcgttactggcgttattcgcgttactgatgttgccggcgttgctggtgttactgggcttcgggatagtcgttcagcgtcaggtgcggcatctgttcgccggccgcacgctggcgctcttccagcacgttaagaccggcctgcacatcccgactgagtttgccgagctgctgggacagcccttccatcaccgtagtgcagtactggtccgcgccttgggtcagatggtcggctctggtctgtgcctggtcaagaatcgcgcgcgctttctgccgtgcaagctcggtgacgttctcttggccggccaggaactgtgcctgttcgttggcgtccttgatcatgtcggctgcgcggctttgtgcggaggcgacgatggcgttggactgggtctgtgccgattccagacggcgctcggcctcgcgcatgagggcggaggcgcgctccaactgcaccggcagcattttcttcaactcggaaagctggtcggtgaattcgtcgcggtcaaccttcaccatgccgggggcgaatatgctggacttcgcttcgcccagtgccgcctcgagctggtcgatgatgtcatacaccgtggtgaattcctcgcggctcttgaccgtggccgggtcgtcgtccgtggtttctcgcaggtcgggcatttcgttcatgaacgaggggcgagtgccggcggcctgagcggtctgagcttgtgcccgggtctgctgagctgcttgggcctgcgctttggcctgcatctgtgccggagtaggggtaggcgcggcgggcggcgatccggcgagaacatcggcctcttcggtgggtgccggcgcggcttgcgtagacgcgggcggttccggggcggacggctccggagtggacgatgcggcgtccgcattcggtttggtcagatcgacgtatccagtggggtggtcatcgctcatagtcattagtgcatcagtccttccgctgacgttcctcggccagggcatcggccagcatcggcacgacacaatcgggcaccatgccggtcacgtcgcctccatggcgggccacgtccttgacgatggaactggagatgtgttcaagaatcggatcggccggcaaaaacagggtttcgatgccggcgagcttgcgattgaccagcgccatgccgagctcggcttcatagtcgccgttctggcgcaggcccttgacgataacggtggcgccgaccttcttgcagtagtcggtgatcaggccgtcggtggaagaaacagtgacgttcttgcaaccggctttgtcaagggcacggcggatcacgtcgactctggtggcttcggaaaacatcggtgttttcgcggcgttgacggccaccaccacatgcacctcgtcgaaaaaccgcgccgagcgctcgattacatccaagtgtccggcggtaacggggtcatacgagccggggcatactgcgatagtcatgccttatagcctaccgcgaatggtgtgcttcgtgctgccgagcgtgcattgttgtcgcgtcggcgtatgaggcagtgtgtgcggtgccgtatgtggcgtcggtgcggcgttgtgtgcggcattgttatgtggcattgtatgtggcggggtggcgtgatgcgcgacatgggtgtgtggaggtgtgcggattacgcgccaatgggtttcgcgggtaacgacgggaatctatgatggagtgcagtcgaatcgttgaatacgaggaaagaagtgcaccatgacttttgccgagatgttcgttgatgatgccgaaccgctgcgcaacccggaccaaggtgccggcacgtcggtgctggaacgcccggaaaccaaggagtctccggttcgtgacgatggcggcgacgcggatcgattcgcacattatgtttctaaggaccgtatcgccgaatcacgcgcgaccggtcgtccggtggtcgccctgtgcggcaaggtctgggtgcccaagcacgatccgtccaagtacccggtttgccccgattgcaagcgcatctacgaagaaatgacgcgctaaaggtggtacttggctcccctcagcgagggaagccaaaatggtcaccgagccgaaatctcgtcgatcagcttgagctcctcgtcgctgaagtgggtgttcttcagagcgccgatgttgtcgagaatctgctgaggcttggaggctccggtcagcacggaggtcaccttaccatcgtgcagcagccatgccaggctcatctcggccagcgtctggccgcgttcggcggccagattgttcaggtccacgacctgcttgtgcagtttctcggtcagggcggaatcgttgaggaatcgcggatcgtgagccatgcggctgtcggccggaatgccgttgagatagcggttggtcagcaggccctgtgccagcgggcagaaggtgatgaggcccttgcccagcttgaaggcggtctccttcagaccgttctcctcgacggtgcggtcgaggatgttgtatttgttctggttgatgatgaacggcacgtgcaggtcggcgagaatcgcggcggccttctccatcgtcggaccatcgtagttggacagacccacgtacagggccttgccggagttcacggcctgagccagcgcgcccatcgtctcctcaagcggggtttccgggtccgggtggtgatggtagaagatgtccacataatccaggcccaggcgttcgagcgactggtcgaggctggcgagcaggtacttgcggctgccgaggtcgccataggggccggcccacatttcgtagccggccttggtggagatgacgagttcgtcgcggtggtgcctgaagtacttggcgagcagcaggccgcagttcttctcggcctggccgggttcggggccatagttgttggccagatcgaagtgggtgatgccgttgtcgaaggcggtgaagatcagggacttcatctggtcgaatggcgtgatgtcgccgaagttgtgccagaagccgagtgagacggccggcagcttgaggccggaggtgccggcgtggttgtaggtcatcgtgtcgtaacggtgcgggttgggagcgtaggtggtggttggctcgaacattgagtctccttacaatgtcatttttgttcttacgaatgctggtctgcgatggacaaaccgacgccgatcgagtggtattcgtaagtgttcttagatactaaggttccagttcaagtgaacttgaatgcaaacggctgcgacgcttcggcgtgtcgccgcagtaaggagtcatgatgtcctacaccattcgtcaggtggccacgcagttccatatgcagccctctacgccggtgaagactggccggattggcgcgagtacaaaaaccgcgcctattccattgaatgctgaggccatcgagtgctgagctggatgccggctgggcactaagaccgatgtgcgtcgatcgtgggcgcgtctatccgagtaaggccttgctcggcagtgcgcggtcgagcagccagacaacgagcgatatcacgaagaacgctatggccagcttgccgcagctaatgccgaacccttgccagccgagtgcgtcgaggttgatgaagtcgtacggatacggactgccgccggccgccggtccggaccccggccaaatcgtcgcacgggccagcacgaagaccaagtatgcagggaagtacgccagccacgagaacatgtaatgccagcggaaacgccggtgcgggtcgaatagcacgaaatcgataaccgccataatcggggcgattttgtgcagcatcgtattggtcatgatgccaataacctgtggcacgtatgccgggtcgtccggaggcatcaggaagaacgccaccagtgcggtgactatggcgtacacagtcaggcatcccttaggccatgcaggcggctgaatacctttgagcagtgtggccgcgccggcccacagcatcacgatgcccagcacgaaaccggtctggaacgtgaaatacacccagaactgcggtttggaccatgcctcatatgtgcccacgaagcagaaaccggcgatcgcaaagcgccacaacgccacgatgaatctcatgcatcgagtctaccgcttcgccagtgggctgtatggctttgcccggactacacttaggtgcaacttcaccacttatgtaggaaaggccttgcaatggtcgattattcgccggctctgatgaccgacatgtatgaatacacgatgctcgacgccgctctgaaagacggtaccgccgaccgcaaatgcgtgttcgaggtgttcacgcgtcgcctgcccgaaggccgtcgctatggcgtggtggccggcaccggccgcattctggatgcgctggaacatttccacttggacgaagcggacctgaagttcctggccgaccgtcacgtggtaagccccgagaccatcaagtggctggagaacttccacttctccggtacgattcgcggttaccgcgaaggtgagatgttcttcccgaactccccgattttgcaggtcgaaggcacgttcggcgaatgcacgctactggagacgttgattctatccgtgctgaactacgattccgcagtggcctccgccgcctcacgtatggcgtcggcagccaaggatcgtccttgcatggatatgggcggacgccgcactaacgagtgggccgccgtggccgccgctcgagccgccgtagtgggcggattcaagggtaccgccaatctgctggccgcccagctgtatggtctgaaggccattggcaccgccgcgcattgcttcacgttggtgcatgattccgagcgtgacgccttcgaatcgcagatcgaggcattgggcaagaacaccacgctgctggtggacacctacaacatcgaggaagccgtgaaaaccgccgtcgaggtggccggtcccgaactgggtggcgtgcgcatcgactccggcgacctagccgccatggcccagcgtgtgcgcaaccagctggacgccttgggcgccacgaacaccaccattaccgtgaccaacgatttggatgagtacgcgctcgccgcattgcagaccgcgccggtcgactcctatggtgtgggcaccatgctggtcaccggctccggcgctcccacttgtgcgatggtgtacaagctcaccgaacgtgaaggcgctgacggcacgatggttccggtcatgaagaaatccaaggacaaggccacagtgcccggtcgcaaactggcattccgctcctacgaatacgcgttagccgaagctgaacacgtgatttccggctcggaggagaagctggccggtttcacgcctgaaccgacgtggaagaacctgctggtcgactttgtggatcatgggcagatcgacgctcagtggcagggccatgacgccatcatggccgcccacgactaccacgccaaggcgttgtccgaactgcccatcaccgcgcagagcctcatgaagggcgagccagtgattcctacggagactcaggttctctgacgagaactttcgtctccataggaatccgtcgcagcatagctgctccccttacctacggacagcccactgggctgtccgcttaacggttcgaccacagagaccaaagtcctctgaccgtatctcactggccgcatctctttggttacattggctactcttccctctgtctgtgtccctctgtctgtgcccctctgtctgtgttggccgcactcctgtgatcgccgccgaggcggggagatccaaccccggtcgcacccccgtgtttgcaccccctgtggctgtgtcccggggctgtattggccgcgtcccctcgggctgaactgcgtcccggttcgccggacgtggttccagctgagggtggcccccctgttttttttggggggggggtactgttcactggggaaatatgtatatgtgcatgctgttgcaatgtacattttgttgtcagttgacaacgtcttgattcagatgaattggcgggaaatggccatttgtcttatccaattgatttgaagaacgttgtcagttgacaacgttttgtacatggtgcggaacgacacatattcctatcctggtcaggatgccgatgaggtggagtgaaaaaccaaaccatttcagaggatattgcaccgagacgttgtgggattgacgtgttgtcggtgatgttacagagatggcgcagtgttgcgtgaggggtgttgcgtgaggggtgttgcgtgaggggtgttgcgtgtgatgttgcgtgtgatgttgcgtgtgatgttgcgttgggctgattgggaggaatagtgtgccgatagaatgccgtgatgcgtgcagagcaatcgtttgcggagcaatcgttgaagaatcgtgtgaactgatgcgatacgaatcataccgtctctgaattgtgggatatgacgaatcgtatcgtcatgggattgtgggatatgatgattgcggtttgatgaaatgaccgggaaatcggccgaggcaaggtgacttcgatgagtgaaactctcaatgatgagaacgcggcgggcaacgatgacgtatcagagcggcgcgctgtagagcatcgagcgttagaacagtgcgatgtcgtgcatcacggtgtggtatctggttgccctgttaattcgtgtgcggctgtgctgaatgaagtgatgtcgcagactggttggaatgcctatgagcttgcacagcgtactggtttggatcggtctgcaattggtcgcgtattgcgtgggcaaagaggtatgttgtttgatgttttggccgaggggcttgagcgggctggttttggtcttcacctagaagccgtggccccctcgcaaacgattccggaagacgaattgcacatgttgttggcgcaactgcgtaggcctcctgatttcgatgcaatagaaagcggagcgacctggtctacgttgaagatgctctgcgtcaatctgattcatgctcggaatgttcaacatcaacgtatatcgttcgtccgagcggttgcacgggtgaacgatgcgtgctggattgcgtttctcgctggtttataccgttttctgcgttgggatatcaacccaaggaacagacgcttgacattggttcctccgtaccggtatggcttggatggatggtggtccccactgccgagcgcggcaattatgcacgtgcttcatcgatatgaagagccgttgcatgacatggactatacatatttgccgttaatcgattacgaactcaacgctatgcagcgcaagcaattcaaccaagatttcatggaatatggcattcttattccagcggacgatctttcccaatcctcatcaggtacgcaggcattgactctgtaagcgagtggtgcataagaaaatagtggcgtgcagccaagtgtcatggaatggatatgtaagcagggaatgacattgcgctggggtttgatgatggttgacgagttgctatccaggcatagagcggatggcgtatgctggggcgcatggttgaaatcaaagacatgcttggcaatcaccaaataattcgtgccgacggccgcaaggtcgacgagctgcgccccgtgcgcatcacccgccacttcaccgacgcccccgaaggctccgtgctcatcgaatgcggtaacacgcgcgtgatgtgcaccgccacttttacccccggtgtgccgcgttggcgcaaggactccggcctcggctgggtcaccgccgaatactcgatgctgccgcgtgccaccgccgaacgcaccgaccgtgaatccgtacgtggcaaaatcggtggccgtacccacgaaatcagccgactgattggccgctgcctgcgtggcgtcatcgatatgaaggcgctcggcgaaaatcagattcagcttgactgcgatgtgcttcaggccgatggcggcactcgcacggcttccgtaaccggtgcgtacgtggctttggtcgacgcagtcaattgggcggagaagcaccgccatatcaagtccgccagccgcgtgcttaaggactatgtgtccgccgtatcggtgggcgtgatcaacggcactccgatgcttgacctgccatacattgaagacagtcaggccatgaccgacatgaacgtggccatgaccggttccggcaccttcatcgagattcagggcaccgcagaacaccgtccgttcaaccgtgccgaactcggcaccctgcttgacttggccgaaaagggcaacaaggaactgcaagccgcccagcgtgccgctttgtccctagactaagccagctccccttcctttaggggaggttgtcggctggaagccgtacggtctgcaatgtccagctcccctgacaaggggagccttcttaaaggagaacccatgcaaatcgtcgtcgcaacccataacgaaggcaagcttgtggaaatccgccgcattctcgaagaggatcttggcgcggatgccgaaaacatcgaactggtgtccgctggcagccttcacctgccggacccggtggaaaccggcgtcaccttccaggagaacgcgctgctcaaggcccgcgccgtggccatccgtaccggtctgcccgctgtagcggatgattcaggtctcatcgtcgatgtgatgggtaacgctccgggcattctgtctgctcgctgggcgggggctcacggccacgacaaggccaataatgcgctgctgctcgcccaaatcgaagatattccggatgacaagcgtaccgcgcgcttccgctgcgccgccgcgctggtggtcccggacaccgaggccagtgccgacgtgaccggtggagtggctgccgacggcatcaccgtttacaccacggctgcagatgggagccctgccccggtgcatgcccggtacgccatcaagtcggagacagtggaactcggcgacatgccaggtcgtatcatccgcgaggctcgtggcgaacacggtttcggttacgatccgctgttcgtcccggacgaccagcctgccggtcgcgtcagcactgagcctgaccatgaaggcgagccgctgaccagcgccgaaatgactccggccgagaagaatgcgatttcccaccgaggcaaggcgctgaaagccttggtccccgctatcgaggcgctgctgcactaagtcgtctaggctgtctaactgcactgagcccctcccgaatcgggcaagtgtctagcaagcgcctatgacctagcaagggcgatacgaaagaaggccggcgcttagtgcgtcggccttcttgatgaacaagagccacccgatagaatcgaactaccgaccttcccacgaacgagggggatgctctaccactgagctaaggtggcgtggctccaagagccaagtagagaatatagcactgcgtttgattcaacgcaagccggacgttcagcatcttcgggccattgttctttgagccattgtggaggcaatagtgcgaacgatgtgcacacctcatctgctcggaccccattcgtcgtgtgcgcgttatgctagcatggtgagcctgattgactcggaggcagagggaagcatgcgtgattttgtgctggtgaagttgacagacgaagagttcgatgatttctccgccaggcatccacaaggcaatttccaacagacctcggcgatgggacgccttcgcgccgcgcaggggatcgacgtcgaatatctggccctcaaggagggcgagaagatcgtcgcggcggcgctgttcgaaactcaccgctctcgattctctacatttgcggccatccatgatggcccgatgtgcgactatcacgacaccgaagcattgaccttcttcatggatgcgctgaaacgccatgccaaggcaaagggtgcttcacagctggaaatcacccctgaatccccgtatcggtttcgcgacaccaatggagcttctttgccggatgaccagaacggcgctcccgacaataagctgatagaacggctcgaggcgatcggcttcactcatggcggtttcaccgtgggctacacggcggttccacgttggcgctacctcaaggatctgaccggcattaccgatgagaaaagtctgctgaagtcctatgacaagcgcacccagtggagcgtgaagcgtgcccaatcgatgggtgtgcatgtgcgtgagctgtcggacgacgagttgggggtattcgcacgaatcgagcggcaaaccgccgaacgtcgtagcttcgaataccgtggcgaagcatatttccaccatttcaaggaagcgtttggcaacaaggcgcattttatggttgccgagatccacatcgacgaatatgtagcggacatgacggccaagcgtgaagcgctttcggccaaggtggcggcattgaccgccaaaaacgccgaacaccccaccaccaaaaccgaacgtcagttgggggaggagacccgcaatctggcggcagccgaaaagcgcctgaacgaggcggccgagttcgccaaagacggggatgtgctgccggctgcggcatcactattcgtggagcatccgcgcgaggtcatctacctgttctccggtagcgtcgagcagtacaagcccttctacgcctccgcgctgattcagcatgacgcgatgctgcatttctgcgtggaacacgggctgtctcgctacaacttctacggcatcgacggcgtctttgatgatcccgatgacgaggggcgtggtgtactggagttcaagcagggcttcaacggatatgtcgaggaacttccgggcgagttcgtactgccggtcaaaccggtcgcctatgccatgaagcaatttgcgcacaagctgctgtcgcggtaaacggacgcagcacacaggccgttccagagcccagagtaacgatcagagtaacgacaagtaagaaggttcgattatgacgcaatccgatgcaggcgtcgcctcactcacccctaccaagatcactcctgccgagctggatgcgttctccgcagctcaagtgcaaggtagtttccagcagacctcgcagatggccgccatgggtgcgttcaacggtccggtggactatgtgggtgtcaagcgcggtgacaagctgattgccgcctgctacgtggtgtacacgcggtcccgtttcggtttggaaggctcggtctggtgcggaccgctgtgcgattatgacaatccacaggtggttgaggcgatgaccgaagccctgcgtcgttcggccaaggcccatcacgccatcagcgtatcctgctggccggccgcagtctaccgtctgcatgatctggacggcaagccgaccagcgaccctgacaccacgatgatggacaacatggcccgcttcggttggaaacatggcggcttcaccgtgggctacgaatccgtggtgaaccgctggaacttcgtcaaggggcttgacggcattcataatgagaaggaactgctggcctcgttctccaagtaccgccgtaagaacatccgcatcgcccaggattccggtctgcgcgtgcgccggctggaacgcggcgaactgagcactttcgtcaagctgtgcgatatgagcgccgcacgtcaaggcttcaagagccgcgatctggcctactatgagcgtctgttcgataccttcggcgacctgatcgagttcaaggtggtcgaaacccatttcgacgaatatctggacaccctgcaatccaagctgaatgcggcctccaaagacaagcgcaacctcgaacgcctgctccagcgcgcgcaacagcggccggaaggcacggccaagaagggtgcctccgacccggcaacgctggaaaagcgcatcgccaccgcagacaagaagatcacggcgctggaaaagaccatcggcgaagtcaatggcatcatcgcctcggacggcccggtcattccggtggaagccggtgtctacttctggcatccgaacgaggtcgtctgcctgtccagcggcgaggacgatcgtttcatggattactacccgtcttccctaatccacttcgaggcgatgcttgactgcatcgcccgtggcgtggagcgcttcaacttctacggcatttccggcattttcgacgccaacgatccttcctacggcgtctggcagttcaagactcgcttcggcggattcgtggaagagcttccgggcaagttcacgctgccggtggacggactgcgcttcggtgtatccgaagccgcacacaagctgctgcatcgctgacaaacagtggcgagcacggacacagaaataaggcacaggtgacgacgagatgagcgcgactgcgaatcgaacagatacgacgtatacgtttggcgtgattacgcccgaagagttcgaccggctttccgaagccacaagccagggcagctttcagcaatggtccgggcaggtccgtcttgccaagattcgtgggcatgaagccgaatgcgttggcgtgtgcgacgcatccggcaatctggtagccggctgcgtgattctgtacctcaatggtcgtttcggtgcagatggctccgtatatttcggccccatcggcattagcgatgatccggctctgctgcgggccataaccgaggcgattcgtgaatcggcccgtcgccaccatgctgtttccgtggcatgctggcctaacgtcgcctaccgtctgtattcctcggacgggcagcccgacggcgagccgaacgatgcactgctgaccggattcaccgatgccggctggacgcatggcggattccataccggttatgacgtggtctgccagtggatgtacgtcaaggatctcaccggcatcaccaacggcaaggaactgctggcatcattcggcaaacgcgctcaatggagcgtcaagcgggcgcagtcgatgggcgtgcacgttcgcgaaatcggccccgacgagttcgacgtgttcgccgatatcgaacggcggaccggtgaacgccgcgggttcgcgacgcgcggcgcggactatttccgccagttcaagcaggcgtatggcgcggatgcgcatttcatgctcgcggaaatccacatcgccgaatatgtggcggatatgaccgccaagcgcgaggtcttgcagaccaaggtcgcacagctgcaggcgaaatacgatgaacgtccgaccacgcgcatcgaacgtcagctgggggaggaatcgcgcaatctcgcggccgccgacaagcgtctggctgaggtggagggatatgccaagaagggcgatgtgctgccggcagcggcttcaatgttcgtcagtcaccccaatgaggtggtctatcagtattccggttcgttggaggagtacaagccgttctacgcctcggcgctgattcagtacgaaacgatgctgcacctgtgtgtggaacagggtgtgagccgctacaacttctacggcatttccggcgtgttcgacgatccgaacgacgagggccgcggcgtgctggaattcaagcagggcttcaacggctacgtcgagcagatggtaggcaaattcacgttgccggtggacaagttccgcttcggcgtgagcaatctggcgcacaagctgctgcaccggtagcagctggcggccgggggacgaacctatgtgggctgcgtctcgcctgaccgtgtgcccgtcgtgtgcccgtcgtgtgcccgtcgtgtgcctactcgcgcatttgctcacacgcccatcagcgcgtgagcaaatgccatcatcaccagtgaaatcatcgcggtgattgccagcgagaagccggccagtttggcgttgccgagtactttgtcggtgaacagcgtggagaaaatggcgattggagccaacgcgcagatcaccatcacggcgcgaatcgaagccgagaacggcagcaggaaccacgagatcaacgcgaaggcgacgctgaacggtatacgccaagcgatgacggccatgacttccttcacatcatgcttggactggggcaaatccatgagcatgcccaccatcagcatcgacaccagcgcgttggcaccgctcaacggctgggttatagaggcgatccaatcgggaatcttcacgttggcgacggtcaacgcgatcatgagcagatacgtgtcgaacggcaccgagccgaagaagctcttgccgatggtgcgcagcaatgcgcggcgggcaagccgtttggcgtcgcgatccttgggcttttcgtacggcaaggtgggaaccgaaccggcgtgttgttcggcaagtgttttgccgggctgaatatgcagcagttgctgggtgagcacattggtgccggcggccaccatcacgcagttgccgatatcgaacatcgcagccggcaccaccgcgcccgcaccccagaatgactggacgaccgggaaagagaaacaaccgagattgaagccggcgccattgagcatcaggaaggcgcggtcggtcacattgcgcttgcgggtggccagaaagatgaacacgatcgggataaaagcaaacaggaatgcgaataccgaaataagcagcagcgagatgtcatgcggattggtggcgaacgagtatacgatggcaccgggtagcacgatgttgaattccgcggtttgcaacacgcgataatccttctgcccgaacaggccgaaccgcttgaacagatagccggcgagaatgatcagcaataggccaaccggcgtaagaatggcggacatacacttctctccttgactcacacaggctcatggcgcacaggctcagacccacaatgctgtgaccattatatttgccgccttggcattgccatatgtagaggcgtccgcaagggcttgcaattgcctcacgcatatacgaagagcctcccggaatcgttggcgatccaatgtttccaggaggctcaagccggtgcgcgagatgggacttgaacccacacgtcaaagacacaggaacctaaatcctgcgcgtctaccaattccgccactcgcgcgtgcatatccgcgtttccacaggtgtggaagatatacaaaaccctaggccggacagccattacagaccagccagcctagggcatccgagccacttgtcagaatcgaactgacgacctgctcattacgagtgagccgctctaccgactgagctaaagtggcttggttcgcggaaggcatttcgccagccgcgcacaagaaattaagtataagacatctccgcgaaaagtccaatcggcggcttggcggttgtgtcgtgaccgctcggttgaagatgacggttgtgccgcgccacgaactgttcgataatgcaaacgatggcaatccgacatcgctgactgatttttgttctgttcatgtccgaatttgtgagtattctgtttggtgatacggagcgcatccgagccgtgagcgaaggcgctccagtcactgatgaaaggaatggaatcctatggccatcaatccgcccgttgacgccacccagacccctgagtgggctgccctgcagaagcactatgacgagcttcaggccgaaggcgtgagcctcaagaagtggttcgccgaggacgccgagcgtgtcgacaagctgtccttcgacgccggcgacctgcacttcgatctgtccaagaacctgatcaagccggaaaccctccagctgttcgccaaccttgccaaggccgtcaagctcgatgagcgcaccaaggctatgtacaccggcgtgcacatcaacaacaccgaagaccgcgccgtgctgcacaccgcgctgcgccgcccggtcgaagacgagggcaagtacatcgtcgacggccaggacaccgtcaaggacgtgcgcgaggtgctcgaccgcatctacgccttcgccgacaaggtccgttccggcgagtggaccggtgtgaccggcaagaagatcgaaaccgtggtcaacatcggcatcggcggctccgacctgggtcccgtcatggtgtacgaggccctcaagccgtacgccgacgcgggcatctccgcccgctacatctccaacatcgacccgaacgacctggccgagaagaccaagggcctcgacccggagaccaccctgttcatcatcgtctccaagaccttcaccaccctggagaccctgaccaacgcccgtgaagcccgcacctggctgctcgaagagctcaaggccaagggcgccatcgacggctccgacgagaagaacgccgaagccatcaagaagcacttcgtcgccgtctccaccaaccgggagaaggtcgccgaattcggcatcgacccgaacaacgcgttcggcttctggaactgggtcggcggccgttactccgtcgactccgccgtcggcacctctctggccgttgtcttcggcccggcccgcttcgaggagttcctgcacggcttccacgagatcgacgaatacttcgccaacaccccgttcgagaagaacgtcgtggtgctgctcggtatgctgaacgtctggtaccgcaacttcttcaaggtcgcctcccacgccgtgctgccgtacgaccagtacctgcaccgcttcccggcctacctgcagcagctgaccatggaatccaacggcaagtccgtgcgttgggacggcaccccggtcacctccgaaaccgg

SEQ ID NO: 3446 - DNA, 55405 bp, Unknown
  R151_18m  MAG No. k141_57938
cctgattgtcgtaaagtgcgtctaagccgctacttatcagccatccggctccagtgccaatcgccgttccgacaaatgcgccgaccacggtgccggcaccggggacgatcgatccgacgaccgcgcccacggcaccgccaacggtcccaccgaggccatcaacggcaggcccgagaccctacgcggcatcgccctcggcttccgcaacctcgacaactacgtcacccgcagcctcctccacaccggcggcttcagacacaccatacaagcccacctataagcatcccctctacacaccaaaaccggaagagccggatgattccctgcaagccgatcacgccaatccgacccgacgactaatcagattgaggacggctgaattaagcttgtgccctcatgatacaacatgtcctgcgaccgacgccagacacaacggcagcattctgcccaccatagggcgtgtctttaaccagaaagtaccctcaaatacgttcagcaagatatatgcacgcagaacagcccttccgcattatcttatttgacatagagcatgccccttccattccacagaatcaagcaaataaacgagcggagagactggacacaccgcaaaacaatggcccaacccctccgctcgtttgttatggaaggaagagggatgaataagtatgtttacttcactgacttgatgaagacgatcagcaccgcgccaatcagcgagcagaccgctgcaagcgggaagagtgcgtgatagcccaccgaggaaattagcgccgccgcaacatcccacgcaccatattcaggacaaatccagtccgttgttgtccttggctttgctcaccatatcagtcaaatcggggtcgttcacagacaccgcgttctgctgactgagcgtcaacgatagcgagccattataggagtcgccgtcttcgtccttgccggacacgcttatggcaatcgaattcatcagacgctttctgccgtagttcagatccacggtgatagtcggcatctccggctcttcatccgtgccgaaatcccagttgcgcacattatcgagcgcctgacggtactcatcttcagcatcgtccacgccggcatcctcgatttgctgaatcacccaggatttcagatgcggatactgcgcttcatgactgatccagtaattcacgaaatgctgagacaacgctttgatatcgatttggtacgacagctgcgtattgccggcagacttggcagacgatgtattcgggaacagctggctgcgcacattcttatcttccagctccacgccgaaatattgttggatgaatttgctggcctcggccttcacctcggcagaccttttcgtgcccttggcccggtcgatgtcgttcgagtacccatcgtcgttcatcttgtccagctgatcgtagaacgtttgctccgcgccggtgatgtcccaagcaccgttcttgaccaacgcatccttgacgttcaatatcaagtccgccacatcactaccaacgccgttccttaagtcatcttcatattggtcggccgggcagtagatgtagtaggggtcgtcgtcatgccaaacgaatttctcggcgaatgcgcctttgtaccaagcgaaggtcgttgcatattcgtctgttttgctagtgaaggacgcggaggattcgttggtggttttgcccagcgaatacatgccagacatccgcgcgtcaagagaatcgccagtgctgctgtgggttctgagttcgtatttggtgctgcgcagagtggacagcgagttgatcgcgtcgaaggtgacgaccagcggattggtgggccggaagcccagcatcgctttgacggcggtgaagttggggatgatgaacgccaaggccgccaccagaatcgtcgcaagcaatgcgcagaaagcggcgatcagcttcttgctggatttgcgctgcggtgccaggacggcggttgcatcagtcgcctgatatgcggcaggagcgggaatcggcaaagccggcaggggaacggttggtgccggctgtggggcagcggacgcggcgtaaaccgatggggcaaccggcgcggctggtatcgatggtggtaccgcagacgccggcacagcaggtgccggtatcgacgcaggcggtacggctggcgatgcggccggtactggtgccgtcgcaactggtgcgctgtctacagacgctccacatgccgggcaaaatcgtgccggcccatcaactctatttccgcagtggccgcagtacgccatcgtgtgcctctctccctcaaatcggcttgattgccatcgcttcaatgttactcttcagcattacgcctcagccagcccctacgcgtaacgatacgagacgcggcagccttaatgcggttgttttgacgcgatgccaacatcgagctctggccaacgttctggtactcggctacatcttgctgcgagccaagaagcaggccatcgctcgcgccgacgaggccgaatggcggtctagcctcgctttaagcctcaggccagcacctccatggggtgataggtggcggtgtggtggccggtgatggggttccatacccgttcggcgaatgcgcgcagacgggcgacgccctcgcacagctcgtcggcatctccggcgtaggagaggcgcacgaagccgcgcccctcctcgccgaaggcctcgccggggaccacagccacgcgctcttcgtccagcagacggtctgcgaattcaccggagtcaaggccagtcaggcgtacgtccacaaaggcgtagaacgcgccttgcggttcgatcagacgcaataccgggcatccggccagaccgtccagcacgatctggcgcttggcgcggtattcctcgcgcatggcggccacgttatcttgcgggccagccagtgctgccacgcctgcgtattgcgccaaggagttcaccgaggagtgcatgagttcggcgattttgccggtctgttcgatgaccgcttcgggtgccagcaggtagccgatgcgccagccggtcatcgcataggttttcgacaggctttccaccacaatggtgcgctctttcatgcccggcaccgcggcgatcgatggtgccacggctgcctctcccccaagcgtttccccgaacgtttccccaaacacgaacggatggtaaacctcgtcggagatggcccaaatattgtgctgcttgcatacttcggcaatacgcgccagttcggcggcagaggttaccgcgccggtcggattgcccggtgagttgatgattacggcgcgggtgcgcggggtgatcgccgcttcgatgtccgccgcgttcacgcgcatgccgtgctccggacgcagcgccacggtgaccgggcggccgccgcacagcatcacttcggcgtcataggaagtgaagaacggcgagggaataatcacttcatcgccggtgcccaccacggctttcagcgccagaaacaggccaatcgtggcaccgtcaacggcttgaatctcggtttcgggatcataagtaagtcccttcacacaggcggagtaatcggccacggccttgcggtattcggggatgccaagcacgttggtgtaccgagtgcggccagcctgtgcggcctcgcaagcggctgccacgatatgcggcgcggccgtggcgctgggctcccccacggtcagtgaaatcgcgtcaggcacgcgctctacacggtcgaatacgtctcggatgccggagcgcgggatattcagggcttcggcggacaggctcgcgggctcggcggtcggcacagcaacccgaccggcagcaggcatagtagcaggcgcagcagcagatgcaacttcggacagagacatgttggaaaacttctgcatatcatccctcctcaatggaattatttcatcgttctcttatttcaaaaggaattattacatccaattaggactttaaacgtaaacattccaccacacaacagaaaacacaggaagaactactgaaattaccaggcaaaatcggaaagccatcgcattccggcaacaggtacagtgaacacagagcacaacgaacggagaagacatcatgaccgcgattgacgagaccgaccagcgcatcctcaccatgctggaggccgacggccgcgccacgctcgcgcaactggcccaggcgaccggactgtcagtctccgccgcccagtcgcgcgtgcagaagctggagaagcgcggcatcatcaagggatacaaggccatcatcgaccaagagcagcgcggcttgcccatcagcgcgttcgtcaacgtgaccccgctcgactactcagccgaatcctcgattccggacaagctgaacaatatcgacggcatcgtctcctgctattcggtggccggcgcccccagtttcgtgctggtggtgcgcgtggcttcccctaccgcacttgaagaactgctcaatctcatccaccgcacggtgccggtaagcaccgagaccacgatgattctgcagacctacttcgcacactgaccgcgaacccggtaacctgcgcgccgaagacctgcggccacacaccccacaaaccccacaggtcacaaaaaccatacgaccccacggtccagccacaccccacaaaccccacagaccgcacgatccccaacagacacatctgacatcacccaagtccgcctttatgtccactatatgaacgtgcctccggtgtgatgcggcttccatttcgacccgattcacgcatagacagacatccaacaatcgcccgaaaaatctaacaaacggaaacttgagccactccataaccacgccgaaagctttcccgttatccgagcgagactctatgcagcaagggcctgcgcgcatagaataaaaccgtcttaattccctaccaaatcgaggagaatcatgctcactgacgagtacatcaagcgtgtctacgaccaggtcgttgcccgtgacggcgatcagccggagttcctgcaggccgttcgcgaggtcttcgagaccctgcagccggttgtcgagaagcacccggagtacgagaaggccggtgtgctggagcgcatcgtcgagccggagcgcgccatcaagttccgcgtggcctgggttgacgacgagggcaaggttcaggtgaaccgcggctaccgcatccaattcaactccgccattggcccgtacaagggcggcctgcgcttccacccgaccgtgaccgagtccgtcgtcaagttccttggcttcgagcagattctcaagaactccctgaccacgctgccgatgggcggcggcaagggtggctccgacttcaacccgaagggcaagtccgacgccgaggtcatgcgcttctgccaggcctttatgaccgagctgagccgccacatcggccagttcaccgacgttcccgccggcgacatcaacgtcggtggccgtgagatcggctacctgttcggtcagtacaagcgcatccgcgacgagtactccggcgtcctgaccggtaagggtctggaattcggcggctccctggcccgcaccgaggccaccggttacggcgtgtgctactacacccaggaagccctgcgcgtgctgcgcaacgactccttcgagggcaagaccgtcgtgatctccggctccggcaacgtggccacctacgccgctcagaaggctgagcagctgggcgccaaggtcgtcaccgtctccgactccaacggctacatctacgacccgaacggcatcaacgtcgaggtcgtcaagcagatcaaggaagtcgagcgcggccgcatcaaggaatatgccgagcgcgttccgggctccgagtaccacgagggcagcaagggcgtgtggaccgtcaagggcgacatcgctctgccgtgcgccacccagaacgaggttgatggcgaatccgcacagaagctcgtggacaacggcgtgaccgtggtcgtcgagggtgcgaacatgccgtccaccccggaggccatcgaggtctaccagaagaacggcgtgctgtacggcccggccaaggctgccaacgccggtggcgtggccgtctccggcctggagatgagccagaacagctaccgtctgtcttggaccttcgaagaggtcgacgccaagctcaagtccatcatggaagagatcgtcgccaactccctggccgccgccaaggaatacggtcacgagggtgacctgatgctcggcgccaacgccgccggcttcgtcaaggtcgccaacgccatggttgcccagggcgtgctgtgacgcttgcctctgagcagtactaagcagtagcgtaatgcccttgcttcccgtgaggaggcaagggcattgctatatgtacaacgagcaacaagtgctatccccaaatacgtaagcccgataacaactcagcttccacctccataaccccggaactcaccaccgtcgatcagcacatggatcagtgcggctggaccatggccgacgtggtcatcaaagccatcaacggagtctcttcaccgcgcgtgatgcacctgaacaccgatttggtggtgcgtgagtcggcgtaattgccacgtggctgtcggcaggactctagataccgcgtcacaatcacccagtaatgcatcacgcagtgtataactcttccgcggaaacgaacaccattcgttcatcatccatgtagcgggttcgcgtggactcactcaccggattcttggtgaacagcataagccacgcattacctgcctgatagccgcggactaagccagcacgctgatggagcttttcaatagcctccgtttcgttgaatgaattacgccatttgcattcaccgaacagaatcgttttatcgagcgaatccgcagcaatcacatcgatatcggtttgctcgtgagcaatcggatcattgccccaccatttgccgaactgagtggcaacaaaggggaggttgcccatagcgttgtttcgaataagccattgcaggcaaatcgtctcaaattgttgaccaacataggtatcaaacgctggtccaaaagcgagtctgctcgtaacctcctcgctgatattaccatccaaaatgctcatgttgcgccccacaaagcggaaccaatatgcaaagaagggatcgctcaccacatacattcccttgcgcgatttactcggatcttcaccaaacggcacttttcgctcaattaagcgcaaatcgaccagcgttttcagatatgctccaatcgaatcagatccgacacccgcatgttcagcgataagctttggcgaggaattaccacccgcaatagattgcaatatcgaataatacgatgccggttcacgaagctcctgacgcaacagcatcataggttcctcacgcagtacgcccaagttgtcgaacatcaagcgcagcacattggattcaaagccatcggcttcctgtatacgggccagataatatggcgtaccgccgaaagtcgcatagtattggaccagttcttgcggagatgtgttcgttagaaattttgccgcatccgcatagtcgaatggcaggagtcgaatctgtgctgtacgacgcccgtatagcgggcttttacgccccaatacgtcgttttccatgaatccctcgttactaccggatagaatcatcgtcacttttgtggcgaggaatccatggtcaattgctatctgcaacatggagggtaatgctggctcggcggcagccgcataagggaactcatcgaatacgaacaccatacgttcgtcagtctgtgcagcacgttcagcaacaaacgataacgcatcagaccacccgccaaacgacggggtggaatccggcataccaaagaacgacaatgccgctcttgagaaatcttcaagattcatcttggcgctttgctgtatggccgtgaagtacagcacgcgtttatctttgacaaattcgtcgatcaacgccgttttccctacacgccgcctaccgtacagcaccaccatttcgaatgaatcactggtaaacagcttttccagcacttgtaactcgtgctctcgtgcgacaaacattgcagccctccgatccgcctaccgcccaataataagagtatcatggttaatgtaatcacgattaccttaattatgatactgataattgttgccctaccgcgaggaggatcttccttccgctgtcaaaacgaaagcccaacagtccagactgacgagcagcaacatcggcagatcaaccgctgacgccagccagcctgacagcacaaatcagcctgattgcaggcatataggcactagttagcgaaaccggctcttcgcattttggtgcgtaggggccgtgcggtttgattcggtgtgtgattgaaaaagtgaatgaaaccgcacggcccctacacgccaaaaccggaagagcccataaagtcccctcagtagcgccaacctgccagtcctttggcggaaccacaccacatagaccttcctcaacggcgccaagctgccacacgctggcagaccaacaccgctgtgtgcattctctgcgtcggcggcagtccaaaacttggcccagcaacgacgcttgctgtgcccagcgtcggcagagggccaagaattggacgcaaacgacacagaacacaccctcagcgtcggcagaactccaagatctgtaccgctgacgacggtaagccctccacagcgtcgtcagagatacaaaacctgtcccaacaccgacgcctgccacccccagcgtcgccggagtcccaagtctcggcccagcaacgacgcctacgaaccccacacataagaaaccgcacctccgatcatcgaatctgaattacttcagtccaacaaccggggtgcggttcactgaggggagttctgccagtatagctatatcagtcgtcgccgagcgtgacgtgcacgccgccgaccagcgagctgaccacgttgtagatcagtgccgcaatggtggccagcagggtgaagatcaccacttcaacaatcgagaagatggtgacgccggagaccacggtggtaagggacaacacgttcttgagatcgaaaccgcctgcatcaagaccggtggaagacacaatctgcgtaatctggctgaatacaccgaccacatcaagcagcacccatacgatcgcggaggcaacgacctgaataatcgccacggcgatggacagcatgaacgtcaccttggccacggaccaagcatccacgcgggtcagcgacaagctcatgcggcgagccctgggggcgctacggcgaggtgccggacgcacgggagtggcggcacctgaagaaggcaacgtggattcttccggatcgctggacacggagcgtgccacgcggggagcgtgctcagtaccgatcagcggctcgacatgatcgttctgcgtattgccgactgccggcggtatgatccggggctcgttgtcttcgagattctcgctcatcgtttctccttaacaggcttggcggtagcctctgctgtatgcgaggctaccagcttttcaggacgctgctcacgcctcgtccgcgttgttcacattctcgccggattgtgcggtctcggcggtgccgttcgccgcggcatcgccactgtcctcgggctcgtccttctcctcgttacgggcgatggagagaatcgtgtcgcccttgtcaggcttggcgaaggtaacaccctgggtgttgcgcccggtgcgcttgacctcgtccacgttggaacgaatcaccttgccggacttcatgatggccatgacctgatcgtcttcggacaccacgagcgcgccgaccagggcaccacggccctcgaccagttgcacggccttgatgcccaagccgttacggccctgcagacggtattcgctgatggcggtgcgcttggcgaagccctcgttggtcaccacgaacaggtccttgtcggagtcgccagggaccacatccatggccagcaggctgtcgtcgttacggaacttcatgccctgcacgccggcggtctggcggcccatcggacgcagctgctcgtcgtcggcctggaacttgaggctcatgccgagcttggagaccaggatgatgtcatcctcggcgttgcacagcgcggcaccgatgagctcgtcggcgttctcgccattctcgtcggccatgaggcgcacggcgatcaggccgccctggcgcggggaatcgtactcggccagcggggtcttcttgaccttgccggaacgggtggcgagcaccaggtacttggccacctcgtagttcgggatggacagcacggtctggatggtctcgtcgggcgcgaactgcagcaggttggccacgtgctggcccttggagtcgcgcgaaccctcgggcagctcgtaggccttgatgcggtagacgcggcccttgttcgtgaagaacagcagccaattgtgcgtggaggtcaggaagaagtgatccaccacgtcgtcctcgcgcagcttggtgcccttgatacccttgccgccgcggtgctgggcgcggtattcgtcggccttggtgcgcttgatgaagccggagtgggtcacggtgaccaccacgttctcttcggcgatcaggtcctcgacgttcatctcgccggagaacggcaggatcttggtgcggcggtcgtcgccgtacttggccacgatctcgtcgagctcatcgccgatgatcttgcgctggcgttccggcttggcgaggatgtcgatgtagtcggcgatcttgcgctgcaattcctcatgctcggccacgatcttgtcgcggttcatgcgggtcagcgtgcgcagctgcatggccagaatggcgtccgcctgcacctggtcgatgtccagcagccccataaggcccgtacgggcggtgtcggtgtcttcggaggcgcggatgagggcgatgacctcgtccagcatgtcgagggccttgagatagccctgcaggatgtggtcgcgctcttcggcctcgcgcttcaggtacgcggtgcggcgggcgattacgtcgagctggtggttcacccagtggcggatgaaggcgtccaggctcagcgtgcgcggcacgccgtcgaccagcgccagcatgttggcgccgaaggtctgctgcagctgggagtgcttgtacaggttgttcaggaccaccttcggcacggcgtcgcgcttcaagaccagcacgaggcgctggccggtgcggccggaggtctcgtcgcgcatgtcggcaatgccctggatcttgccgtcgcgcacggcctcacgaatggagacgacgaggcggtccgggttgacctggtagggcagttcggtgaccaccaggcacatacggccgttgatctcctcagtgttgaccacggcacgcatggtgatcaggccacggccggtgcggtaggcctgttcgatgcccttgtggccgaggatggtggcgccggtggggaagtccggtcccttgatgatgcggatcaggttttccagcagttcctcgcggctggcgtccgggtggtcgagcgcccagtggacgccgtccgccacctcgcgcatgttatgcggtgggatgttggtggccatgccgacggcgatgccggcggaaccgttgacgagcaggttcgggaagcgggccggcagcacggtcggctcctgggtcttgccgtcgtagttgggcacgaagtcgacggtgtccttgtcgatgtcgcgcaccatttccatggccagcggggccatgcggcattcggtgtaacgcatggcggcggccgggtcatcgccgggggagccgaagttgccctggccgtcgacgagcatgttgcgcatcgaccaggactgggccatacgcaccaaggtgtcgtagatggcgaaatcgccgtgcgggtggtacttacccatcacgtcgccgaccacgcgggagcacttgttgtagccgcgatcggggcggtagccgccgtcgtacatcgcgtagatcacacggcgatgcacgggcttcatgccgtcgcgcacgtccggcagggcacgctcgacgatcacggagagggcatacgccagataggactcgcgcatctcctgctgcaggtccttgcgctggatgcgttcgccggtatccatcaggccgtagtcggtggtgtccgcctcctgcgggctcaacggctccatcgagccgtccggcgtgaactgctcgtcgccggtgttgttttcatctgccactgttgttcctttagttgtctaagtccgttgtgtacctccctctgacgagggaggttggaggattccgttacgcatcgatccaacgcacgttcttggcgttgcgctggatgaagaggcggcggggttcgacctcatcgcccatcagcatcgagaaggtctcgtcagccgcggcggcgtcctcgatgtgcacctgcttcagaatgcggtgctcggggtccatggtggtctcccacagctcctggtagctcatctcgcccaaacccttgtagcgctggatgccttcgcccttgggcagctggcgtccgttggccttgccttcggcgagcacgcggtcgcgctcggcgtcggtgtacacgaagtcgtgcgggcccttggtccacttcaggcggtacagcggcggcatggccacgtacacgtagccggcggtgatcatcgggcgcatgtagcggaagaacagcgtcaggttcagggtggcgatatgcgcaccgtccacatcggcatcggccatgatgatgaccttgtggtagcggaccttggagatgtcgaagtcctcgccatagccgccgccgaccgcggtgatcagcgattcgatggtgtcggacttcatcatgcggtccaagctggcacgttcggtgttgaggatcttgcctcgcagcggcaggatggcctgcgtgatcgggttgcggccctggatggcggaaccgcctgcggaatcgccctccacgatgaacagctcgcactcttccgggttggaggactggcagtccttgagcttgtcgggcatgccggcggactcgaagatggacttgcggcgggtgttctcgcgggctttcttggcggccagacgggcgcgggaggcctcgatggccttctggatgatgttcttggcctcgttcgggtgggcgtcgaaccagtcgccgagcttgtcggtcatcacgcgctgcacgaaggtcttggcctcggagttgccgagcttggtcttggtctggccttcgaactgcgggttggtgagcttgacggagatcacggcggtcaggccttcacgcacgtcgtcgccggagaggttctcgtccttgtccttgaggatgcccttgtcacgcgcgtaacggttgaccagcgaggtcagcgcggcgcggaagccctcctcgtgagtgccgccctcggtggtggaaatcgtgttcgcgaaggtgtgcacggcctcggagtaggcggtggtccactgcatggcgagttcggcggagatgccgagcttcaggtcttcggcctcgaagctgatgacgtcctcttccaccggcgtggccttgcgcaccttgaccaggtagtcgacatagtccttgatgccgttgaggtactggtaggtgacggtctggtgctttgcgccgggctcgtccgcggcgtcgccggccacctcgtcgccggcctggtcattctcacgctcgtcggtcaggctgatcttgaggcccttgttcaggaaggccatctgctggaagcgggaacgcagcgtctcgaagtcgtagatggtggtctcgaaaatcttcgggtcggcccagaaagtcacagacgtaccggtggactcaccttcggtcatcggctcgccctgcttcaagggcgcggtggggtgctggtcgatgtacgtctgggtccagtggaagccctgacggcgcacttcgatgtccacgcgggtggagagtgcgttgaccacggagatgcccacgccgtgcagacctccggacactgcataaccgccgccgccgaacttgccgccggcgtgcagcttggtcatcacggtctccacaccggagacgccctcgccgggcacctcatcgaccgggatgcctcgaccatcgtccaccacgcggatgccgttgtccggcagaatggtgacctcgatatggctggcgtatccggccagcgcctcgtcgaccgagttatcgacgatctcatagaccaggtggtgcaaaccgcgcgggccggtggaaccgatgtacataccggggcggatacgcacggcctcgagtccttcgagcaccctcagatcggaggcctcataatgctcgggggccatggattcgtcaagttcgccttcggtcaattccgcattgttgatgcgttccgcagccgccttcagctgctcctctttgctggtttcgtctgccaacaggcttccttccgtgactacagggtcaacctccgtcatgaaggtcattcacggaggtgatatggcttacgaggcccgtaaagggctcttctggccatttgaccatactgcatgtgattttactcgtctaacccgacgagcgccatagcgaggcttctgcgaatttgtttggtatcttggctaccgccgccgagcccatttgcgcgtgtatccggcggccggtccggtcacgcgaatctcggcgatggtcaatcctttgagattgcgacggatggtatcggtaagttgggggataaggtaggtcagctgcgtggcccagaccgtggattcggcacggatggtcagtacgccgtccgtgaaatcggcgactgccgaatggctggcgatggcctgccccaccacttggtcccaatggttgcgcaattgcgcaagtttcatattcgccgcccagacgccattgccggcgatggtggtcatcacgctgcccagttcagccggatcgcgccccggtttgccgaagttttcgatggcctcttcacggcggcgtctgtagtccttcaaggtcgccccgcgacgggagagccgctcgaatatttcggccggcagtttggtctcgtccaggttgagttggcgggcgatcggcgggttcatgacgctttccgttctacggacgcgctgtccaccgcgggttttccgtcatacttacccaaactctcgttttcccgcgaatcggacaaattgcccagagttggcagtattacggaagcgggttcggccagtgtggccacgtcgatgcgatgggccgattcatagtcgggcacatcgccttcagcggccacggtaatcagcacctgatcctgttttctggcgaaatcaagaatctgcgtgcgccggctgtcgtcaagctgggcgaacacatcatcgagaatcacaatcggctgcaatcccaaccggtcacgcacgatttcaaacaatgccattttcaaggccaacgccatcgtccacatctcgccgttcgaagcgaactcgcgggcgggaataccggccaactcaaggttcatgtcatcgcgctgcggaccgataaggttcacgccgcgagccatttcaccggggtagatgcgttgaaaatgctcgctgatccgcggatgtggatcgtcgaacatcagcacttcgtcgaatgaaggcgcatatgtgagcgtcacctgctcgccggcaccggccaagtcggcgtaaatcgcggcaaatggctcggcaagcagaccgatcacatgagcgcgcatacgggtcaacgccacaccggcttcgatgaactggccggtccagatttccaaaccgctcagaaccgcatccatcggctgtccattgttggcattggcattcaattgcttcaacaatgtggcacgctgtttggcgatgcgcgtgaactgttgcaacgtctgcatgtatccgggctcgagcagagccgcagcctgattcatcatgacgcggcgtgctcccggatcgccggacaccaatcgctgatcttcgggagtgaaggaaacgctgggaatcttgccgatgatatcgcgcagatacagcgacgaccccgagttgatgcgggctcggttggcaccacgcgcatgaatcgacgcttcatacgtagtggtttgaccggcatcatcagcgacgttcgcgcggatggtggccgtggtctgcccgcgttcgatcagcggcaacgtgctggacgtgcgatggctcgatccggtggacagcacttcgacggcttccaccagattggttttgcccaagccattcttgccgaacaggatattcacgcctggtacgaaatcgaccactacctgactccatgagcggtagtggtcgagtgcgagacgggagatgcgcattatcgaatcgttggaaattcagggacttcagttgttaaagcgcatcggcacgagcaggtatcggtagtccatggactcgtcggaatcagcttcctgctggccgttgaactcgaccggcttgaccggggtcgtcatcttgatgcgcacgaatggttcggtcacggcggacagaccctccttcaggtaggacgggttgaatgccacggtgatgtcgtcgccatccatgtcgatgtccagtgtctcgttggcctgggcctcgtcgaccgatccggcggacagcgccacttcctgaccggtgaaggtcatgcgaatcggagcattgcgttcggcgaccaaagccacacggctgatggcgtcgagcagatcctgcttgttgactacggcctgaatcgggtattcgtcggcgaacaggcggtcgaccgccgggaattcaccgtcgatgagctgggaggtggagacgcggccggcgttttcgaagccgagcagcgtcgggctgtcggcgtcgaaatcaaggcggatgttctggtgctcatcaagagcgcgggccacatccttgagcagggagccgcgaaccagcgtggtggtgtcgacgtccgggttctgcggagtccaagtgaaggtggcgcgggccaaacggaagcgatcggtggaggtcatgacgaccttgtcgccttggaattgcatgcgaacgccggtcagtaccgggcggttttcttcgcgggagacagcaacgcatgcctggttcactgcctgaacgaaagtcggagcatcgacttggccgagcatggccggtaccacaggcagatccgggtactcggtgtcgggcatgagctgcaaggtgaacttcgacttgccggacgtgatggtcagcgtggagccgtcggtgaccaggtacgttttctccgaacgcagcgatttggtgatatcggccagcagcttgccctgaaccagtacggaaccggcttcgtcaacgccggcttcgatgtggtggcgagcggaaatctcgtagttgaaggcggagaattgcagcgttccgtcaatggcttccagcttgacgccagcgagaatcgggttggagggacgtgcgtcgatgactcgggaggtccaggctacggcgtcggccagggctgcagtatcgatttcgactttcatgtgtgattgttcccttcgtcggattggctgagaaatattctagccgttaggtggcgaacttacgtacgatgggtgactggctgttactgtggcgatgatgcttttcacgtaactgagtaagtaatcgtcgtaataaggccggtggatagtgtggataagtaggggtgagccctacaaatgcaacggttcataagtccctgaaaattgtggacaaattctgcatggcttgtggataagtgggcgagttttccacagccagttcgtcgaatttgagttttccacatcgaggtcgcggttatgcacgagttttccacaacaaaacagtgggtaatccacgagttatccgccgagtttacccacatctgtgcacaactgtgtggataacttttttggttttcgtactttcgcacggcgtgttgaaggctgtttttcgtcgaggagaatcgattctggagaccgttttcggcacttttttcgtctcgctcgcccaaacccgcaaaatcggtcctcagaatcgattctctcgtttcatgggttttttgcgtgttccccttcgatactcccctcagtcgtctgcgacgacagctctcctcacaaaggggagccatgaggaatctgatgtctcgaatccgttgcctcgacgtatccaccagaatccgcctgagcaaccaaaaacggcacttttcggaaagtcagtccgaaaagtgccgtttttcgtctctcagaagcgttgtgtcagttggtgttgctttgcttgaggcgaaccgtgagctccataacgtagttatagatctcctgtttttgctgcattcggtcactgattcgagtgcaggcatgcattactgtggtgtgatcgcgcccgccaaagacctggccaatatccatcaggctcatactggtcatttcgcgagccagatacatggcgatctgacgaggaacagccacgtttttggttcgtgatttaccgacaagatcctcaaacgtcaggtggaagtacttcgccacctgactgatgatgtccgtgggcttgatttccacatcggtggtgaagaagtcctgcaacgtctgctcggccaaggcgcgggtcaccggctgattactcagcgaggccacggccgtaacacgggtaagcgcgccctcaagttcgcgaatgttctcggtgaagcgttcggcgatgaggtccaacacatcgctggggattttcgagccgttcatcgaggcgatcatgcgaagaatggcgattcgggtctccagatccggcggcttgacgtctacggtcaggccggattcgaagcgcgagatgagtcgagcctcgaaacccttcaaattcttgggtgccacatcggaagcaatgacaatacgcttatttgcctgatgcagtgcattgaacgtatggaagaactgatccaaggtggcttccttgccgccgaggaactggatatcgtcaataagcaacacatcaacctgtcggtatcgacggttgaattcagcaatctgaccctggctttggttcgggttttgcagcgcgtcgatgaattcgttcgtgaattcctcagacgtgacgtatcgaacctttagcccgggatccttgaccagtgcatagttgccgatggcgttcagcaagtgggttttgcccaggcccgatccgccatagatacacaacgggttgaaatcctgaccggaaccttcggccacggccagtgcgaccgtacgggcaaaacggttggaatcgccgggcacgaaggaatcaaacgtgaagttcttattgagatgagtctcgggatcgcgattcatcttctgctgaccgaccgggaactgcgactcggtggcgggcatcggttcccgcggtgcggctaccggctttgcaccataggattctttaccgaactcggcgacggtcggagaaatttccgaaggatatggctgcgccggctttgccgccgaaagcggttcgggctcggttttcggcacgaccttgaacgcgggaaacatattttcgccggttaccgtacgcaatgcctgaagcagggaatcgttcaaatcaccctgaatggcttgaagcgtatcgttgttgtccacacacagcacgatggtcgaaccgaagacgccttcaggaacaacgccttccaaccagcctttttctcgtgggctgagcgaagcgctgtgtttgagcaccgtcagcgtgtctgaccagatgtgggcggcctcaattacggggtcgccggaagcgttaaccatggtggccccttctatcggtgtggcgaaatctgtacaacagataatatttactctggtttagacaagttatccaccgtgtcgcgtgttgaaataactggattgtgaataacagacatgtaatttgtggataacttttggccgtgaatggttggtattccgccgattataagagatttgaggcgtgtctcgcaacgtgtcgaaatgtgaaaatactccgtccgttttgacttgagggtaggggtgagagtactttggtatagcttgactcacgtgagggcagcgcgaagcgttgccgaatagacctaggagcaatggattatgaagaggacgttccagccgaacaaccgtcgtcgccacatgaagcacggcttccgcctgcgcatgcgcacccgttctggccgtgcggtgatcaaccgtcgccgtgccaagggccgcaagtccctctccgcctgatcattccgatcagtgccacaggcatagtcgaggtggagcggcttcaaagccatcgtgatttcgtcaccgtgctgaaacgccggcgcaaagcaggtggcaaggatatcgtcgtgcactatttggtgcccgacgaccatcatgatgatgacgaccggacggtgcatcgccgtttgggattagctgtctccaaatcggtaggacatgcggtcacccgtaatacggtgaagcgtaggtttcgtgtattggccagagcccatgaggatctgctgcccgcgcattgcgatatcgttttgcgcgccaagcccagtgccgcgaccgcatcgttcgcttcgctagatcagcagatcgcgaaggcttttgccacagtggcgcataaggtggctgaggcatgacagcttctttcaaggcggtgatgattggtggggtgcgctggtatcaacagcacatctcggcaaacacaccgccttgttgtaagtattatccaacgtgctcgaattatgccattgaggcattggaacggtatggcgcgttcaaagggggagtgctcgccatgctgagattactgcgttgccggccgtggagtcgtgggggaatcgacgatgttccacaacggtattccattttttacagattttcgtggtcgaaggctcatgaagagccccgactgacaccattggccacaacccaaagagaggcccaacgatgaactcaaatgaatttctgcttgatagcgggttttggggatttctatataaaatcctgactcccgttgagtggttgcagacctggatcatgaagatcgtgcatgacttcttcgcgatgctgggcatgagcccgattggtgtctcatgggtgcttgccattatcatcctggtgctggtggtgcaggcgtgtatcttcccgctgttctgcaagcagatgaagtcgatgcgcaagatgcaggcgttggcgccgaagatgaagcgcatccagaacaagtacaaaggcaagacggatcaggcttccaaggaggccatgagccgtgaaaccatgaaactgtatcaagacaatgacgccaatccggctggctcctgcttgcctatgctcattcagggcccggtgttcatgtccatgttctatacgctgtcggccattccctacattgccaacggtaaacgcggtgcgttgggcgcgttcgacgtagcaaccgccaagcaattcacccaaaccgatgtgttcggcattgtcagtgtgaccgataacttcacccgcgcatctactgcaggcaaggtggtcatcggtaccttcgtgttcctgatgtgcttctgcctgtggtttatgcagtacttcaacatgaagcgcaacatgcccgccgcatcgatgaacaaacaggccgagaccatgcagaaggctatgctgtggctcttcccggtgatgtacatcttctctggtgccaccatgccgttcgccgtgctggtctactggctgaccaacaacgtgtgcaacctctgccgcacattgtggcaggtgtacgcattcccgacccctggctctccggctgcggcggacaaggagaagcgcgatcatcgtaatgagaatgctcgccgcgcaaaggccggcctgccctctctggaagaagaagcattggccaaggccaaggaagaggctgagcgtaaggccactcagggctatcagcgtcaacagcccgtgcgtaagcgcaaaaagaagtgacgaccatgtcggtgcgcgttcgatgtttcacgtgaaacattcaacacgcaccgacattactttctctgttcgggggagcagggcttagacttggaattcaaacacgacatgaaggagtagcgtatggcacaggatgacgtgaagtcgatcgatcagctcaacgaagaggctgacatcgccgcggattaccttgaaggcctactggatatcgccgactatgagggcgacattgagatgggcgtgcgtaatgaccgccccaccgtgcaaatcgttgctgatgacgataccgacatcaaacatcttattggccataatggtgaagtcgttgatgctctgcagcaattgactcgtctggctgtacagcagaagaccggcgagcgttctcatctgattgtggatgtcgacggtttcctgaagcgcaagcgtcagcacctccgtgatatcgccctggatgccattgacgcagtgaaggattccggcgagccgtatgatttgaagccgatgaattccttcgaacgtaaagtcgttcacgatgtggttcgggaagaggggctgaagtctcgctcgcacggtgaggagcctcatcgttacgtgacggtgtatctcaagaacaaaatcgaggatgttgccgaagacgacgagcttgatcaggagtaataggtcgacgagtttttgagatgacaaggacgttcaacggatgtcgtctctaaacaaacaagagtgaccgtagggagaatggcgtcgtaatgagcgacgccttttccatgttgattgtttcacgtgaaacatggtgagggagatggctatgacggatcagctgcaggggtcacctgtacttgctgaggtcttgggtgatgcgttgccgaagttggagcgtttccatgccaagattgccgaagagggtgaacctcgtggattaatcggcccccgtgacgtcgatatcatttgggaacggcatattctgaattccgctgcgattgtgccgtacgttcggaatgtgacgaatggtattcgcttcaaaacagttgccgacgtcggcagtggtggtggttttcctggattggtggctgccgcgtgtttgtctgatcatgacttcacgctgattgaaccgatggagcggcgaatcgaatggttgcatgaatgtgttggcctgatgcaactgcagaacgttgagattattcgtggacgctccgatgccgtcatccagcaggtacggaagcgggaaattcatccgttcgctgttgtcacgtgtcgtgcggttgctcctatgaccaaactctctggctggacgttgccgttgctgaaaccgtcgggacagttgatcgcactgaagggacggtctgctcaggctgaaatcgacaaggctggcaaggagattgcaaaattcggtggtcgtcgtccacgcgtcgttgaggcggctgtcggaccggatcttgagcctacccacgtggtgattgtggataagcgatgagtggagtactgattgagttatccacatttccatatgtgcgtaaaagttatccacatttttacgggacgatgtgcagaatgatgaaaacactgatttttcaatgtttttcgtctgcgaatacataatctaacactcaacgtcattcacacttatccacacttatccacattgcatatcgcaattgtggataacgagcatcatgtccatacgaatgagaacactggaacttacgtctgtgcaaggaggagcgatgtccaccaaggatcatcagtcggaacctatagaatcggcttccgaaacgcttcagcgaatattcgatggtcacggttcagtgcttggcagccagatggttgatgaaagctcacgctacgatgtactcaagaaaaccgatttccccaaacctcaacgtacccgtcgtattgccgtggccaaccagaaggggggagtgggtaaaaccacatccacggtgaacaccgctgcggcgctggcgaacaagggcgcgcaggtgttggtcatcgatatggacccgcagggcaatgcctctacggcgttgggtgtatctcatgcatcgggagagccctcggtctatgacgttatcgaggggcgttccgatctgggtgatgttatcacggtctgtcctgattttcccacacttgatgttgtgcctgcatcaatcgatctcagcggtgccgagttggaagtggctgatctgcccaaccgaaacacattgttgaaggaggccttggacctctacctgcgtcaatcagataaacactatgattacgtgttcattgattgcccgcccagcttgggcctcttggtcatcaacgccatgtgtgcagtgaccgagatgctgattcctatccaggctgagtattacgcattggagggtcttggccagctgatcaacacgattggtttggtacaggagcatttcaatccagtactgctggtgtccaccatgctcgtcacaatgttcgatcgccgaacgctattgagccgtgaagtatataacgaggtcaagggacactatcccagcattgtgctgaataccaccatcccgcgttcagtcaagatctccgaagcgccgagtttctcccaatcggtgattgcctatgatcctcgtggcataggtgccatatcgtatggtgaagcagctttggaaatcgcacagcgttcgcaacaagtccttgacaccattgatgcgaggaggaacaagtaatggcatcaaaatcacgactcggtaagggccttggcgctttgttccccacattgccaggggaggagccagtggcggagcagcccgcaatgattgaggaggattcgtctactccggcggctactgctgacataacccccgccaagaaggctactgcccagcaggaatcaaagcctgccgtgcctcagatggtatcgtccagcaaagcagccaagaaagccgccggtaaacgcgcatccatgcccgcattggacaccattactcatcctagcgacctgtttttcggtacggagaaacctcaaaccggtaaggtcgccgcacctcagcagggcggcaagccgtctgcgtctcagacggcacatcgtacatccgtcaccgtcaaagatgtttcacgtgaaacatctcagactgcatcggcggcaaagaccgctgacacagataagaaggacgagctcaagccggtagccggtggttatctggctgaactcaaactgtctgatatcgggcccaatgcacatcagcctcgtaccatcttcgacgaggatgagttgaatgagctgtctgcttccattaaggaagttggtgtgctgcaaccgatagtcgtgcgcaagcgtccggcaagccagattgctgcggccaaagccgccaagcacgacgagacggaatccagcacaaatccgtttgccggtcatttggacagcccgtatgagctcattatgggtgaacgtcgttggcgtgcatcccagttggctgggttggagacgattcccgccatcgtcaaaaccactgcggatgatgatatgctccgcgatgcattgctggaaaacctgcaccgtgtggccttgaatccgctggaagaggcggctgcctaccagcagatgattgaagagttcgggttgacacaagtacaactgtccaagtcggtgtccaagtctcgcccgcaaatcgccaataccttgcgactgctgaatctgccggcatctgtgcaaaagagagtggctgccggtgtgctatcgtccggtcatgcgcgtgcgctattgggcctgagcgatccggaggaaatggacaagctggcttctcgtattattgcggaaggtctttctgtacgcagcaccgaagaaatcgtcgccatgaagattgcgtcgggggagcagccgaagaagcccaagacgtccaagaccaatccttgggttggttccgccatccagcagagtttggaaaatcatttcgacaccaaggtgtcgattaagggcagcaccaagcatggtcgcatcgaaatcgtcttctcgtcaccagaggatatggatcgcatcctgcagctgctggtgccgagccaaggcgatgccgattccaaatgggtgtaacacgataagaacattcgtgttgtcgccggcatcgtcagtgacaacaccgatgcttagcgttgtcacttggcattgtatcggcttgtcactgtcgccggcattattgctgtgcagtgcgttgtacgcgcaagacgttatagcctctgcgtgattcctggcaggggcgtatgcctgcgttgtagcccctgtcgcaatagaaaacccctcaggctggagggacaatcacacatcgtgattctccgtcgcctgaggggcctttctatgcctttgaccggtgcgtactatccaagggcggcatgctgtaacactgacctagcgctgctcctatgtcacaggcagcagtcagaacagcaagccatcatcaggtcgccgcaatcagtccgtaagataggcctgcgcatccagcgctgcacggcagcccatgcccgctgcgctgattgcctgacgataagtacgatccacgcaatcgcctgcagcaaagatgcctggcgcactggtcaccgtgctggcaccctgcaccacgacatacccatcattgtcacggtccacaacaccagctgcaaaatcagtggctggcgtatggccgatagccacgaatacggcgttggtgtccagcgtgctttcttctccggtcaccacgttacgtacggcaatgctgctgacactggccggtgccacagccggtcgtttgattgtcaagccaggaatggcaataggtgcaccggtgttctgtgtgggggaggaggtgccggtaatggaggtcaccactgtgttggtcagcagggtgatggtcggattggctttggctcggtccaccatgatctgcgaggcacggaagctatcgcgtcggtgaatcaaggtgaccgaagaaccgaaccgggtcaggaataatgcctcttcaaaagccgaatcgccaccgcctacgaccacgataggcttgttcctgaagaagaagccatcgcaggtggcgcagtacgagacgccatgtccggacagctcctgttcgccgggcaccccaagcttacggaatgacgaccctgtggcgatgatgagtgctgatgcctccaactgggagtcatcggagagcgttacacgataggtcggcttgaccgaatcactctcacacgcctcaatggaagagacatcgtctgtgatataggttgtaccgaagcgcttggcctgttccttcatgcgatccataagatccgggccaagaataccttccgggaatccggggaagttctccacctcagtggtgttgaccaactgtccacctggcgacaacgcaccagtgaccataacaggattaagacctgcacggccaagatagatggcggccgtgtagccagcgggaccagaaccgataatgatgacgttatgtttcacgtgaaacattgtcacacccccatacgatattccatgtcattcagccagacgcgaagaaagggcggcaccgtcgaatgtatgcgaacggtaccgcccttcttgggtcagttatcggtatagatgccgattagaagacctccaccttctcgatgtacagctggttctgcggcaggctacccgatggcacccacagcagcagatcctgcgtattgacggctttggtgaacttcacctcagtagtgccaccttcagcaaaggtgaattcggccacctgctcgccctgagtggggtctccagtggtatttgcgcgaatatagcccttaccaccggatgtgcggatggtgataaccatgcggtacgcatcctgcggctggtcaaggtgcatgtagtatgcgtacccggattggccgccaggattcgacaggaagttggcgctggaaatcgtaaacgccgtgttgttctcatggcgcggctgcggagcagcgctggaatccttatcgccggacttcttggccttggtcttcttggacgacgaatcagcagtctcggacttcttggacttgtctgatgccgagtccctggattcgctctgagtggcatcactcgactttgaggaatcgtcagtggcgccaccgttcgtcgcgttcttgctgccaccgaatggcacagcgtcagcattgatatcgggccagtcaccttcactggagttgctggaagcatcggcaggattgtctccggaggatcggaacgcatgcactgcccaaacagccgctgccactaccaatatcagagccacaatgatggcaacgaccttggtcgacagtttgccgaacagatgttcatcgggcagcttgctgtcatcctcgtcatccggcacatccttcggtgtgaagctcggaggaatggcgcttacttcggcaatgcgggcctgctcctcttccaaggcacgcagcgattcctcaccgggggccacagcacggccgctgacatcgaacacgggaatacgactggtcgtctctcccacggtggcatcggaaataccgccggtaacaataggcaccgtcaaccgagtattatcacccggaccgccgatgggggccggattcatttcgctgtaccagtcaccggtgtcttcaccggaaagattctcgtgctcccaggcgtcagaaaggttgaagtcaaacagacggcgggcgtcagattgagactggttgccgtcagcagtactggacccatcaggcagaggagccggtgacatcgcgtgcggagcggggacggcggccggctgaaccggcagggaaggggcaatagacaattccggaagactgctgctgttaatcaacgtgctgggaataggcacgatatcggtctcgttggcgggcttcagtatcgccttggtaatcgagcaatcgctttccacgctcggcaaagcgatatcagcatcgctcagttcagagagcggcttccaattacccaacaaggcgtcgagttctacaagggcagccatcggcaacgtgtgctcgtcgggcttgcttaaggccaatccacgcttgcaaatcacgcggaattcgccaggggtatcttgcggcaaggcgcgcagattgaatgtgggtgtcgcttggcttggcgtgcgtgtcagcagggcatagagcaatgccgcaagctggcgaatcgcataccgttcaggaccgtccgtacgcagatcagtagcggacgtgtcggccagcatcgtggcacatggtgcatcggcaatctgcacaccggaggtagtcactcgaacggtgtcggttgtgatgacgatgctgctgggagtatccgcaatgacctcgcgcagcacgttggcgcattctccgataatcgaccggatggcgctgtagctgagcggcttgtcggtatccaccatgtagtcagtcaggcattggccgctgtccaccggcatgacaatgagaagtacgtcggattccatacggtatttcagtacgggaatcacacgatcagggcgagtggcggcgatgcgaccagcgagctcatcgattgcggcgaaagcgctgcgattggtaatgatgaacagctggcaatcctttgccagcacacggtcgttggctttccatgcctgaatgccaggctcctcacgcaacgatgataccaaggtgtatcggttgagaatcgtgtctccgagttgcggtttcatagtgcgttcggctccgtgtgattggtgttcgagactggtcttagatattctacgtgtggggctatccttgacgggctccgtctcaggattgatttgcgtatcgtcgactttttccggctgggctgtcacagcaacgtcctcactggccggagtcttgtgtagacgggccagtatcgagtgataggcgctgatgagttccggggtgcgtaccacccacaacacagccacatatactacggccagcacgatggtgagcaccacgcagatggccagcgcagaccaccagctcatgtgcccgcctaccgatcgaatatccgcgccgaacagtgcgactaccggtcgtttgatcagccagaccacaactccggaagccagtgccgccacaatggccttggcatatgtcctcgtgatctcccgaccgccaagattgccttcgaacttgcggcgcaacatcatcaacgtcagcggcaacgccagtaatccgccgagtgtcaccgagcaggcgatgccgagtacccaatgctcaggaggaagtaccatcatgccaatcatcatgaataccgaggtgaacccatactgcatcaccgcggacaagaaggggtgcaggccgtcctcaaaggcatagaacgtgcgctggatcaacaggaacgccgatcccaaaggagtgcccacagatagggcgataagcgcgtaggaaatcagcatggtctcgtccatcgagacggacggaagcaatgcgcggatgatcggttcggggaacacgaccatggcggcggcgaagaatatgatcagcagccctacgttgttcagcgcgctcaccagatcgtgccgtgcctcatccagattcgcagctgcgacagaacgggagattttggggaacatagccgtggataccgatacggcgatgagcgaatagggcaggatgaacagtgtgtacgcattctgataggtcgcgttgcctgccacgctgaacaggctggcacccgtcagttcgtgggcgcgctgcggtgcggatgtggcgatacgggtaaggataatgccgcagatctcgctggtgaccaccacgcccaaagagcctaacgccacgggacccatagacctgagtccaaagccgccaagcccgaagctgggtttgtacttgaacccgatacgggccagtggcaggaacagtatcagcgcttggaaggccacgcccaaagtccaggtgcctgcggtaagcgcgattttgtcggcggtccagaattcgaggggctgttcattggccttgctgaacagcagaataaaaccagtaaaaccggcgcaactaataatgttggcaccggttgagctccacgcatacgtgaggaaatggtctttggcggccaggatctgacccaataccgtatacaggccgtagaagaacacctgaggcatacaccacagggtgaacgaggtggtcagggctatcatctggtgatcgtcgctacccacgtacaggcgggcaagcagagggctggccgccgccatcaccacggtcatggccaacaggatgccgatggccaacgtaaccagacgattcagtcgttcttgggcgtctttttctttcaacgtgcgcacgatctggggcaccagcacggcgttgaagatgccgccggacaccagcgtgaacacggattggggaatcatggaaccggcctgataggcgttggccgccaatccagtggtgccgatggccgcagcgagaagaatcgtgcggagctgaccggtcacacgggaagcagcggttcccgtggccatgatcagggaattacgacctacggttgaactcattcgtcggggtccttcttccgatggaactgccgccacaggccgataatgcacagtagcacggcgaagccgatgataatgaaaccgctggcatcactgacgcgcatcacactggtgatcgcggtatcctgcgtgttgccgaagctgttgccttcccggtcgctcagcgacacatgggccgtcgatgagccggaagtggaaacgcggatggtgaaggtcacctgagcgtcgctatgcgcgggaatatcgatgtcagtggttcgcgaggtgacgatctgcatggagtcagtcagcgagttgacctgcacgctgacggcataaggaaggtcattgctgacggtgattggcattttcgcggattcgctgaacacggatattgattccgatgggttgatgcgtacgccgttcagaagatcgctggccagtgttttcgcggctctgaccatggcttttcgcgtggctgtcggctggggggagccagacatggatcgcagcgccatatcgtcatgcagcaccagcaaagagccaatccattgcgtcggatcgttgctgtgcgagacggtgtcattggcatcctgccgggccagggcctgcggggccaacgacgagacctcgtcggaatcaatctcgttcttcaatatggaggtggccatgcgcatgatgtcatgccggctgtcggccaactgtctcaacgccgaccgggtattggcggtgttggcatcatcggccttgtcgggattgaccgaatcgctgacattgtacggatcggcctcggccatggtcttcaggtccgtcagattcaaccaggacgcctgctcgaaggcgctcatcacctgatcgatccagccggcctccgtggtgcgggagaacgtcataagcaggtatcgggatgtatagggctgttccatctggtagaacgcgctctgagcgaccagtcgggccaaccgaccggcatcgctggactcggcctgcgcgtccgtgctggtggcttggcccttggccagcatgcccaaggtcgattgctccttcagcacggtgacatcgccggcaggcgtatccaccacgtaggtgcctgtgtgtacggcttcagtctggtcggcatcgaaagaggcatcggcaatcaccgtgtcatagccctgctcgcgtgccgcggtcagcgcatccaacgtccaacagttgttgccctgccatgcgtacgcggagggtgtttcggagtcgtttccggcggcataccatgcggccgcctgcttggcgttccactgttcagtggtgatgccggccttttcgtaggccgcggtatcacccagcgcggtataggcggtgatgtcaaagtcggcgggctgcatgatgccggcaatggacggttgcactgcggactgacgccaatacagaggatccgcgatcacttgcagcgagcggtgcttggcgaatgtctgcccaagggatcgcgcggtatcggcatcctgcccggataaggatatggcttgcgtatcagtggctttggccgcgttgccggcgtcggcgttatcggacttgtcggccttgtccgtgctgttggacttggacgatgttgatgtcgaggaagtggtggtttcggcaatgcgattgctgatggccttgttatcgacctgccagccgctggcggtgtagggcatggccacggtcaggttcatggccggtgtcgtcgcggtgttgagcccatccgaagatcgggtcagaaaactcggcaaatcggcgagtatccgattgccgacgatatacgacagcatcagcggcttcggcccccagctccctatggaggcaagggtctgctgattggcgttcacctcgatggtgacggtggcagtgccgccggcgggaatcgatggcacgtcaacggaacccaactcgttgggggtggggatgggggcgttgttctcggcccaattctgaatatcggtgcgcgagacaaaggtgaacagcgtattggtggtcaggtgcagtgtgccgcttgacgtggccgtgctgtccgtattgctgatgaccgcggtgacatgatagcccgatttggaggtgacgatgggggtgctttgcgtgatggcaatgctctgcttgggctgattctcggtctgattgcccgttgcgtccgtcgtatcggatgaatcagtcgtgtccgtcgtatcgttcgcgtagacggtcaatggagcggccagcatcgccacaacggcgacgccagccgccagtgcgtgtgccagacgtgtgcaatgtcgtaagactccgggtaggttcactcgtttgcctgcctgttcttcttcctggcgtagagccacgcgattttgcgttcgttgggatagctcaacacgtcatccaaatcttcaaaacgtacccagatggcgtcttccgcctcatgatccgggtctccttccaccgtcagttcgccgccggtctgtttgagcgcgaagtgatggaccagcttatgcacgcgctgcgtggtgccggtgaaccagtagtcgatggtggcgatggaatcgatcacctcgcccaggatgccggtctcttcatgcacttcgcgcacagcggtctgctgcggggtctcgcctttttcgatatgccccttcggcaagcaccattcgagatggccggagcgggaatgacgggcgataatggccacgcggttctggtcatcgaaaatcagaccgcctgccgaatattcgcgtacgaccggcagttcctgggcatccagtgaagcgaatgtggtcggaccgtccgacgtacggcgttgcggcatcatggccggagtcgggctggatggcgttaccggttctactggcactgccggttccggcgaggcaacatccgcggacggatgccggccgaagaccgtggccggcgtgggatgcgctgacgttgcgggcctcactggtgctgcagacggcgctgagaccggcatggtgaccggcgttgcggccggtgcggtacgtgccgcaggcggcatcagcacgtcgcgcggagtcggtatcgctgcggtatgcgcggcggcggccttggcgaccgcaacggcagtatctacggccgcgtgggcggtcgccgcggaatcgttcgtgacgatggttacggacgtttgtgccgtggcgataatcggctcgacctcggcaatcgtctcggcaccggcctcgccggcgataccatcggcctgcccctcgatagtgccgctggtagtggcgatggtgacggtggcatgcatgccgaagacggtggccggtgtgggcatcatcggcttcggtgtgggcatgtcgctggcggcgtccgatatttcggattcggatggtgcgggtgtgccgggcgttgcgggtgtgccgggtacaccggaatgttgcgcagtcggtactgcgtctacttcgtcttgatgaacggcctgattggtggagtggctcgcggtgccgccggcatcgggagaatcgcccaaatcggcggaatgatgcggagtttcggacgtatacagcaggtggtcttgggtatggctatccgccgaatctggtgtttgccccagtatgcgggcaaggtcggcgggcgtaatcatattctccaccttactcaaccccgtgtgcaggtggggtaacggtatgctggtagggcagaaaaacgtcgcacgcgggaaggtgcccattgaatttcgaagtatggcccgaagccatcgaacttggtcgactgttcgccgaacagggttacgagctggcattggtcggcggcccggtcagggatttgctgctccatagaaagagccacgatttggacttctgctcatccgcacggcctgagcagttcgagccgatactgcgccggtgggggcatgacggcttctgggacatggggcgcaagttcggcacgctgggtgccatgcgccgccgcccggacggcaccgaggtcaaggtggaggtcaccacctatcgctccgacacgtacgacacggactcgcgtaagcccgaggtcaattatggcgacacgcttgagggcgacctgtcccgccgcgacttcaccgtcaacgcgatggccctgcgtgtgcccgacctgcaattcgtggacccgttcggtggtgccagcgatctgtccaagggcgtgttgcgcacgccggtggacccgcgacagtcctttgacgacgatccgttgcgtatgatgcgcgccgtgcgattcgtggcccagctgggcttccgtatcgcgccggacgcggccgaggcgattacctcgatgcgcgaccgcatcgacatcgtatccgccgagcgcgtgcgcgacgaactgaccaagctgctgctctccgaccgtccgcgcgccggccttgaggcgttggtcgaatccggtcttgcggacatcgtcttcccggagattccggccctgcaattgcagatcgacgaacaccaccgccacaaggacgtcttcgagcacacgatgattgtgctcgaacgcgcgatcgccctggaaaccggcccggacggcccggtgcccgcccccgacctgacgctgcgcttggccgccgtgatgcacgatatcggcaagccgaagacccgccggttcgagccgggcggcaaagtgagcttccatcaccatgacgcggtgggtgccaaaatgacccgcaagcgtttgaaggcgctgcgttttgaccaccatctggtcgaggacgtctcggaactggtgaatatgcacctgcgcttccacggctatgtggacgagccgtggaccgactcggccgtacgccggtatgtcaaggatgccgggcacctgtacgagcggctgaacaggctcacgcgcgcggacgccaccacacaaaacaagcgcaaggcgatgatcttctcccaggccatggatgagatggaggagcgcgtccgcgaactcaagaagaaagaggacttcgacgcgatccgcccggatctggacggcaacgaaattatggagttgctgggcctggagcccggcccgatgatcggccgcgcctacaagcacatgctggaataccgcttggataacggtccggtggaccacgatgtggccgtcgaagaactcaagcgctggtacgccgagattcagtagtccgatactagtccgataccaaaaaaccgtacgctgaatacgtgtcagcgtacggtttttcgcgaagatgaagctgtatgcgccttactccgccgtgtatgcgtcgtgtttggtgtcggcgggcagcttggtcatgctatcggcggccttgcaaccctcgatattggtgatggtcttaccggattgtggggaggatttggtgtcctgcagatcgttgaacgtggcgccgatgaccacatcgatgagttgatcctcgcgagccgtcatgatcatggtggcgtcggtgaaattgccgatcagcgtatacgcctgattaatggcgttcttgccgaagtagatggtggtgcgttcaacgccggtgctggaatagttatcgattttctgcacgctgaatccacgattggccaaagcctcacccacggccttggcgaattggccgtgagaggtgccgttcatcacgcggatgccgaccgaagcgttggacacgtattgcgctttgccgctgctgtccttgaccgcgcacggtgccgcgttgccgtaattcggctggcgggccggagtctccacttcgccgaggccgaaaacgtggaaattgaacagtagggctatgaccagcactactgccaataccgcgccgctgatggaaaagacgatggtctggcggtggcgcacgtacgccttgcgggcttcacgttcatcaacctgatacgtcatcggtggacttctttcatgggtcgggtggctggttgctaccttagcgtcactgtctgacgccgatattggggtgtgcgggagatttggctcgaataatgcgatcgaccacagccgtatcgcgccacacatcgataatgcgttgtgccgctgcctcgtcggcggcgaaagcgaccactgaggggccggatccggagacgaatgcatggctggcacccgcctgcgtggcggcgtcgatggcctgcccgctgcggggatgcaggctgattgccgcagcctgcagatgattgcggtcgccttctgcggctcccacgaggtcaaaggtgtggtagacctcaggagtgctgagttgcgactggtacgcgccgaccaatacttcgccgctgaatccctgttctatcagcgccagctcatcgcggctgccgggggcgatatccgtgatgcgttcgccgaaaccggtgccgtatgcaaggccaccggtcaggcagaacggcatatccgcgcccaacgtggcggcaatggtgcgcagacgctctataggccagttcagctcccagagacgattgaccgccagcatggtcgccgcggcgtcggctgaaccgccgcctagtccggcacccacgggaatgcgcttggtgatggtcaacgccacatccggctcgcgctcggccgcctgggccatggcgaagagggccagtaccgcatggttgcggcgcatgtcgctgcgtgaggaggccaagtcgcccaaataggcgccttcgagctccagagagaatcccgctccgggttgcttggcggttgcggtgacggtgtcgtatacgccgattgcacagtaggtggtgtccagttcgtggcgtccgccccattcgtcgtgagcaggtcccacttccaaggtgagattggttttcgccgggcaatccaccgtaatggtgatgggggagagctcatcgaactgatgtcgggcatcggctgggcgtggatgtgagattaccggactcattgtgcctcatctccatctccacacgattcgatggccttggccagagcggtgaattcggcgatggtgagcgtctctcctcgacgggtcggatcgatgccggcgatggagaatgcctcggagggcgcaatggtcttcaatgccgcgtgcagggtcttgcgacgctgaccgaacgccgcatcaatcagacgaaatacgagttcccgttgtgcgccgccgtcggccgtgctgttcgaggctcccggggcggccgggtcatcggcctgataccgggtgaatctgacgagcgcggaatccacattgggagccggccagaacacattgcggccgatggtgcccacccgttcggcggtgccataccaggcgagcttcacgctcggcgtgccgtagatcttggaaccgggcttggcggcgagtctgtcggccacctctttctgcaccatcaccaagaacgagccgaggttgtcgaaacgctccaacagcgtgagcagaatcggcgtggccacgttgtacggcagattggcgaccagcgtaaacgatgcgtcatcgctgaaatcaggcacgttctccggggtgacggttaaggcatcccgattgacgacggtgagtcgtgacgtggcttcgggcatgaattcggcgactgtgcccggcagtcgttcggccaacggcggatcgatttcgactgcggtcatggtggcgccggtttccaaaatcgccagcgtcaacgatcccaggccggggccgacttccatgacatgatcggcagcggtcactcccgcctcgcgtacgatacgacggaccgtgccggggtcgatgacgaagttctgcccgaatttcttggtggggctgatgccggcatcggccgcgatacgacggatatcggcggcacctaacaggtgaccggtggcgggaatggtgtcgttcataagcgtgtgttccttgtgggcttcgtaaccgatcagtaccaaccgatttgttcggaatgttgccatgccttggacgggctgccgtaggtttgtgcgatgtaccacagaccccaatcgatctgtacggcggcatcgtcacggtaattggcgccgaacgcagccattttgtctgctggtcgcgactgaggaatgccgtaggcaccggagctcgcgttttcggcataccacagccaacgggactcgcggttccatagtttgaccaggcaatcccagtcgttgcctgtccacccgcgctgcgcggcggcaccggcggcataggcctgagcctgggctacggtggcgtgccagagtcggccggagggcgtggtggttgttcctgaatcggagccggaagagccggaattgttgttcgtaccgccgccggtgttaccggaattaccagtgttaccggaattgccggtgttgccggtgttaccggagttgttgccgccggtgttgccggcattgttgttggtatcggtgttcgtgttgttgccagagctgctgttgttcttgtcgcctgtgttgttggcattgttaccggacgactcgtgctgattgttggaaccggaatcggccttgccgttatcggcggagtcggattttttgtcggaacctttatcggtatcagacttggcggcgcctacggcgatgatctggtcgatggccatcgtggtgacggtttcggatttcagcgtctccgattcggccacgccatcgacatacgtgacgttatacacctgggttttctcgccattgacgccttgctggcggatctccgactggccttcaggcagattggagtcgatgatggtttgtgtggagtatggcactatggctgtgcgtgtttcctcgccatgcgtcacgcgccgtacgcgcaggatagtggtatcgccgtccttttcgacgctcacacggtcctctttgttcagcacgatgcctttggagtcaagaatggaggccgcgggcagtttgccgttgggggccacggaagtcttgccgtccgcaatgacggtgaccgggccatcctgattgatgaccagtccgccggtgagctggttgtacacattgtcgatgtcgacggtgatttttgtggcgttgttctggttttcctcgaaaaatcccagcaactggtcggcactggtggccacggtccagaagggaacggacgtgccgtcgatgttgatagtggtctggtaggcggactgtacggtgaccacggcatgattggcgagttggtcgccggacgaggtagtgacgatatcgtgggtcttgatatccaccccttgttcctccagaagacgggtggccgtcatcgcatatgtggtgacttgggtggtttgcccgttgatgttcagggctacggatttacgcgcggtgaacgcgaatgatccagccagcgcgatactggtcgccgcgatacaggcgattacgcggatgcgacgcagtgtaacaaaccgctgcggggtccaacgccgtgccattgccatactcttcctgctggatgaacgattacgccacccatcgtaacggttgttccggcccgtactgcggtttcaccggccaccgtcaccattcctgctcgtcagattgttctgagctcaaaaaaagaaaagaaaaagggggcgggagagaaggggatgttcccgcccccctgaaggcgcggagctggttgggggacgctccgccctcattccaggaagcccatagttgggggaaggctcctggagtacttacccaaggtaagaattatatgcgtagaaaaatctacgtatcatataatacgccacttttctacgcgtcgagcctcttgtcgggatcgaaccgacgacctgccgcttacaaggcggccgctctggccatctgagctaaagaggcgattgttcttaacgcgtaaatcgttttgaacaaatctctagtataccggtagttctcgagtggtcaattcaggccgagccgcgccggtaattaatcggccagcgaaatcggcttcttgttggcgccgatcgatggcatctggccttccacgcccacctgatcggagtccaagccgatggacttgaggaatccgtccaccatgctggtgtccgccagcgtgagctgcttcagatcccagtattcgccattgatggtgagcgtgggggaggagaacgcgccggagctgttgaacagttcggggcgtaggatcgtgtagttgttggaggcggtgagccacttgacgtattcgttcttaccactgaatgccgcggtggccacattctcgctcacgccggcattgacggcctgcttctccagcttggcgttgcttaccggctcgtaattggacaattcgcccggctggaaatcctcagcgtagatgttggagaggtagctcatgaggtgatcgggattgtcatcatgctcggcaatgtagatggcaccgttgaacgcgcggttggagtagttgtcggagctcttgttgtcctggaaattgaggaagtgcaaatcgatgttgagctggccggcgttcatcagcttgacgagcgtcgggtcaagctggcggttcaccgaggcgcagccggggcacagcggctccatgtagatggaaacggtgggcgccccttcggccttctgaccgtaccccttgctcgagatcacgaagccggccttgtcatcggcgttggccggctgggtactgactttcttgagcttgctataggcctcgtccacggtcatgttgctttgctggctactgctgctggtgttggacggccgcatagccttgtacacggcgaatccagcgatggccaccagcaccacaataatggccaccacaatgcagccgatgatggtctgctgcttacgttccttagccgcctgctcggcccgtgcctgctgggcggcctcctcggccgctcggcgctcagcgcgtgtggcacgcttggcctgacgcttcggatctgacatagctatccccttgcaatcgcttcaatgtttgggccccatcataatgaccgggcctgaggaggactgcgcccagagctgatctgaggtgaattccctgtaaaagtgtgacggaacgaacgtatcggatacacaacggccatgtgtgcggatggctgatgtgtgagattccgccccgctctaggcgaacggcatccagttgatcggcatgcccagaatcggcatcgcgcacaaggccacggtgatgatggcccatatggtgaacagcacggtgccgcgcccgccgcccttgggcgccggcgccactggagcaggtggagccccacccacttcggtggatggcgcgcccgccgggcgactgtgtttgagcccgcgcagtacgccgccccccagccgaatcatcatcgactgtggggcgaacacagtgaccagccagccgatggccatgaaaccgcccagcgccagcccggaagcggagaacggcacatcattgagcaacggcaccggaataccccaatccgcggtgaaataccaggagatggtgtgaacgggcagtgccagagccgcggtggccacggcggttcccgccatatagatgatgactagcagcagtatgcggggaatggccagcagcagggctttgaccagatgccagggaaaagtcgccacgcgaatccacgaatcggagtttttgcgctcgccgccgcgtttgccctcgcgctcaagctggggttcggtgttataggccagggtgagcagtagccacaacaacgcagtggccgcgatgatggccacgagcggagcatttgccgccagtgccgccagcggcgccgccagcaggatcaatggcagggtgccgcgctgcagatattcccctcgcttcacgtccaccggattgggcatgggaggattttggaccatggtttcggtgggggccgcttgggcggtttggtcgatgatgcgctgcaatgccgggcgaatggcggggtccaccgctgtgggctggttgcttgcgggatcccagctgctctgggcggtgccggacggggggaatgatgacggctgcggcgtggggagtacggtggtgcgctcggccagcggcgtggtcggggccggagtcgaatcggtgttggtcattggtgtggtggcgccggccattggtgtggtttggtccggcatcggtgtggtcgcgccggtgagtacctgtgtgccggcgtcgtcggtgaaatcggcagcagcgtcgggcaacagttgcgtggcctgctccgcaccggccggcggacgtggcggcatatcggctaagggcagcgtggcggtagcggcgccagccggcgagaatacggcggtttcgccatcgccgttatcgcccttattgccggagaacacggccatggtgggagcctcagcggtttcctcggccgcgcgccagatggttcggggattattgcggtcaacgccgccggccgcgccaaaagggggcatcgcctccgcggcttcggcaacgatcgcagccggttgtccagccacggctcccgcggcgaacggtcccgcctgctcgccctgccaagcgttgggattcaacgcatccaaggcgatggcattcagcaattgatccggcgtgcaacgatccctgcgatccgggtccagtgcagaacggaaggcagccaatgtgccggccggtagtccggaaagattcgcgttgcccgaggcctcgcgctcaagtaccgccatcatcggcttggtgccgaacacaggcgcgccggttgcggcaaaagcgagcacggacgccaccgaccaccaatcggtggcgtcgtcggattcggcaccgtcaataatctcgggtgcgatgaatccgggtgtacccatcactaggccggtgcgggtcacatgactttcgccctcgcccatcgcgataccgaaatcgaccaataccggtccggcggccgacaccatcacattggtgggtttgatgtcgcgatggacgatgccggccgcatgtacggctttggtggcttcgatgagcttgcgggccaagcgttccagatcgtcgcccacataccggccattggcggccacatcatccttaagattcttgccctcgatgagttcagtgacgatgaacgccaacgtatcgtcgagttccatatccacgatgccgcacacacccggatgattgatcttcttcaaggccatggcctcgcgccgcaggcgctcgcgcggcgtgacatcgggcttgaggtcggggtcgtgcagggccgtggacgcagagccggagcctgccactgactcgtcggtcagggagtcgcgcagaatcttcatggcataggtggtgccgccgtcgtcgcgcacccgccacaccgaccccatagctcctgagccgagccgggagatcagcgtatacccaccaaccacttcgccgggctcaagattcaacgcgttcaaatcgctcatgccctccatcctaatgccttgccggtgcattattctggctctctcctgggaggccgagcttgatatttcttggctcccctctctgagaggggagccaagaataaatgccgtttacgtattgagaagtgccgtttacgccattaaggtcgattgccctgaccggatgtggtagcaaattatgcgctcgaaatgacaggataggtgcgtgggcaggtgcgccagtcgtgaatttgcgactctataaccatcggcatcaaggatgtgtcggcggtgacccaaaggtgagccagccgggcacattcaacagtggcacagcgatgcaagggcagtatcgtgagccgctgatcgaatcgataacgatatcagattcgaatgccgcgacttcgccggtcgtaccttcgaatacttctccgaagacggctacctgttcggcgtgatggcctcccagcaggtcgctggcgctcaggccaaggcctgaggtgtgtctccgataactgaatagctaaatagaatggacggcctgctgagtgctactcaacaggccgtccattgtgtatctgaatgcgaaaagtcattatatggaacggaatatatcgatactgtgcattgtgccgattactgattccgacgcaagtattcgcgcaggaagggcacggcaaaatcgacttcgcctcgttctgtttcgcggataacgaaggcgtcaaggaggcgtttgcggtaggtggcggcatagttaggcgttttgcccatgcgctgtgcaacattcacggtgggagagggaccatctgacgctgccatggcttcgagatactcacggtcgtttttggataagccttgcaactccgggatgcacacggcgttatcaaggtcaatacgtgcttcctcgatacctgccgtaacatcagcgtcgatgatggtatccgagtcccgcatgtctgcggcatcccagatatggtagccaaccagttgaatcatataggggtatccggctgtcacattggctgcagtgcttaattgagcgtcggtgatggacatgccggaggcgcggaatgttgtggcgaaagcatcgcgcacttcatcaagaggaatatctgtgagtatgttcgttttcgcgcgacgtaggaacgcgatgacttcgtcattgaacaaatcagaaatcatctgtgggagaccggcgaacacgatggcgatattgcgtcgttccctgattcgatgctgtatggcagtggcgatggcaatcatgtcggatcgctcagtcgcttgagtctcatcaatggtgataagcaacccagcatggcgcttctcaagcgcatccaaccgtccggcaatggcacttctcaacgtttcgggcatacgcttcggggatagttcggcttctccgaggccgatgcccgctccagcaaaagtcaacgatggtcggatagtgaggtggtcaagggcccctcgcccggttcgtaaggcatcaacaaggcgttcgcatagtccggcagaggccgtttcttcgatgacatcccatctgcgcgctttggcccggtctccgaacacagtgagcatcacggtttttccggttccacgagcgccggtgacgagcataatgcgccctggggcaccgactccgttatcgagacctttctcgaaatcgcggataactttgcctcggccgatgagcaggggcggttcccctcctgccgttggcttgaatgggttttcctttgccttcatgtggaccgcctcctcgctgaatcaacctaaaataaaaattatcaaaagtatcaaaaaaataaaaattatcaaaagttgggttgagtcgactgaagaaaacagccgtggcgacaatgattctgccgcaatccgcggtgacaacaactgacgcggaccttcttggcagaatcgttgtttgtcccgtttcgccaatcaacgtcgctcaagttcggtgcgcagaccggctaccgtagcggtcagctcacgcacttcctcgcgcaataggtcgatttcgggattggctgatgttgcaatagcctcttgcgcggcttccttggccacttccttctcccgagcgtcctcgcgccgatccgtctccagattgacctgatccacgatccacgaagccagcgtggccgtcacaataccgatcaacgcgatgccggtgaacatcagcaccaccgcaatgatcttgccttggaaggtgaccggcgagaagtcgccatatcccacggtggtcacggtcacgaacgcccaccacaacgccgtgccgaagtcggtgatcgtggatccggacgccccgcgctccacggaatacacggccagcgcgcccacgtacatgagcattcccaccgcgccgaccgcgtatacggtgatgcgcccgcgcaccgccatgccggaggtgcggttcagcacgtgcagcacggtcagcaaacgcaacagtcgcaagggccggagcatcggcagcgcgatggtcagcagcgtgaacaggttgtgcttgaaccaccgccagcgatcgtcggccaaccacagcgagaccacataatcgacgacgaacaccacccagatcacgttgatgacggtttcacacagcgcgatatgcgtgcgggagagaatttcccacgaatacaccaccagaaacaccacggacagcaccatcagcggccagtccgtccacttcttccacgtcttcagtcccatattccgattgtagtggcgcgtccgctgcgccactgcggagcatgactccggacatcagtgttgtatacgttcgtatacatttcacgttgtgtacgaacgtatacagcggtatttttcatctcgtatttcccttatgactatcaccacagtgatataatcaagaatatgtaaggagagagaaggagccggccaatggagaccgcatcgatcgaactgtggcatggctcttcgcatgtcatcaagcatcctgaatacgggctggtcaagccgaacgacgattatggccgcggattctattgcacgcgcagcgtcgagctggccaaggaatgggcgtgcgcgggaatggatgacggtttcgcgaatcggtacacgttgaccacggacgggctcctcttcctggacctgtcccagccgccctacaccatcctgaactggctggccatgctggtcgaaaaccgtcgtttccagccgaccaccgccgtcgccgcgcaaggcatcgaatatctgaaacaagtgtttctgccggatgccagtcaggctgacgtcatcgtcggatatcgtgccgacgattcgtatttctcgttcgcccgcgcttttgtcaataacgcgatttccatcgaccaactcgctgaggcgatgcggttgggcgagctcggcaagcagatcgtactcgccagtcctcaggcattcgcggcactgcggttccaaggctgcgaaatcgcccgcgcttcgacctaccacggattgcgtaacgagcgcgaccgcacagctcgcgaagcctaccgccgcaaaagtgcagaagccgatctcgacggcctgttcatgcgcgacatcatccgcgagaaagtgaccaacgatgatccccgcctatgatgggacatacttgccggacgccatggccaacttggccggcgccttcgattatgcgctgaacgattgcgggttgccggtcggcctattcatggacttcttcgccacctccgaggcggccgcgcttttcgggcgaggcacgcccaaatacgtgtgtggcatgtccggcgaggagctggtggccgaaatcatgcggcaaaccggttgggcgcgcattctcgatatgccgccagccgcactgcgcgccggctcaacacccgaatactgggccggatgggtactcgcatactgccaatggaccaggggagtgcggttctcggacattctcgatgtgctgtcgctcgacgatatcgtgcgactgtacccgactctgcacgaagccgacgaaagccgattcgtcgacgtgtacgacgagcgggccgcccataatcgcaccgagggcgactcccggctgcacacgatccgcgtgcgcgccggactcagccaatccgggctggcccgccgctccggcgttaccctgcgctccatccaaatgtacgagcagcgccgcaaagaccttggcaaagctgccgtctccaccgtgctcgctttggcccgcacgcttggctgccgcatcgaagatctgttggagccgtaaagacgcggagtagtatcgcgccgcatcgattctgataactgaacaactacttttaaggcccggccggatgctcgtttggacatccggccgggtcttctggctccacacggggtgccgaggtatccgttctccgcttcgaggggctgatttggccttccgtagaggtttactcccgtttcgaggggctggtggcccgctagaacacgggtataaacggcttcgccccaccgtcattccgccattttggggatgcgcttacttgagtaccagcccctcgaaacggagatagatctccggaaagggtcaaaacagcccctcgaaactcaagatggcggttgcagggcggttgaggatcagtcgaagagcggttcaaacgcaaatgtgaacaatgccacatgtgattgggcgggtcgctgcacgccgattttcggggggtgcatgggaatggcggaatatcaacgaaaaaccctatatctaggtttgttatgtgacacgcgccactacatatagtgccttgatttcaaatcacaccgctgtaatatggccttcgcttcactgttcatcagaaccacatcaaggggagtcgccatgaccgtcaccgtgttcaccaagccgcattgcccgcagtgcgatgccaccaagcgccagctcaccaagctgggtgtgccgtttgaaaccgtggacctgacgcagaacccctccacccttgagcagctgcaggccgccggtttccagcaggctccggtggtcatcacgccggacaactcctggaccggctaccgccccgacctgattcgcgaagtcgcccagcaggtggccgccgacaaccgcgccgccgccacggtgtccgcgtgagtctgagccagcccgaattcgcggccgaaggcaagacgatcggcgcattggtctacttctcgtcggcctccgaaaacaccgcacggttcgtggccggatgccgtttgcaggacgaaggcatcaacgtctaccgcatcccgttgcgggccgccgacccggcgctgaacgtccgcgaaccgtacgtcatcatggtgcccacctatggcggcggcgtggtcaagaaagcagtgccgattcaggtcaaacgcttcctcaacgatccagccaaccgcgagtggattcgcggcgtcatcgcctcaggcaacaccaatttcggtgaggcctactgtgccgccggagacatcatcgccgccaaatgcaaggtgccctacctctaccgttacgaactcatgggcaccccggaagacactgccgccgtgcgaaacggcctcgtccgcttcttcaccgaacagtaaatcttgaccccctcgaggtattggctcccctctccgaggggagctgtcaacgaagttgactgaggggagcaactgtctgagtaaacacacttctgccatattccaaggatttccaatgactgacctcaccgccaccggcctgccgctcgacaatactgccgacaccgcagcggaacagtacgacccggcgcacgattaccacgcgctcaacgcgatgctcaacctctatgacgccgacggcaagatccagttcgacaaagacaaggccgccgaacgcgaatacgtgacagggcacgtggccaccaacagcaagcggttcgcctccaccgccgagcgtctcgaatacctgatcagcaaccagtactacaaccctgcggtcttcaaccagtactccgctgaattcctcgaccgcatctacgagcacgtggaatccgccggctttgagttcggcactttccttggtgcgttcaagttctacacgtcctacgcgctcaagacgttcgatggtcgcctctatcttgaggacttcccgcagcgttgcgccgctgtggccctggagctcgccgccggcaatgagcagcaggccatcgaatacgccgacgaaatgcttgccggccgcttccagcccgccaccccgaccttcctgaacctcggcaaggcccagcgtggcgaaccggtcagctgcttcctggtgcgcatcgaagacaacatggagtcgatttcgcgcggcatcaacgcggccctccagctctccaagcgcggcggtggcgtggccctgctgctgagcaacctgcgcgagctcggcgccccgatcaagcacatcgagaaccagtccagcggcgtgattccggtcatgaagctgctggaggactccttctcctatgccaaccagctcggcgcgcgtcagggcgcgggcgcggtgtacctcaacgcccaccaccctgatatcctgcgcttcctggataccaagcgagagaacgcggacgagaagatccgcatcaagtcgctggctcttggcgtggtgattccggacatcacgttcgaactggccaaacagaaggcccagatggccctgttcagcccgtacgacgtggagcgcgtgtacggcaagccgttcgccgacatctccgttaccgagcattatgacgagatggtggccgacgaccgcatcaagaagacctacatcgacgcccgtaagttcttcaccaccatcgccgaactgcagttcgaatccggctacccgtacatcgtgttcgaggacacggtcaaccgcgcgaacccgatcgaaggtcgcgtgaccatgtccaacctgtgctcggaaatcctgcaggttcaggagccgagcgcatacaacgaggacctcacgtatgcgcatgtcggccgcgacatctcctgcaatctgggttcgctcaacatcgctaaggcgatggatggcggcttgggccacacggtggagacggcaatccgcgcactcacctcggtggccgagcacaccagcatcaacgcggtgccttcgattcgccgcgccaatgaggagggccacgccatcggtctcggccagatgaacctgcacggcttcctggcccgcgaaggcatccagtacggttctgaagagggcctcgacttcaccgacatgtacttcatgaccgtggcctaccacgcctaccgtgcctcgcacgcgctcgccgtggagcatggccgcacgttcgccagcttcgctacgagcgactacgccaagccggccggccagggcaactacttcgacaagtacaccgatggtcgtcgttcgctcactccgcgcaccgaacgggtccgtgcgctgttcgaacagtacggcatcgcgatcccgactgcggccgactgggaggccctgcgcgacgcgattctgaaggacggcatctacaaccagaacctgcaggccgtgccgcccaccggctcgatctcgtacatcaaccattccacgagctcgattcacccgatcgcctccaagatcgagattcgcaaggaaggcaagatcgggcgcgtgtactacccggccgcctacatgaccaacgacaacctcgggtactacaaggacgcctacgagatcggctggaaggccatcgtcgacacgtacgccgaggccacccagcacgtggatcagggactgtcgctgacgctgttcttcccggacaccgccaccacccgcgacctcaataaggcccagatctacgcctggcgcaagggcatcaaaaccctctactacatccgcatccgccagcaagccctggaaggcactgaagtccaaggctgcgtctcctgcatgctctgatcgttcgagggagcgtataccgcctttcttcggcactcgacgtaccttcgtacgccttcggcctcagacggcggtctccgcacgcattgaacaaccagagagccgttgttactcccctcactcggctaacgccgacagctcccctcagagaggggagctggccgcgaagcggactgagggggggctccaccatctaaggaaccaacaatgtcacgaaccatctatagagcactgctccggctgaccgcgccggaggagttcgaaaacaagtccaacgacgataacgacaacgacaacgagtaaaaggaacactactcatggcaccgatttccattccgcgcaaaccgctgaaactcatcgaccgcgtctccgcaatcaactggaaccgcctcgaagacgagaaagaccttgaggtcagggaccgcctgaccggcaacttctggctgcccgaaaaagtccccgtctccaacgacatccccagctggcagaagatgaccgaggacgagcatacgctcaccatgcgcgtcttcaccggcctgaccctgcttgacaccatccagggcacggtcggtgccgtgagcctgattccggacgcgctcaccccgcacgaggaggccgtgtacaccaacatcgccttcatggaatccgtgcacgccaaaagctactcgtccatcttctccaccctgtgctccaccgaacagatcgatgccgcattcgactggagcgagaacaacgagtttctgcagaagaaggcggaaatcgtgctcgactactacgagggcgacaacccgtacaagcgcaaggtggcctccaccctgctcgaatccttcctcttctactccggcttctatctgccgatgtacttctccgcgcacgccaagctgacgaacaccgccgacgtgattcgtctgatcatccgcgatgaggccgtccacggctactacatcggctacaagtaccagaagggcatcgcccagctgagcgatgccgagcgtctggatctgcaggactacacgtacgacctgctcaacgagctgtacgacaacgaagtggagtacacccagtcgctgtacgaccgcgtgggcctgaccgatgacgtcgagaagttcctgcggtacaacggtaacaaggcgctgatgaacctcggctacccggctttgttcccggctgagatttgcgatgtgaaccccgcgatcttggccgccctgagcccgaacgccgacgaaaaccacgacttcttctccggctccggctcctcctacgtgatgggcaaagccgaagaaaccgatgacgacgactgggacttctaagggtttcgcggtccgcgaacccgcagcgccgccgcgttcgcacgacggcgctacgctggaggcatggaacaggagccgttggtcagcatcatcatcccggtatataaggtcgagaaattccttgatgaatgcgtgaagtctgtggttgcgcagacctatcgcaacctcgagattctgctggtcgacgacggctcgcctgacgactgcccggccatgtgcgacgcctgggccgcccgcgacccgcgcatacgcgtgattcacaagcccaacggcggcctgtccgacgcccgcaacaccggcatcgccggggccaccggtgcgtacatatacttcgccgattccgacgacaccgtggcccccacgttggtggaggactgcctgaacgccatgcgcgagtatgacgccgacctcgtgatgttccagttcgacaccatctccgagaacaacaagccgctgctgtccaactatcgccacaacgacttcaccgaggtgcagatcctgaccccggtcgaggccatcaaaaagcaggtcaaggctgagatcgacggctatttctgggccttcctggcacccgcctccacctatcagggcaccggattctccttcccggtggggcgcaaaatcgaggatctctcccgtatctgcaacgtgatcggcgaggccacgcgcgtggtccgtctgcccaaggcgctgtaccactaccgcatgcgcgagggatcgattaccgccaactgggatccgcagctcacccgcgactggacccgcgccgccgacgaccgcgaggaatacatcgtccaccgattccccgagctcaagggcttcatgacgctgcaacagctgaatttctttgccaacctcgattacgagaccatgcgccagtcgctgatcgccgggctcaagatcgatcccgaggacgccgacgcgcttcgtcgtcgcatcgagggcctgacccagtccgccgatgagggcgatgagcccgtaccggaaacgttgcgtgagttgctcggactgctcaagctgggcatcaccaaggtggccgatggcacgttcggtaaggccgatggcagcggtactgatggcgatgccgagaacgatgacgcaacgctggccgaccgtttccgcgacatgcgcgaggactggcgccagctgcgcatccagcgcatcgaaaacgccgaggagcgcaaggccgagcgcaaagccgcccgcaacggcgtcaccttcgagtctgtgttgcattagtcggcgactgatggaatccgtcagttcgggaagagcaggcctgctctacgccgggcgtgccggttcgcacgttcgagaaacaggcgtgtcatgggccgaaccacacaacacccccagaaacgcccataaagttaactacattttcagacacgccacttgccttggtccacggtccgtgtatagtagttctcggctcaacgaagagaaccttcactgaaccggaaaaaagtaaacgctgaagcttgcagtttccgaaagcaaagttgtacgtcggtggcgagggcggaagcgcagtaaagaacaaatccctttacaacggatcgtgaggcacgtacctgcctctgaaaggattagtaattatggcagaagtcgttttcgaccacgtcactcgtatctacccgggcaacgataagccctccgtggatgatctgaatcttgatatcaaggatggcgagttcctcgtcctcgttggcccttctggctgtggtaagtctacgacccttcgtatgctcgccggcctggaggaggtcaacaagggccgcatcctcattggtggcaaggatgtcaccacgatgcagccgaaggaccgcgacatcgcaatggtgttccagaactacgccctgtacccgcacatgaccgtggccgacaatatgggcttcgctctgaagatcgccggcactccgaaggaagagatccgcaagcgcgtcgagaaggccgctgagatcctcgacctgaccgagtacctcgatcgtaagccgaaggctctgtc

SEQ ID NO: 3447 - DNA, 5482 bp, Unknown
  R151_18m  MAG No. k141_58351
cttggcggcgatgcgtgccagcgtgttctttgccacggtgtaggaagtatcgcggcctagcttttcacgcagatcggaaatctgcggaacggtaagcccgcggtactcggtcaggtagacggcgtcagcgttacggaattcttccgtaagctgagcgactaccgcttccttttcgggcctcttcatggcgttccttcctaagtcggccgttgacttggagttcggaactttcggccgggcaacaaaaaagccctgcgcacaggcagagcaatataatctcgtgaagcgaccttcgccggcccttgacgggcttatatctctcaacctgcgctggctcggcgaaccaaacttcggaaatgcactcgcgcgcacttcaaccaacggtctgtggtttacggatgattagattacggatggtcagcgacattgcagaattcgggcgtgtcgcaaggcattacaacgtggcggcgtactgggctacggacgcggtgacttccttcagatagtcgagcgagcgacgccagtggccgggcacctcgatcgaatggttggcatccgggtattcgtgcacgtgcggggtgagcgcgttggcgcgggctcgatcgtagaacgggtcggcggtgccggcgcagatcagcggtgccgggccggagtatcgggagctggcggcgtgcgactggtcggccagttctgcgcggatgatcgcccttgcttcggctacgctcggagcctcggattcggcgacgatatcatcgccgacagccggcaccggaatcacccgggcggatggatcgaagtcggcgtgatgcagcaccggggtcagcagcacgaacggcagaccgtagtgtgaggccacatgtgggtaggtcatcgtcgtcagcgacttgccgatcagcaacaggcgagggccggacggggtgtcggaatcacggttcggcgagccagctgcgccatcggccagcacggtagcagaatcatcggcggcaacgccatccccggaatcaccggctttacccgcgccggactcgcgcgcggcggccatccagccgtcaatcgcctgattgaggaccggaatcaccgtggacaggtcgtcggaagcgttgcgtacgttcatgcggtcgattcgccagccggcctcgaccagagcctgggccgaccagtagagcagcggacggtcgcagttgtagccggtgccaggcatcagcagtacgcggccgtactcctgaccgggcttgacgacattcttcttccaagaggtgatgctgacttcgacggccggtttcatcgcgcgccttccttccacgggtgtgccctgcgtgtccctgagttgttccgaattattctggcagtcagtctactcccggacctgttcacgttacctccacaagctataatcggccacggttctgattggatgcgcagcgcctgacgcgcgttgggcaggccgatcagggcgagtcgcaattctcgccggggccagccgcagcattatgcgcgcggtgcgcagccccgcataaaaccaaggaagtagagagtaaatggagaagttcttccatttgaaggaaaacggcacgaccgtctcgactgagattctggccggcctgaccacgttcttcgcgatggcctacatcatcgtcgtcaacccgcagatcctgtcgcagacgggtatgccgtggggcggcgtgttcctggccaccatcatcgcggccatcatcggcaccctggtcatgggcctgttcgccaatgtgccgtacgcccaggccgccggcatgggcctcaacgcgttcttcacctacaccgtgtgcttcggcctcggcttcagctggcagcagaccatgtgcatggtgttcctgtgcggcctgatcaacatcctcatcaccgtcaccaagatccgcaagatgatcatcatggccatcccggagtccctgcaacacgccatcggcggcggcatcggcctgttcgtggcctatgtgggcatgctgaacgtcggactgatcaagttcacccccggcgacccgaaagccgcggccaagggaggcgccgtggcggcgaccccgagtctggccgacttcaacgacaaggtgctgtgggtcttcctgatcggcctcgtactggccattgtgttcaccgtgatgaaggttaagggcggcatgctgctggccatcgccatcaccaccgtgatcggcatcccgttcggcgttaccacctggtccaactcgcagtccatcagcgaaaccttctcccagctgccgcagaccttcggcgcgatcttctccgctgagggcttcccggcgctgttctccgacgtctccaagctgcctctggtcatcgtgaccatcttcgccttctccatgtccgatacgttcgacaccctgggcactttcatcggcaccggccgtcgcaccggcatcttctccgccgaggatgagaaggctctggagaacggccacggcttctcctccaagatggacaaggccctgttcgccgactccatcgccacctccattggcgctatctgcggcacctcgaacaccaccacctacgtcgagtcttccgccggcatcgccgcaggcggccgcaccggcctgacctccgtggttgtggcgatctgcttcgccctgtccgcgttcctggccccggtcgtctccgccgtgccgtccgccgcaaccgccggcgtgctggtgatcgtcggctgcatgatggccgcttccctgaaggaagtcaagtgggacgacatcgccgaagccatcccggcgttcttcgcagccgtgttcatggccttctcctactccatctcctacggcatcgccggcggcttcatcatgtactgcatcgtgaagacctgcaagggcaaggccaaggaggttcacccgatcatctggattgtggccgcgctgttcattctggacttcgtgtgcatggcgattctgtaacgctgattgacaacggattagcctttaaggattaatccgccgccatacggcataaaggccgggctctcacaagggcccggcctttgttgttgccacagtgatcaacgcccatgagtaccttcgatgatcatccgccattcaatcaacggctggccatgactcggacatggcgcggcacggcaagcggattttgctgttgggcataacaacagacgagagaatagatccggtcgtgagcaacaggataggtgccatgcggtgccgtgtacaaactgttgtcagttgtcaacgctttttagcgtggctccaatcatcttaatggctgttttccgccattcttgatgcatgagaatagttgtcaactgacaactgaatgtacatggcagcagcacgagtgccctattcaacatcgaaatatgtagcgcgaagaagccgaaaaaccaaaaggcttctataccgaatgaaacggtatagaagccttttggtttgcgattaagctcttctcacccgagagaagctagagaacgatcagtcctcgaatgccgaaccgttaagcgggaagccctgcgggcttcccgtaggtgggggggggagcggctatgccgcgaccgatccgtgagagggctttagtcctcgaacggatcaaagtcgcgacggacgcggcgacgcgggcgctcagtgcgctcttcgcggtcggcgcggtagtcgtcgtagttgtcgtcggtggcgtagcgcgggttgcggtccgagccacggccacggccgccacggaaaccgccacggcggtcatcacgatcgccacggtcatcgcgatcggaagagcgacggcgacgcggacgatcatcatctcgggagtcgcgagcatcacggtcatcgcgatcgtcgaagtcacggtcggcagaacgacggcgacgcggacgatcatcatcgcgatcatcgcgatcgaagtcacggtcatcggagcgacggcgacgcggacggtcgtcgtaatcatcctcgaagtcatcggagcgacggcgacgcggacggtcgtcacgatcgtcgaagtcacggtcatcgcgatcggagcgacggccacggctgccacggcgatcgtcacggtcaccacggccacggctgccacggcggtcatcgcgatcgccacggctcgggcgggcgttgttctcctgatcctcgaaaccagggatggccagggagatcttgccgcgatcatcgacaccctgaacgatcacctcaacggtgtcgccttccttgagcacgtcttcgacggcgtcaatacgctcgccgttggccaggttgcggatctgggagatgtgcagcaggccgtcggtgccgggggtgaggttcacgaaagcgccgaacgacgtggtcttgacgaccttgccgttgtaggtttcgccggcctcgggcacgtgcgggttggcgatggaatcgatgatggacttggccttcttagcggcctcgccaccctcggaggagatgaagacggtaccgtcatcctcgatggcaatttcagcgccggtatcttcctgaatctggttgatcatcttgcccttcgggccgatgacctcgccgatcttctcgaccggaacggtggtggtgatgatgcgcggagcaaactcgctcatctcagccgggccgtcgatgcactcgttgatgacctcgagaatcgtggcgcgggcttccttggcctgctgcaaagcggcggccaggatgtcggcggggatgccgtcgagcttggtgtcgagctgcagggcagtgatgaactcggaagtaccggccaccttgaagtccatgtcgccgaaggcatcctcggcacccaggatatcggtgagggtcttgaagatgtgcttgccatcaacgtcgccggacacgaggcccatggcgatgccggcaaccggggccttcagcggcacgccggcagccaaaaggctcagcgtggaggcgcacacggaacccatcgaagtggaaccgttggaaccgatggcctcggagacctggcggatggcgtaggggaactcttcacggctcggcagcaccggcacgagagccttctcagcgagggcgccgtggccgatttcgcggcgcttcggggagccgacgcggccggtctcaccagtggagtacggcggcatctcgtagttgtgcatgtagcgcttggactgcggaccggacagcgcgtcgatctgctgctccatcttgagcatgttcagggtggtgacgcccagaatctgggtctcgccacgctggaacagggcggaaccgtgcacgcgaggcacaatgtccacctcggcggacagggtgcggatgtcgcgcaggccacggccgtcgatgcggtagtcctcggtcaggatgcggcgacgcacgatctggcgctgcagttccttgaaggcgttgcccagctccttgtccttctcggcgtcgtccatgtcggtgaactcgtccgcgagcacctcgcgcacgtgctccttgatctcgtggatgcggtcctggcgcggcagcttctcggcgatggagagggcctcgtccagatccttgtgagcgatctc

SEQ ID NO: 3448 - DNA, 6730 bp, Unknown
  R151_18m  MAG No. k141_58835
gcggtgtggcagaagccgattgccaggctctcctcagcgcgttcttcgctcatcggcggtaaatcgctcaaatacttacttcatccatccaacacgcggcaccaaggcaacatattccatttcttctaccatcacaatcagtagttcaatgcattccgtatacgtcgaaggagacactatggcccagaacaccgccaccttcaccggtaccgccgctgacggaaccgtgctcaccgccatctatcttgcagagcccgatgccaacgtggcaatcggtctggtcgctgccggcgatgacctgccgcgtatcattcattggggtcgtccgctgagcaatcctgagaccttgctcgctgcgtacgatgcgctcaagccgcagcgcgtgtccggcgcgctcgacgacaccgcctggccgtccatcctgcccacccaggccgaaagctggatcggcgagcagcgcgtggtgctgcgccgcgccggcgtcgagctcttccccaagttcaccgtgaccaatatcgaggccggcggcgtgctggaagccaccctcgatgccgtgtccggcgaaagctacaccgatgtggccggccatgcccgtgccaccggtccggtccgcgtgcccggcgtcatagtcaccgcgcgcgatgaggagcagggcgtggaagtcgagtggcacctcgaactgctccccggcggcctggtccgtcagaaggccaccgtaaccaacctgttcggtgcagacgccggagccccgctcgagatcggcaagatcgagctcggcttcccgctgcccgaatccgccggcgaaatcctcaccaccaccggtcaccatctacgtgaacgcagtccgcagcgccagccgctgaccgtcggccgtttcgaaaagccgcagctcgccggccgccctgacttcgacgcatccctgctcctgaccgccggcgtgcccggtttcggcttcgagcatggcgacgcctattcggtgcacgtgggctggagcggcaactccgtgctgtccgccgaacgtctgccctacacaaccggcgtgatcggcggcggcgaactcctgttcggcggcgaagtgacgctcgctggccctggcgaaggccagaactcctacgacaccccgtggctgttcggctcctatggcgatggtctcaacgagatcgccgcccgcttccactcctacgtgcgctccctgcacccgcgcctgttctcgcacggccgtccggtgatcctcaacacatgggaagccgtgtacttcgaccacaacttcgatacgctgaaggcgctcgccgacaaggccgccgactccggcgtggaacgattcgtggtggacgacggctggttcggctcccgccgcgacgacacctccggcctcggtgactggcagattgcgcaggacgtctggcccgatggtccgaagtccctgaaggcgctcgccgactacgtgcacgccaagggtatggaattcggcctgtggttcgagccggaaatggtcaaccccgattccgacgtggcccgcaaccaccccgattggattctttcgcccaccaccggccgactgccgctgcagggccgcactcagcaggtgctcgatctgaccaatccggatgcgttcgactacatctacggctgcatggaccagcttgtcggcgagcttggtatcgactacatcaagtgggaccacaacaagttcgtcaccgagcccggttcccgccgctccggccgcccggccgtgcacgcgcagaccctcgccgtctacaacatcttcaagggcctcaagaccgcacatccgggccttgagatcgaaagctgctcctccggcggtggccgcgtggacctcggcatcctagagcacgctgaccgtatctgggtctccgactgcgtggacccggtcgagcgcgcggacatccagcgctacacctcgctgctggtgccgccggcgatgatgggcgagcacgtgggtgccagtcccgcgcactccacccagcgtgccaccagccaggaactgcgcatggccatggcgttcttcggccacatgggcatcgaatggaacctgttgaaggagccggacgaggcgctcgccaagctggccgtgtgggtggccgaattcaagaagcaccgcgactggttcgccatcgacacctgcgtgcacgccgactccaacgatccggccgtgcgcttggatggcatggtgatgccgaaccgcgacgccgccatctaccgcttcacccagctgaccaccagccagacctatccggccgcgcccgtgcacctgcccggacttgaccccgagcgcacctaccgcgtcagcccgctcgacccgagcttggatttgaccggtctgaccaacggccagagcactctcggctggtggagtgaggaaggcgtagtcctgaccggtgaagccctgcagcgctacggcatccgtcccccgtccctccacccccagcaggcagtattgctcaaggctgtggcgttaagctgacagcctagtaggctgtcagtagccacggcctgagcgaagcgacagctgagcgaaggtgggattgagccttgccgataggcaagtccgtaattgctggtcgtggcggagtgactgtggcgaagcaacgttcttggttcccctcagagaggggagccaagaacggcctacccaatatgcttcacaatcacgcgactggcagcggctttggcccagagctgccagtcgtgatccataatcgtgaacttgaccggctgggtctggctgtgacggtagaaacgaatgccatcgcgcagcgaatcggtgccgagcttggccaaaaacgcggactccccggcaatcatcacatgtccgggcatcgcgatgttcgccaccgtagccaccagcgaacccaaccggaaacacgtccggttcaccaactgcgtggcctgcggcacgcgtcccttggcatcgcgcgcaaagtcctcaaaactgaccgcgcgacccacaatcgcagagtactgttcggcgatcgaatcgtcagtcaagcattgtgaacagccgatatgtccgctggtgcagcgcggcccctccggatcgataagcacgtggcccaccagaccatagctcttatccgggtactgcactggcttgccgttcacggccagcgaataaccaacacccacgccgatggtcaccacggcgaacatatccacgccgacacccggcccgaaccaggaggcatccaccagcagcgaatcgatatcattgaacaccccgcacggcaggccggtcgcctctgtgaccatcgtccccaagtccgtggccccgtcccaatgcaggaacggcgcgaacgtcacaatcgaatcgtcgaccacatgcccacctaccgcaacgcccaccgcagtgggggagggcagtccggaagaggcgatatcggcggaacattcgcgcaccagccgcgtgatggccgacaccacatactcagccgactgatccgccccgatcggcacctcgtgccggccggacaccacctcgccatgcgcgttcaccgcagcggccacaatcgacatcccatgaaccttgacaccaatgaaggtgcgtgcgttcgaacacaacaccagcgaagtctgcgggcgtccgcgacgatccgaactttcccttggcgtgaatcgctcgggcagcttgcctgacgggccggcctcggccggaagctcctcgatcaccccggcgtagatcagatcgctggtgatgcgggacaaggccccttggctcagtcccagcatctgtgccaacgtagtgcgggctatcggcccgtattgggcaattgccgccgccacgcgatgcgtatgctcggatccggaaaaccactgtggaatcgcgttgacatcagacatgcaagccccttcgctgtatttattgcgttaatcacaaaataccgcgctttttgttgcttgcgcaagtgggctcgctggcgctgggaatgaaatggccgaaccgttaccttggaaagtggaagaaccgccggcaccgaagccggaggaaaagaaagataaaggagtcaacaattatgctgtccgattccccacatgcaacgcctagactgaagcgtctggccgtgcgcaccgccgccgtgatgtgcgcgatcgccgtcgggttcggcctggcaggctgcggctccagcaccgcaggcaccgtcacgctggatttcttccagttcaagtccgaggccgccgaccagttcaagtccatggtcgccgactttgagaagcagaacccgaccatcaaggtcaacatcaacaactccgccaacgcccagaccgatctgcgcacccgtttcgtcaagaatcgtgtgccggacgtgatcaccttcaacggcgacatcagcttcggcaacttcgccgcctccggtgtgttctacgacttcaccgatgaacccattgtggacaccctcaaccccggcatggtgcagatcgccaagaatctggtgcagaccaccgattcctccaagaagcgcctgtatggcctgcccttcgcgggtaacgcctccggctacatctacaacaaggctctgttccgcaaggttggccttgacccggagaatccgccgaccacctggagcgagttcaccgatatgctcaacaccttcaaggacgccggcatcaacccgctgcagggttccgtggccgacgcctggaccacccaggcaccgctcgcctccctggccggcacgctggttcccgaatcgaagtacaccgagctcaagcaaggcaagaccacgttccaggaactgtggaagaccgcagtcgagaaggaatccgagctcttcacctactccactgcggacaccggcgtcacctaccagcagggcacgcagaacttcgcccaaggcaaggccgcgatcatcccgctcggcacctacgccatcccgcagatcctgctgatcaaccccgatatcgaacttggtttcgcccagatgccggccaccgatgacgccagcgagcagatcctcaccgccggcgacgacgtgatgctcaccatcggtgcgaacaccaagcaccccaaggaagcgatgaagctcgtcgagttcctcatgcagaaggatcagcttgacgcctacgccgacgcccagtccgccatcacgccgctgaaggacacctacttcggcaacgatgcgctggaaaccgtgcgctcgttcttcgaggaaaaccgactggccgacttctgcgaccactacattccttcgtccatcaacatcggcggctacctgcagaccatggtgacctccggcaacaccgaccgcttcctgaaccagatgcagaccgaatgggacaaggtccaagccaggaccttcgagtgatcggtaggagaggagaacatcatgtcacacgcaaccgcaaccaagaccgctgccaagaaaccggccaagaagaaggtctccgccttctccacccgcaaggtggaccccgcctactactggatggtggttccggcggctatcattttcgccttcttcctgtacctgccattttttgacggcgtaaagtattccttcaccaactcgcagggctacggcgattacaagttcatcggcctgaagaactacatcgccctcttccaagacaaccgcgtgggccacgcctacctgttcacgttcctcatcgccattctcatcacggtgctgattaatgtgatcgccctgttcctgtcggtgctgctgaactcgaagatcgccttcaagaatggcttccgagccgtcttcttcatcccctacaccctctccgtgctggtcatcggctacgtgttcaagtacatcttcatgaacccgctgcccgagctcggcaaggcgctgggcatcaagtggctgtccacctcgctgttgaccaatgagcaactcagctggatcccaatcgtcttcctcgccgtctggcagggcatcgcctactcagtactcatctacctcgccggcctgcagaccatcgacgacgaaatctacgaggccgccgccatcgacggcgtcaacgcctggcagaagttctggaagatcacattcccgctgatcggaccgttcttcaccatcaacctcgtgctgtccatgaagaacgcgctcggcaccttcgatcaggtcgtcgccttgaccgagggcggtccgaactcctccaccgaaaccgtcacctacctcatctggaagggtggcctgaccggtggcgagtacgcctaccagaccgcaaacgccgtgctcttcttcatcgtgctggcgatcatcgccttcgtacagctgcgcatctcccgcagccaggaacagatctgatttaggggaggataagaaatgactactgcaacagttaccccgtccaagtccggcaagcccgccaagttccgcagggaccacaagatcaactggtggctgaccgccgccgtggccgtgctgagcctgaccattctgatcccgctctacttcaccatcgtcaccgcgctgaagactccggccgaagccggcaccttcgccctgcccacctcgtggcagtggcacaacttcgccgacgcctccgccaaggtcaactacccgaaggccgcgctcaactccgcgatcatcacggtggccgccgtggtgctcaccttgctgaccaacaccttcgtggcctacgctgtggcccgcaacatggataagcgcttcttccgcttcctgtactacttcttcatcgccgccatgttcgtgccgttcccggtcgtcatgctgccgattgcgaagcagatgggctccctgca

SEQ ID NO: 3449 - DNA, 5412 bp, Unknown
  R151_18m  MAG No. k141_58893
cggtacttggtctggatctggtacagggtgacgggcaggtctttgtaagaggagtacatgtccttgaccagaagggtgaacatctcctcgtgggtgggggccagcaggtaatcggcctcgtggcgatccttcaaacggaagttgttgtcgccgtactcctcccagcgatgggtggcctcgtagggttcgcgcggcagcagggccgggaagtgcacttcctgggcgccgatgccgttgatctcctcgcggatgatggcctcgatcttgttcagcacgcgcagaccgagcggcagccaggtccagataccgggtgcggccttgcggatatagccggcgcgctgcagcagcttggccgaatcgacatcggcatcagcggggtcctcgcgcagggtgcgcaggaacatggttgacatacgaagggtattggaagtcatgtgttccaagatattcgcgtgaaccgacaagcccgcctgctattcgcactattccggccttcatcttggcattcggactcattcgtacaacaatgatggctagaagggtaggagggcacgatgacgcagccgaccgagcaacaggggaatcagccggaacccgcggagcaaccggtgtatcaaccggcccagcatgggccccgcaattttctgctgcaaccccgcaattcccaacggcagttccgcgacaaccggtatcgcaacagccaatggccatgccaccatttgcgcaatcgcctatgtcggtcccggaacaagcggcctgtccggagcggccgcgctgattgtgggtgtgcgtttgctgcaagcaccgttgatctacggcacggtgattcttatcgtcagcacggtgactgtgctgtggccatggcgggtcgaattctcccgccactaccggtgggtgcggcttgctttgggcggcatcattctgattgtggcagccgcgcgctatgaggcgagcctcaaatcgatgaggacgatcgccgcgcgtattggcgatctgcactaaatcgcgcgggcgacctgaggcagattaccaacgtccggcgatagcagtcctgcatacggggcagtgcccattgccactgtatccggcagataaacggttggcaatgattcgataccaatcgcgttccacgagcttggccctgcattcagggtttgggcaatatgtggtatcgccttcacgatcatgcacgttgccggtgtacacataattgagtccctcttcgagggcgatgcctcgggcgcgggtcagagtctcgtgcggggtgggcgttacgtccatcatgcggtaactggagtggaatgcggaaaagtgcagcggcacgtccgggcccaagtgctcgcgtatccatgtacattcagcatgcagctgggcgtcgtcatcgttgagtccagggatgagtagcgtggtgagctccacccacacgtgttcgccttctggtgtgcgtgcctcgttgaccgcatagtcgatggtttcgagcacatcggccagatgcgtgccggtcactttccaataaaattcttcggtgaagcctttgagatcgatgttggcggcgtccatggcggcgtagaagtcgggccgggcttcggcgctcatgtatccggcagtcacggcgatgggatgaatgccgagcgctcggcaggcttcggccgtgtcgatggcatattcggcgaacacgatcgtatcgttataggtgaacgccaccgaatcgatgccccggtcggccgcgacctgcgcgattttctccggactggcttccatgccgagccggtcgaagctgcgggctttggcaatatcccagttttggcagaatcggcaaccggaattgcagccagccgtgccgaaactcagcacactggaaccggggtggaagtggttgagcggcttcttttccactgggtccacggcgaagccggagctgcggccgtaggtgtcggagacgatgagtccgtcgtggtttgagcggacgaagcaaaagccgcgttggccgggcttgaggacgcagcggcgcgggcatagttcgcagcgagcgcggttggtaccgtcgtggaattgcgtttgccagcgggctatggcggggttacgaacatctgtgactgacgccgtatgaccgcacgattcccggtggccaccctctgattctcggtgaccaccctccgtcgcttcgcgccacctcccgccagcgggaggggacatggttgctgcgttagtgctcggcataggcggtcacctcgtagcgttgacagtcgatttcgccatcgttccagtcgtaggacgggcggataccggctttggcgagcaggtgagcgacgaaatcgtgcgaatcgggcagctcatcccacacttgtggcaggaatgtggcgctgcggccacgacggtcggcgagaatcagaccgtctttgccggggcgtaatacttcctcaagttcagtgcgcgaacgtaccgggcgttcgacgttgctgccgtcccgtttgacggcgtcggtctgaggtccggattgcagcgatgccagagtcgcggtcttcgagccggtatcgcgcgaatcggcgtcacaggagttcgcggtaatcggctcgggctcgcctaagacggatatttccacattgagtaacgggtattccgcggcggtgaccgggttgaaacgtgggtcacgggtggcggcgtccaccgcatgtgcagctatgtccttgccgagcgagcggtgggcggccagcgaaccgatgcacccgcgtagccggccaccctcggtcagggtaacgaaacaggcaccgggctcgttcagccatgggtttgcggcaagaatggacgcggtcgaatcagcggcggtcggatgctcgatatgcaaccgttcccggatagcggcacgggcgagtttcagcagcacatcaccatgggctgttcccgattcgcctaagtcatctgcaccggctggagcatctgcttctggtttggattcccacgcggcaaacgagacatatcccactaccggctcgtcggcgtctcgcattgcggggcgaggttggccggcaagcgccaccacgccgtcgtcgccggaagtggaacagccgagctcgaagagcttcatgtccttgcggccttttaacacatccagaaggccgttgatcgggtatgcgccacaggcctggcgagggtgaatcggcagatgcaaagccgcaatgtccgcaatggtctggtcatccaacgcgcgggcgacttcgtgcggatgatagtgcgagagatccgaactaatcacgatgacggtttccgggccaccccacaaagcacgcaacacatcacccgcctcttgtggcgtggcatcgcccgcgttcaacggcacaatagtgaggtctgggccgagcacggtttgcaggaacggaatctgcacttctaccgcatgttcttgtgcgtgggttgggccattgacgatcattgcgggagccgacgcgcccggacgggcatgtgtaccggagcgcaatggctcattgacagacaggcccagagccttacgctcggctgcaatgtctaccggcacagtgcccagcggcgtttcaaacgccgctgccgtggaacaggcgacgcctcgcacggccacacggtgagtcggtcccacgattaccgcgcgagtcacactcccccgccctcgttcgagcaaagcataggcaagcgcggccgccgtgccggaatacacataaccggcatgcggcacgattacagcctttggcactcccgctggaagcgtgggctccaactgttgcagaacctctcgactgtaatccaattgatgggtaatgagttgcttgagcgttgtgcggtcagcggggtagaacgaaccagccaccgctggcggacgtattgcgccagtgattttgccgctgccgtctgccgcgcttgctgcatctgacgcactagccacactaaccgtatcgatttgcacaccggcccgggcggcctcgcgaacctcattgtttccacgaaatatctcggatagcaccataactaccacctcttattccatggtagccgttcagttcctcaatgaagacaagttcgcagtgtcttcttcggcttcaaggggccgattccgcctcttggagacatctacttgcatttcgaggggctggtcatccgctcaatcgcacatagaaacggcttcataccaacgtcattccgccgtttttaagcgttgtctacttgggcatcagccccttgaaacggaagtagatgtcccgaaaactcagaatccgcccctcgaagtgcagaaacactcaaattagcggtcgttcgatatatcgaccgtcagaataacgcgtcctgggcgaagtcatcatcgggattgacaccgaattcgtccggctcggcgggtttgaacgcgcttgcaccttcatcggccaactggtcggaagccgaggccgaggcttcgcgcaggtcgccgtcgagcaccacggcatcgggcgagacgaggaacatgcgttcgttgacgccagtcaaatacagtccgcccagcgattcgacgcgggacaacgccacatatcccatgcccggcgcgaaggtgcgcttcagatccatgaccgcacgatcaagcgtcatgccttgcgacttgtggatggtgatgccccacgcgcaacgcaacggcacctgcgagacggaggcgagcacggtgtcgccgtccatcatttcccatgtggcctgtttcatggtgacgatgttgccgttttcgaattccacgatcggccagccgcccttgttctcctgcgcgaagccgcgcacggtgccgagcgagccgttgacgtactggcgatcggtgtcgttgcgcagggccatgacagccgcgccctccttgagtaccagtcgctcgggggccagcatgttcttcttgagtcggtcgaccagattggcgggacccgcggtttcggcgtggaactcgtgcggctcaagcatgatctggttcaggcgcatgtcgttgagattgtcggcctgccggttcaccgggaataggtggacggcgacctggccgggctcgggcagtttgcccagacgggtgacgagcacgtcacggtcggactgggtcacgtcgccttcgcgaatgtcggtgagcacggtcagcagttcgccggtgtcctgacggtgctgttcggtcagatagcagattaccgggttgagttcgggccataccagcgattcggtgatgaagccttcggggttcaagccggcacgggcataccgttcgcgactggcgatgaattcgggggtgggggcgatgaggtcgcggttgcgcccggacaccgaaaccggcggcagttggaagaagtcgccggacagcacgacctggatgcctccgaacgggcgtgggtcgcgacgcacttcgcggcagacttggtcgaccatgtcgaacagccatgcgtgcagcatgga

SEQ ID NO: 3450 - DNA, 2763 bp, Unknown
  R151_18m  MAG No. k141_58996
atgatatcgttgtcatcatcaatacaacggttgggccttcacacagcagttcgggcgcgaccggaacaacccaaccacaacgcacccggaacaggagggaatcggcatgaccgcaaataacctcaatgacgactggtggaagcaggccgtcgtttaccagatctacccgcgcagcttcaaggacgttaacggcgacggcatcggcgacatcgccggcgtcaccgagaagatggactacctgaagagcctcggcgtggacgcaatctggctttccccgttctacccctccgacctagcggacggcggctacgacgtaatcgactaccgcaacgtcgacccgcgcctaggcaccatggaagacttcgacgcgatggccaaggccgcgcacgaggccggcatcaaggtgatcgtggacatcgtgcccaaccacaccgctgacaagcacgtgttcttccaggaggccctcgccgccgagcctggctccccggcgcgcgaccgctacatcttccgcgacggccgcggcgagcatggcgaactgcccccgaacgactggcaatccttcttcggcggcccggcctgggcgcgcgtggccgacggccagtggtatctgcacctgttcgataaggcgcagccggacgtcaactggaagaatccggacatccacgaggagttcaagaagaccctgcgtttctggtccgaccacggcaccgacggcttccgcatcgacgtggcgcacggcctggccaaggacctcgaatccaagccgttggaagagctcggccgcgaatacagcgtggtcggcgtgctgaatcatgacttcagccacccgctgttcgaccgtcgcgaggtgcacgatatctaccgcgaatggcgcaaggtgttcaacgagtacaacccgccgcgctttgccgtggccgaggcgtgggtggtgcccgagcaccagcacctgtacgcttcgatggacgagctgggccagtccttcaacttcgacttcgcgcaagccaactggtatgccgacgagttccgcgaggccatcgccgccggactcaaggcggcggccgaaaccggcggttccaccaccacgtgggtgatgaacaatcacgatgtgccgcgcagcccctcccgttacggcctgccgcagatcaagggcgcgccctaccaccagctgccgcacgactggctgctgcgcaacggcactacctatcccgaggatcgcgagcttggcacccgccgcgcccgcgccgccgctttgatggagctcggcctgcccggtgccgcctatatctatcagggcgaggagctgggcctgtttgaagtggccgatattccgtgggatcacttggaggatccgaccgctttccacactgctcaggccacgatggacaagggccgcgacggctgccgcgtgccgctgccgtggaccgccgccgatgagccggccttggccgatttcagccgtccgactccggccgatgacggtaccggcgagaaccatgtgccgctgtgcgccgccggccagttcggcacgggcgcttccttcggcttctcgccggctacgcgcgctgagggcgtgacgccggccgccgacccgcacctgccgcaaccgctgtggttcaaggattacgcggtggacgtggagcaagccgacccggactcgatgctcgcgctgtatcgcgccgcactggcgattcgccaggagtcgctgaccgccacgcgcgacaccacggccgagcaggtggacatgggcgacgatgtggtggcgtacacccgcgcggcggttggcgggcgggtgttcacctcaatcaccaacttcggcaatgccccggtcgcgctgcccgatggctccgtggtgctggcgtccggcccgctgacccccgaaggccagctccccaccgacacttctgcgtgggttgttcagtagatcccttggaataagcgaaaggccgccgttccgaatgaatcggagcgacggccttttggtatgcactggggaccaccctcaggcgcttacgcgccagcgtactgcaacacggacagcatgaaggctgcgattgccggctcgctgtccgttcgcacctcacccgaggggagccaaggaagaatcactgaacctgggcgcgggcgatcttgccggtgaaggagttggcctcgtcggcatccttgacgccatccttgttccaggagaacatggcgcgcagcttcgggccgacggtctcgatgcgctcgttggagtacttctcctgcagttccttgaagtgcggggcgccggcatcctgatcgtcgatgaactccttggcgaaggagccgtcctggatgcgctgcaggtggtattccatgcgcttgcggcagtcctcgttgatgacggtgttgacgtagtcgccgtactgggcggtgtcggagcaggaccaacgagccttgttcaggccgccctcgttcatcagatcgacgagcatcttgagctcgtggcagacctcgaagtaggcgatctccggctggtagccggcgtcggtcaggacttcgaagcccatctcgacgagcttgttcacgccacccatgagcacgttctgctcgccgaagagatcggtctcggtctcttccttgaaggtggtcttgatggcaccggcgcgcagagcaccgagggccttggcgtaggcgagggtcagagcccagccgtcaccgcgcgggtcctgctcgacggccacgacgaccgggacgccacggccagcagcgtactcacgacgaacgatgtggcccgggcccttc
